(19) United States
(12) Patent Application Publication
(10) Pub. No.: US 2023/0346928 A1
(43) Pub. Date: Nov. 2, 2023

(54) MRNA COMBINATION THERAPY FOR THE TREATMENT OF CANCER

(71) Applicant: ModernaTX, Inc., Cambridge, MA (US)

(72) Inventors: Joshua P. FREDERICK, Cambridge, MA (US); Susannah HEWITT, Cambridge, MA (US); Ailin BAI, Cambridge, MA (US); Stephen G. HOGE, Cambridge, MA (US); Vladimir PRESNYAK, Cambridge, MA (US); Iain MCFADYEN, Cambridge, MA (US); Kerry BENENATO, Cambridge, MA (US); Ellalahewage Sathyajith KUMARASINGHE, Cambridge, MA (US)

(21) Appl. No.: 18/190,453

(22) Filed: Mar. 27, 2023

Related U.S. Application Data
(63) Continuation of application No. 17/202,829, filed on Mar. 16, 2021, now Pat. No. 11,660,341.
Application No. 17/202,829 is a division of application No. 16/457,300, filed on Jun. 28, 2019, now Pat. No. 10,973,917.
Application No. 16/457,300 is a continuation of application No. 15/996,146, filed on Jun. 1, 2018, now Pat. No. 10,335,486.
Application No. 15/996,146 is a continuation of application No. PCT/US17/33425, filed on May 18, 2017.
(60) Provisional application No. 62/338,496, filed on May 18, 2016.
(60) Provisional application No. 62/338,501, filed on May 18, 2016.
(60) Provisional application No. 62/338,505, filed on May 18, 2016.
(60) Provisional application No. 62/338,506, filed on May 18, 2016.
(60) Provisional application No. 62/338,467, filed on May 18, 2016.
(60) Provisional application No. 62/338,507, filed on May 18, 2016.
(60) Provisional application No. 62/338,483, filed on May 18, 2016.
(60) Provisional application No. 62/338,530, filed on May 19, 2016.
(60) Provisional application No. 62/404,173, filed on Oct. 4, 2016.

(51) Int. Cl. A61K 39/395; C07K 14/54; C07K 14/705; C07K 16/28; A61K 39/39; A61K 45/06; A61K 31/713; A61K 48/00; A61K 39/00

(52) U.S. Cl. CPC A61K 39/39558; C07K 14/54; C07K 14/5434; C07K 14/5443; C07K 14/705; C07K 14/70503; C07K 14/70532; C07K 14/70575; C07K 14/70596; C07K 16/2818; A61K 39/39; A61K 45/06; A61K 31/713; A61K 48/005; A61K 39/0011; A61K 2039/505; A61K 2039/53; C07K 2317/76; C07K 2319/30; C07K 2319/32; A61K 2039/585; A61K 2039/51; A61P 35/00

(57) ABSTRACT

The present disclosure relates to the use of nucleic acid (e.g., mRNA) combination therapies for the treatment of cancer. The disclosure provides compositions, and methods for their preparation, manufacture, and therapeutic use, wherein those compositions comprise at least two polynucleotides (e.g., mRNAs) in combination wherein the at least two polynucleotides are selected from the group consisting of (i) a polynucleotide encoding an immune response primer (e.g., IL23), (ii) a polynucleotide encoding an immune response co-stimulatory signal (e.g., OX40L), (iii) a polynucleotide encoding a checkpoint inhibitor (e.g., an anti CTLA-4 antibody), and, (iv) a combination thereof. The therapeutic methods disclosed herein comprise, e.g., the administration of a combination therapy disclosed herein for the treatment of cancer, e.g., by reducing the size of a tumor or inhibiting the growth of a tumor, in a subject in need thereof. In some aspects, the combination therapies disclosed herein disclosed are administered intratumorally.

### RELATED APPLICATIONS

[0001] This Application is a Continuation of U.S. patent application Ser. No. 17/202,829 filed on Mar. 16, 2021, which is a Divisional of U.S. patent application Ser. No. 16/457,300 filed on Jun. 28, 2019, now U.S. Pat. No. 10,973,917 issued Apr. 13, 2021, which is a Continuation of U.S. patent application Ser. No. 15/996,146 filed on Jun. 1, 2018, now U.S. Pat. No. 10,335,486 issued on Jul. 2, 2019, which is a Continuation of Application PCT/US2017/033425 filed on May 18, 2017. Application PCT/US2017/033425 claims the benefit of U.S. Provisional Application Nos. 62/338,496, filed May 18, 2016; 62/338,483, filed May 18, 2016; 62/338,501, filed May 18, 2016; 62/338,505, filed May 18, 2016; 62/338,506, filed May 18, 2016; 62/338,467, filed May 18, 2016; 62/338,507, filed May 18, 2016; 62/338,530, filed May 19, 2016; and 62/404,173, filed Oct. 4, 2016, each of which is hereby incorporated by reference herein in its entirety.

### REFERENCE TO SEQUENCE LISTING SUBMITTED ELECTRONICALLY

[0002] The Sequence Listing associted with this application is provided electronically in XML file format and is hereby incorporated by reference into the specification. The name of the XML file containgin the Sequence Listing is MRNA_128_C03US_SeqList_ST26.xml. The XML file is 2,382,674 bytes and was created on Mar. 3, 2023.

### BACKGROUND

[0003] Cancer is a disease characterized by uncontrolled cell division and growth within the body. In the United States, roughly a third of all women and half of all men will experience cancer in their lifetime. Polypeptides are involved in every aspect of the disease including cancer cell biology (carcinogenesis, cell cycle suppression, DNA repair and angiogenesis), treatment (immunotherapy, hormone manipulation, enzymatic inhibition), diagnosis and determination of cancer type (molecular markers for breast, prostate, colon and cervical cancer for example). With the host of undesired consequences brought about by standard treatments such as chemotherapy and radiotherapy used today, genetic therapy for the manipulation of disease-related peptides and their functions provides a more targeted approach to disease diagnosis, treatment and management. However, gene therapy poses multiple challenges including undesirable immune response and safety concern due to the incorporation of the gene at random locations within the genome.

[0004] Various methods of treating cancer are under development. For example, dendritic cell (DC) vaccines have been studied as a possible anti-cancer therapy. However, DC vaccines require multiple steps of isolating DCs from a subject, ex vivo manipulation of DCs to prime the cells for tumor antigen presentation, and subsequent administration of the manipulated DCs back into the subject. Further, it is reported that the overall clinical response rates for DC vaccines remain low and the ability of DC vaccines to induce cancer regression remains low. See, e.g., Kalkinski et al., “Dendritic cell-based therapeutic cancer vaccines: what we have and what we need,” Future Oncol. 5(3):379-390 (2009).

[0005] Important goals for the field of immuno-oncology are to improve the response rate and increase the number of tumor indications that respond to immunotherapy, without increasing adverse side effects. One approach to achieve these goals is to use tumor-directed immunotherapy, i.e., to focus the immune activation to the most relevant part of the immune system. This may improve anti-tumor efficacy as well as reduce immune-related adverse events. Tumor-directed immune activation can be achieved by local injections of immune modulators directly into the tumor or into the tumor area. Therapies focused on targeting checkpoint inhibitors and co-stimulatory receptors can generate tumor-specific T cell responses through localized immune activation.

[0006] In recent years, the introduction of immune checkpoint inhibitors for therapeutic purposes has revolutionized cancer treatment. Of interest are therapies featuring combinations of checkpoint inhibitors with other costimulatory or inhibitory molecules.

[0007] T cell regulation, i.e., activation or inhibition is mediated via co-stimulatory or co-inhibitory signals. This interaction is exerted via ligand/receptor interaction. T cells harbor a myriad of both activating receptors, such as OX40, and inhibitory receptors (i.e., immune checkpoints) such as programmed death receptor 1 (PD-1) or cytotoxic T lymphocyte-associated protein 4 (CTLA-4) (Mellman et al. 2011 Nature.;480:480-489). Activation of this immune checkpoints results in T cell deactivation and commandeering these pathways by tumor cells contributes to their successful immune escape.

[0008] Immune checkpoint inhibitors such as pembrolizumab or nivolumab, which target the interaction between programmed death receptor 1/programmed death ligand 1 (PD-1/PD-L1) and PD-L2, have been recently approved for the treatment of various malignancies and are currently being investigated in clinical trials for cancers including melanoma, head and neck squamous cell carcinoma (HNSCC). Data available from these trials indicate substantial activity accompanied by a favorable safety and toxicity profile in these patient populations.

[0009] For example, checkpoint inhibitors have been tested in clinical trials for the treatment of melanoma. In particular, phase III clinical trials have revealed that therapies such as ipilimumab and pembrolizumab, which target the CTLA-4 and PD-1 immune checkpoints, respectively, have raised the three-year survival of patients with melanoma to ˜70%, and overall survival (>5 years) to ˜30%.

[0010] Likewise, checkpoint inhibitors have been tested in clinical trials for the treatment of head and neck cancer. In preclinical studies, it had been shown that that 45-80% of HNSCC tumors express programmed death ligand 1 (PD-L1) (Zandberg et al. (2014) Oral Oncol. 50:627-632). Currently there are dozens of clinical trials evaluating the efficacy and safety of immune checkpoint inhibitors as monotherapy or in combination regimens in HNSCC. For example, clinical trials with PD 1, PD-L1, and CTLA-4 inhibitors are being tested in HNSCC. Data that the PD-1 antibody pembrolizumab might be effective in metastatic/recurrent (R/M) HNSCC patients were generated in the phase 1b Keynote-012 phase I/II trial (Cheng. ASCO 2015, oral presentation). More recently the data of the randomized CheckMate-141 phase III clinical trial were presented (Gillison. AACR 2016, oral presentation). This study investigated the efficacy of the monoclonal PD-1 antibody nivolumab given every 2 weeks in platinum-refractory R/M HNSCC patients. The study was stopped early due to superiority of the nivolumab arm of the study.

[0011] Most immunotherapies available or under development rely on antibodies, which are cumbersome to manufacture, and being foreign proteins frequently lead to the development of anti-drug antibody neutralizing antibodies (ADA nAB). See, e.g., Krishna & Nadler (2016) “Immunogenicity to Biotherapeutic—The role of Anti-drug Immune Complexes” Frontiers in Immunology 7:21; Schellekwn (2010) “The immunogenicity of therapeutic proteins” Discov. Med, 9:560-4. Thus, there is still a need of effective immunotherapies for the treatment of cancer.

### BRIEF SUMMARY

[0012] The present disclosure provides A method of reducing the size of a tumor or inhibiting growth of a tumor in a subject in need thereof comprising administering to the subject at least two polynucleotides and optionally a checkpoint inhibitor polypeptide, wherein the at least two polynucleotides are selected from the group consisting of (i) a polynucleotide encoding an immune response primer polypeptide; (ii) a polynucleotide encoding an immune response co-stimulatory signal polypeptide; (iii) a polynucleotide encoding a checkpoint inhibitor polypeptide; and, (iv) a combination thereof.

[0013] Also provided is a method of reducing the size of a tumor or inhibiting growth of a tumor in a subject in need thereof comprising administering to the subject at least one polynucleotide and a checkpoint inhibitor polypeptide, wherein the at least one polynucleotides are selected from the group consisting of (i) a polynucleotide encoding an immune response primer polypeptide; (ii) a polynucleotide encoding an immune response co-stimulatory signal polypeptide; (iii) a combination thereof.

[0014] In some embodiments, the immune response primer polypeptide comprises interleukin 12 (IL12), interleukin (IL23), Toll-like receptor 4 (TLR4), interleukin 36 gamma (IL36gamma), interleukin 18 (IL18), or a combination thereof. In some embodiments, the immune response co-stimulatory signal polypeptide comprises tumor necrosis factor receptor superfamily member 4 ligand (OX40L), cluster of differentiation 80 (CD80), interleukin 15 (IL15), or a combination thereof. In some embodiments, the checkpoint inhibitor polypeptide inhibits programmed cell death protein 1 (PD1), programmed death-ligand 1 (PD-L1), or cytotoxic T-lymphocyte-associated protein 4 (CTLA-4).

[0015] In some embodiments of the methods disclosed above, (a) the first polynucleotide encodes an IL23 polypeptide and the second polynucleotide encodes an IL18 polypeptide; (b) the first polynucleotide encodes an IL23 polypeptide and the second polynucleotide encodes an IL12 polypeptide; (c) the first polynucleotide encodes an IL23 polypeptide and the second polynucleotide encodes an OX40L polypeptide; (d) the first polynucleotide encodes an IL12 polypeptide and the second polynucleotide encodes an anti-CTLA-4 antibody; (e) the first polynucleotide encodes an IL12 polypeptide and the second polynucleotide encodes an anti-PD-1 antibody or an anti-PD-L1 antibody; (f) the first polynucleotide encodes an IL23 polypeptide and the second polynucleotide encodes an anti-CTLA-4 antibody; (g) the first polynucleotide encodes an IL18 polypeptide and the second polynucleotide encodes an anti-PD-1 antibody or an anti-PD-L1 antibody; (h) the first polynucleotide encodes an IL18 polypeptide and the second polynucleotide encodes an anti-CTLA-4 antibody; (i) the first polynucleotide encodes an IL18 polypeptide and the second polynucleotide encodes an OX40L polypeptide; (j) the first polynucleotide encodes an IL18 polypeptide and the second polynucleotide encodes a TLR4 polypeptide; (k) the first polynucleotide encodes an IL18 polypeptide and the second polynucleotide encodes an IL12 polypeptide; (1) the first polynucleotide encodes an OX40L polypeptide and the second polynucleotide encodes an anti-CTLA-4 antibody;

[0016] (m) the first polynucleotide encodes an OX40L polypeptide and the second polynucleotide encodes an anti-PD-1 antibody or an anti-PD-L1 antibody; (n) the first polynucleotide encodes an OX40L polypeptide and the second polynucleotide encodes an caTLR4 polypeptide; (o) the first polynucleotide encodes an OX40L polypeptide and the second polynucleotide encodes an IL23 polypeptide; (p) the first polynucleotide encodes an OX40L polypeptide and the second polynucleotide encodes an IL12 polypeptide; (q) the first polynucleotide encodes a CD80 polypeptide and the second polynucleotide encodes an anti-CTLA-4 antibody; (r) the first polynucleotide encodes a TLR4 polypeptide and the second polynucleotide encodes an anti-CTLA-4 antibody; (s) the first polynucleotide encodes an IL18 polypeptide and the second polynucleotide encodes an IL12, and further comprising administering a third polynucleotide encoding an IL23 polypeptide; (t) the first polynucleotide encodes an OX40L polypeptide and the second polynucleotide encodes a TLR4 polypeptide, and further comprising administering a third polynucleotide encoding an IL18 polypeptide; (u) the first polynucleotide encodes an OX40L polypeptide and the second polynucleotide encodes an IL12 polypeptide, and further comprising administering a third polynucleotide encoding an IL23 polypeptide; (v) the first polynucleotide encodes an IL23 polypeptide and the second polynucleotide encodes an IL12 polypeptide, and further comprising administering a third polynucleotide encoding an anti-CTLA-4 antibody; (w) the first polynucleotide encodes an IL23 polypeptide and the second polynucleotide encodes an IL18 polypeptide, and further comprising administering a third polynucleotide encoding an anti-CTLA-4 antibody; (x) the first polynucleotide encodes an IL23 polypeptide and the second polynucleotide encodes an IL12 polypeptide, and further comprising administering a third polynucleotide encoding an IL18 polypeptide and administering a fourth polynucleotide encoding an anti-CTLA-4 antibody; (y) the first polynucleotide encodes an IL23 polypeptide and the second polynucleotide encodes an IL12 polypeptide, and further comprising administering a third polynucleotide encoding an IL18 polypeptide and administering a fourth polynucleotide encoding an anti-PD-1 antibody or an anti-PD-L1 antibody; (z) the first polynucleotide encodes an OX40L polypeptide and the second polynucleotide encodes an IL18 polypeptide, and further comprising administering a third polynucleotide encoding a TLR4 polypeptide and administering a fourth polynucleotide encoding an anti-CTLA-4 antibody; or (aa) the first polynucleotide encodes an OX40L polypeptide and the second polynucleotide encodes an IL18 polypeptide, and further comprising administering a third polynucleotide encoding a TLR4 polypeptide and administering a fourth polynucleotide encoding an anti-PD-1 antibody or an anti-PD-L1 antibody.

[0017] In some embodiments of the methods disclosed above, the at least two polynucleotides are (i) a first polynucleotide encoding an immune response primer polypeptide and a second polynucleotide encoding an immune response primer polypeptide; (ii) a first a polynucleotide encoding an immune response primer polypeptide and a second polynucleotide encoding an immune response co-stimulatory signal polypeptide; or (iii) (i) or (ii) further comprising a polynucleotide encoding a checkpoint inhibitor polypeptide.

[0018] Also provided is a method of reducing the size of a tumor or inhibiting growth of a tumor in a subject in need thereof comprising administering to the subject at least two polynucleotides encoding a first polypeptide and a second polypeptide and optionally a checkpoint inhibitor polypeptide, wherein the first polypeptide and the second polypeptide are selected from the group consisting of (i) an IL12 polypeptide; (ii) an IL23 polypeptide, (iii) an IL36gamma polypeptide; (iv) an OX40L polypeptide; (v) a CD80 polypeptide; (vi) a TLR4 polypeptide; (vii) an IL18 polypeptide; (viii) an IL15 polypeptide; (ix) an anti-CTLA-4 antibody; and, (x) a combination thereof.

[0019] Also provided is a method of reducing the size of a tumor or inhibiting growth of a tumor in a subject in need thereof comprising administering to the subject at least one polynucleotide encoding a first polypeptide in combination with a second polypeptide, which is a checkpoint inhibitor polypeptide, wherein the first polypeptide is selected from the group consisting of (i) an IL12 polypeptide; (ii) an IL23 polypeptide, (iii) an IL36gamma polypeptide; (iv) an OX40L polypeptide; (v) a CD80 polypeptide; (vi) a TLR4 polypeptide; (vii) an IL18 polypeptide; (viii) an IL15 polypeptide; and, (ix) a combination thereof.

[0020] Also provided is a method of reducing the size of a tumor or inhibiting growth of a tumor in a subject in need thereof comprising administering to the subject at least two polynucleotides comprising a first polynucleotide and a second polynucleotide and optionally a checkpoint inhibitor polypeptide, wherein the first polynucleotide encodes an IL12 polypeptide and the second polynucleotide encodes a polypeptide selected from the group consisting of (i) an immune response primer polypeptide; (ii) an immune response co-stimulatory signal polypeptide; (iii) a checkpoint inhibitor polypeptide; and, (iv) any combination thereof.

[0021] Also provided is a method of reducing the size of a tumor or inhibiting growth of a tumor in a subject in need thereof comprising administering (a) at least one polynucleotide encoding a first polypeptide and (b) a second polypeptide, which is a checkpoint inhibitor polypeptide, wherein the first polypeptide comprises an IL12 polypeptide. In some aspects, the method further comprises administering a third polynucleotide encoding a third polypeptide, which is selected from the group consisting of an immune response primer polypeptide, an immune response co-stimulatory signal polypeptide, and a checkpoint inhibitor polypeptide.

[0022] Also provided is a method of reducing the size of a tumor or inhibiting growth of a tumor in a subject in need thereof comprising administering to the subject at least two polynucleotides comprising a first polynucleotide and a second polynucleotide and optionally a checkpoint inhibitor polypeptide, wherein the first polynucleotide encodes an IL23 polypeptide and the second polynucleotide encodes a polypeptide selected from the group consisting of (i) an immune response primer polypeptide; (ii) an immune response co-stimulatory signal polypeptide; (iii) a checkpoint inhibitor polypeptide; and, (iv) any combination thereof.

[0023] Also provided is a method of reducing the size of a tumor or inhibiting growth of a tumor in a subject in need thereof comprising administering (a) at least one polynucleotide encoding a first polypeptide and (b) a second polypeptide, which is a checkpoint inhibitor polypeptide, wherein the first polypeptide comprises an IL23 polypeptide. In some embodiments, the method further comprises administering a third polynucleotide encoding a third polypeptide, which is selected from the group consisting of an immune response primer polypeptide, an immune response co-stimulatory signal polypeptide, and a checkpoint inhibitor polypeptide.

[0024] Also provided is a method of reducing the size of a tumor or inhibiting growth of a tumor in a subject in need thereof comprising administering to the subject at least two polynucleotides comprising a first polynucleotide and a second polynucleotide and optionally a checkpoint inhibitor polypeptide, wherein the first polynucleotide encodes an OX40L polypeptide and the second polynucleotide encodes a polypeptide selected from the group consisting of (i) an immune response primer polypeptide; (ii) an immune response co-stimulatory signal polypeptide; (iii) a checkpoint inhibitor polypeptide; and, (iv) any combination thereof.

[0025] Also provided is a method of reducing the size of a tumor or inhibiting growth of a tumor in a subject in need thereof comprising administering (a) at least one polynucleotide encoding a first polypeptide and (b) a second polypeptide, which is a checkpoint inhibitor polypeptide, wherein the first polypeptide comprises an OX40L polypeptide. In some embodiments, the method further comprises administering a third polynucleotide encoding a third polypeptide, which is selected from the group consisting of an immune response primer polypeptide, an immune response co-stimulatory signal polypeptide, and a checkpoint inhibitor polypeptide.

[0026] Also provided is a method of reducing the size of a tumor or inhibiting growth of a tumor in a subject in need thereof comprising administering to the subject at least two polynucleotides comprising a first polynucleotide and a second polynucleotide and optionally a checkpoint inhibitor polypeptide, wherein the first polynucleotide encodes a CD80 polypeptide and the second polynucleotide encodes a polypeptide selected from the group consisting of (i) an immune response primer polypeptide; (ii) an immune response co-stimulatory signal polypeptide; (iii) a checkpoint inhibitor polypeptide; and, (iv) any combination thereof.

[0027] Also provided is a method of reducing the size of a tumor or inhibiting growth of a tumor in a subject in need thereof comprising administering (a) at least one polynucleotide encoding a first polypeptide and (b) a second polypeptide, which is a checkpoint inhibitor polypeptide, wherein the first polypeptide comprises a CD80 polypeptide. In some embodiments, the method further comprises administering a third polynucleotide encoding a third polypeptide, which is selected from the group consisting of an immune response primer polypeptide, an immune response co-stimulatory signal polypeptide, and a checkpoint inhibitor polypeptide.

[0028] Also provided is a method of reducing the size of a tumor or inhibiting growth of a tumor in a subject in need thereof comprising administering to the subject at least two polynucleotides comprising a first polynucleotide and a second polynucleotide and optionally a checkpoint inhibitor polypeptide, wherein the first polynucleotide encodes a TLR4 polypeptide and the second polynucleotide encodes a polypeptide selected from the group consisting of (i) an immune response primer polypeptide; (ii) an immune response co-stimulatory signal polypeptide; (iii) a checkpoint inhibitor polypeptide; and, (iv) any combination thereof.

[0029] Also provided is a method of reducing the size of a tumor or inhibiting growth of a tumor in a subject in need thereof comprising administering (a) at least one polynucleotide encoding a first polypeptide and (b) a second polypeptide, which is a checkpoint inhibitor polypeptide, wherein the first polypeptide comprises a TLR4 polypeptide. In some embodiments, the method further comprises administering a third polynucleotide encoding a third polypeptide, which is selected from the group consisting of an immune response primer polypeptide, an immune response co-stimulatory signal polypeptide, and a checkpoint inhibitor polypeptide.

[0030] Also provided is a method of reducing the size of a tumor or inhibiting growth of a tumor in a subject in need thereof comprising administering to the subject at least two polynucleotides comprising a first polynucleotide and a second polynucleotide and optionally a checkpoint inhibitor polypeptide, wherein the first polynucleotide encodes an IL18 polypeptide and the second polynucleotide encodes a polypeptide selected from the group consisting of (i) an immune response primer polypeptide; (ii) an immune response co-stimulatory signal polypeptide; (iii) a checkpoint inhibitor polypeptide; and, (iv) any combination thereof.

[0031] Also provided is a method of reducing the size of a tumor or inhibiting growth of a tumor in a subject in need thereof comprising administering (a) at least one polynucleotide encoding a first polypeptide and (b) a second polypeptide, which is a checkpoint inhibitor polypeptide, wherein the first polypeptide comprises an IL18 polypeptide. In some embodiments, the method further comprises administering a third polynucleotide encoding a third polypeptide, which is selected from the group consisting of an immune response primer polypeptide, an immune response co-stimulatory signal polypeptide, and a checkpoint inhibitor polypeptide.

[0032] Also provided is a method of reducing the size of a tumor or inhibiting growth of a tumor in a subject in need thereof comprising administering to the subject at least two polynucleotides comprising a first polynucleotide and a second polynucleotide and optionally a checkpoint inhibitor polypeptide, wherein the first polynucleotide encodes an IL15 polypeptide and the second polynucleotide encodes a polypeptide selected from the group consisting of (i) an immune response primer polypeptide; (ii) an immune response co-stimulatory signal polypeptide; (iii) a checkpoint inhibitor polypeptide; and, (iv) any combination thereof.

[0033] Also provided is a method of reducing the size of a tumor or inhibiting growth of a tumor in a subject in need thereof comprising administering (a) at least one polynucleotide encoding a first polypeptide and (b) a second polypeptide, which is a checkpoint inhibitor polypeptide, wherein the first polypeptide comprises an IL15 polypeptide. In some embodiments, the method further comprises administering a third polynucleotide encoding a third polypeptide, which is selected from the group consisting of an immune response primer polypeptide, an immune response co-stimulatory signal polypeptide, and a checkpoint inhibitor polypeptide.

[0034] Also provided is a method of reducing the size of a tumor or inhibiting growth of a tumor in a subject in need thereof comprising administering to the subject at least two polynucleotides comprising a first polynucleotide and a second polynucleotide and optionally a checkpoint inhibitor polypeptide, wherein the first polynucleotide encodes an IL36gamma polypeptide and the second polynucleotide encodes a polypeptide selected from the group consisting of (i) an immune response primer polypeptide; (ii) an immune response co-stimulatory signal polypeptide; (iii) a checkpoint inhibitor polypeptide; and, (iv) any combination thereof.

[0035] Also provided is a method of reducing the size of a tumor or inhibiting growth of a tumor in a subject in need thereof comprising administering (a) at least one polynucleotide encoding a first polypeptide and (b) a second polypeptide, which is a checkpoint inhibitor polypeptide, wherein the first polypeptide comprises an IL36gamma polypeptide. In some embodiments, the method further comprises administering a third polynucleotide encoding a third polypeptide, which is selected from the group consisting of an immune response primer polypeptide, an immune response co-stimulatory signal polypeptide, and a checkpoint inhibitor polypeptide.

[0036] In some embodiments of the methods disclosed above, the checkpoint inhibitor polypeptide is an antibody or a polynucleotide encoding the antibody. In some embodiments, the antibody is an anti-CTLA-4 antibody or antigen-binding fragment thereof that specifically binds CTLA-4, an anti-PD1 antibody or antigen-binding fragment thereof that specifically binds PD1, an anti-PD-L1 antibody or antigen-binding fragment thereof that specifically binds PD-L1, and a combination thereof. In some embodiments, the anti-PD-L1 antibody is atezolizumab, avelumab, or durvalumab. In some embodiments, the anti-CTLA-4 antibody is tremelimumab or ipilimumab. In some embodiments, the anti-PD-1 antibody is nivolumab or pembrolizumab.

[0037] In some embodiments of the methods disclosed above, the at least one or two polynucleotides reduces the size of a tumor derived from MC38(C) or inhibits growth of a tumor derived from MC38(C) in a mouse when a dose of 5 μg of each polynucleotide is administered to the mouse. In some embodiments, the at least one or two polynucleotides reduce the size of a tumor derived from MC38(M) or inhibit growth of a tumor derived from MC38(M) in a mouse when a dose of 5 μg of each polynucleotide is administered to the mouse.

[0038] In some embodiments, one or more of the polynucleotides in the combination therapy comprise at least one chemically modified nucleoside. In some embodiments, the at least one chemically modified nucleoside is selected from the group consisting of any of those listed in Section X (“Chemical Modifications”) and a combination thereof. In some embodiments, the at least one chemically modified nucleoside is selected from the group consisting of pseudouridine, N1-methylpseudouridine, 5-methylcytosine, 5-methoxyuridine, and a combination thereof. In some embodiments, the nucleosides in one or more of the polynucleotides are chemically modified by at least 10%, at least 20%, at least 30%, at least 40%, at least 50%, at least 60%, at least 70%, at least 80%, at least 90%, at least 95%, at least 99%, or 100%.

[0039] In some embodiments, the chemically modified nucleosides in one or more of the polynucleotides are selected from the group consisting of uridine, adenine, cytosine, guanine, and any combination thereof. In some embodiments, the uridine nucleosides in one or more of the polynucleotides are chemically modified by at least 10%, at least 20%, at least 30%, at least 40%, at least 50%, at least 60%, at least 70%, at least 80%, at least 90%, at least 95%, at least 99%, or 100%. In some embodiments, the adenosine nucleosides in one or more of the polynucleotides are chemically modified by at least 10%, at least 20%, at least 30%, at least 40%, at least 50%, at least 60%, at least 70%, at least 80%, at least 90%, at least 95%, at least 99%, or 100%.

[0040] In some embodiments, the cytidine nucleosides in one or more of the polynucleotides are chemically modified by at least 10%, at least 20%, at least 30%, at least 40%, at least 50%, at least 60%, at least 70%, at least 80%, at least 90%, at least 95%, at least 99%, or 100%. In some embodiments, the guanosine nucleosides in one or more of the polynucleotides are chemically modified by at least 10%, at least 20%, at least 30%, at least 40%, at least 50%, at least 60%, at least 70%, at least 80%, at least 90%, at least 95%, at least 99%, or 100%.

[0041] In some embodiments, one or more of the polynucleotides comprises miRNA binding site. In some embodiments, the miRNA binding site is a miR-122 binding site. In some embodiments, the miRNA binding site is a miR-122-3p or miR-122-5p binding site. In some embodiments, the miRNA binding site comprises a nucleotide sequence at least 80%, at least 85%, at least 90%, at least 95%, or 100% identical to aacgccauua ucacacuaaa ua (SEQ ID NO: 1212), wherein the miRNA binding site binds to miR-122. In some embodiments, the miRNA binding site comprises a nucleotide sequence at least 80%, at least 85%, at least 90%, at least 95%, or 100% identical to uggaguguga caaugguguu ug (SEQ ID NO: 1214), wherein the miRNA binding site binds to miR-122. In some embodiments, the polynucleotides comprise different miRNA binding sites or the same miRNA binding site.

[0042] In some embodiments, one or more of the polynucleotides comprise a 5′ untranslated region (UTR). In some embodiments, the 5′ UTR comprises a nucleic acid sequence at least 90%, 95%, 96%, 97%, 98%, 99%, or 100% identical to a sequence listed in TABLE 20. In some embodiments, one or more of the polynucleotides comprise a 3′ untranslated region (UTR). In some embodiments, the 3′ UTR comprises a nucleic acid sequence at least 90%, 95%, 96%, 97%, 98%, 99%, or 100% identical to a sequence listed in Table 4A or 4B. In some embodiments, the miRNA binding site is inserted within the 3′ UTR. In some embodiments, one or more of the polynucleotides comprise a spacer sequence fused to the miRNA binding site.

[0043] In some embodiments, the spacer sequence comprises at least about 10 nucleotides, at least about 20 nucleotides, at least about 30 nucleotides, at least about 40 nucleotides, at least about 50 nucleotides, at least about 60 nucleotides, at least about 70 nucleotides, at least about 80 nucleotides, at least about 90 nucleotides, or at least about 100 nucleotides.

[0044] In some embodiments, one or more of the polynucleotides comprise a 5′ terminal cap structure. In some embodiments, the 5′ terminal cap is a Cap0, Cap1, ARCA, inosine, N1-methyl-guanosine, 2′fluoro-guanosine, 7-deaza-guanosine, 8-oxo-guanosine, 2-amino-guanosine, LNA-guanosine, 2-azidoguanosine, Cap2, Cap4, 5′ methylG cap, or an analog thereof. In some embodiments, one or more of the polynucleotides comprise a 3′ polyA tail. In some embodiments, one or more of the polynucleotides comprise at least two, at least three, at least four, at least five, at least six, at least seven, at least eight, at least nine, or at least ten miRNA binding sites.

[0045] In some embodiments, one or more of the polynucleotides are codon optimized. In some embodiments, one or more of the polynucleotides are in vitro transcribed (IVT). In some embodiments, one or more of the polynucleotides are chimeric. In some embodiments, one or more of the polynucleotides are circular. In some embodiments, one or more of the polynucleotides is formulated with a delivery agent. In some embodiments, the delivery agent comprises a lipidoid, a liposome, a lipoplex, a lipid nanoparticle, a polymeric compound, a peptide, a protein, a cell, a nanoparticle mimic, a nanotube, or a conjugate. In some embodiments, the delivery agent is a lipid nanoparticle. In some embodiments, the lipid nanoparticle comprises the lipid selected from the group consisting of DLin-DMA, DLin-K-DMA, 98N12-5, C12-200, DLin-MC3-DMA, DLin-KC2-DMA, DODMA, PLGA, PEG, PEG-DMG, PEGylated lipids, amino alcohol lipids, KL22, and combinations thereof.

[0046] In some embodiments of the methods disclosed above, the delivery agent comprises a compound having formula (I)

[chemical structure]

or a salt or stereoisomer thereof, wherein R₁ is selected from the group consisting of C₅₋₂₀ alkyl, C₅₋₂₀ alkenyl, -R*YR″, -YR″, and -R″M′R′; R₂ and R₃ are independently selected from the group consisting of H, C₁₋₁₄ alkyl, C₂₋₁₄ alkenyl, -R*YR″, -YR″, and -R*OR″, or R₂ and R₃, together with the atom to which they are attached, form a heterocycle or carbocycle; R₄ is selected from the group consisting of a C₃₋₆ carbocycle, —(CH₂)ₙQ, —(CH₂)ₙCHQR, —CHQR, —CQ(R)₂, and unsubstituted C₁₋₆ alkyl, where Q is selected from a carbocycle, heterocycle, —OR, —O(CH₂)ₙN(R)₂, —C(O)OR, —OC(O)R, —CX₃, —CX₂H, —CXH₂, —CN, —N(R)₂, —C(O)N(R)₂, —N(R)C(O)R, —N(R)S(O)₂R, —N(R)C(O)N(R)₂, —N(R)C(S)N(R)₂, and -(R)N(R)₂C(O)OR, and each n is independently selected from 1, 2, 3, 4, and 5; each R₅ is independently selected from the group consisting of C₁₋₃ alkyl, C₂₋₃ alkenyl, and H; each R₆ is independently selected from the group consisting of C₁₋₃ alkyl, C₂₋₃ alkenyl, and H; M and M′ are independently selected from —C(O)O—, —OC(O)—, —C(O)N(R′)-, —N(R′)C(O)—, —C(O)—, —C(S)—, —C(S)S—, —SC(S)—, —CH(OH)—, —P(O)(OR′)O—, —S(O)₂—, an aryl group, and a heteroaryl group; R₇ is selected from the group consisting of C₁₋₃ alkyl, C₂₋₃ alkenyl, and H; each R is independently selected from the group consisting of C₁₋₃ alkyl, C₂₋₃ alkenyl, and H; each R′ is independently selected from the group consisting of C₁₋₁₈ alkyl, C₂₋₁₈ alkenyl, -R*YR″, -YR″, and H; each R″ is independently selected from the group consisting of C₃₋₁₄ alkyl and C₃₋₁₄ alkenyl; each R* is independently selected from the group consisting of C₁₋₁₂ alkyl and C₂₋₁₂ alkenyl; each Y is independently a C₃₋₆ carbocycle; each X is independently selected from the group consisting of F, Cl, Br, and I; and m is selected from 5, 6, 7, 8, 9, 10, 11, 12, and 13; and provided when R₄ is —(CH₂)ₙQ, —(CH₂)ₙCHQR, —CHQR, or -CQ(R)₂, then (i) Q is not -N(R)₂ when n is 1, 2, 3, 4 or 5, or (ii) Q is not 5, 6, or 7-membered heterocycloalkyl when n is 1 or 2.

[0047] In some embodiments, the compound is of Formula (IA):

[chemical structure]

or a salt or stereoisomer thereof, wherein 1 is selected from 1, 2, 3, 4, and 5; m is selected from 5, 6, 7, 8, and 9; M₁ is a bond or M′; R₄ is unsubstituted C₁₋₃ alkyl, or —(CH₂)ₙQ, in which n is 1, 2, 3, 4, or 5 and Q is OH, —NHC(S)N(R)₂, or —NHC(O)N(R)₂; M and M′ are independently selected from —C(O)O—, —OC(O)—, —C(O)N(R′)-, —P(O)(OR′)O—, an aryl group, and a heteroaryl group; and R₂ and R₃ are independently selected from the group consisting of H, C₁₋₁₄ alkyl, and C₂₋₁₄ alkenyl. In some embodiments, m is 5, 7, or 9.

[0048] In some embodiments, the compound is of Formula (II):

[chemical structure]

or a salt or stereoisomer thereof, wherein 1 is selected from 1, 2, 3, 4, and 5; M₁ is a bond or M′; R₄ is unsubstituted C₁₋₃ alkyl, or —(CH₂)ₙQ, in which n is 2, 3, or 4 and Q is —OH, —NHC(S)N(R)₂, or —NHC(O)N(R)₂; M and M′ are independently selected from —C(O)O—, —OC(O)—, —C(O)N(R′)-, —P(O)(OR′)O—, an aryl group, and a heteroaryl group; and R₂ and R₃ are independently selected from the group consisting of H, C₁₋₁₄ alkyl, and C₂₋₁₄ alkenyl.

[0049] In some embodiments, the compound is selected from Compound 1 to Compound 147, and salts and stereoisomers thereof.

[0050] In some embodiments, the compound is of the Formula (IIa),

[chemical structure]

[0051] In some embodiments, the compound is of the Formula (IIb),

[chemical structure]

or a salt or stereoisomer thereof.

[0052] In some embodiments, the compound is of the Formula (IIc) or (IIe),

[chemical structure]

or a salt or stereoisomer thereof.

[0053] In some embodiments, R₄ is selected from —(CH₂)ₙQ and —(CH₂)ₙCHQR, wherein Q, R and n are as defined above.

[0054] In some embodiments, the compound is of the Formula (IId),

[chemical structure]

or a salt or stereoisomer thereof, wherein R₂ and R₃ are independently selected from the group consisting of C₅₋₁₄ alkyl and C₅₋₁₄ alkenyl, n is selected from 2, 3, and 4, and R′, R″, R₅, R₆ and m are as defined above.

[0055] In some embodiments, R₂ is C₈ alkyl. In some embodiments, R₃ is C₅ alkyl, C₆ alkyl, C₇ alkyl, C₈ alkyl, or C₉ alkyl. In some embodiments, m is 5, 7, or 9.89. In some embodiments, each R₅ is H. In some embodiments, each R₆ is H.

[0056] In some embodiments, the delivery agent further comprises a phospholipid. In some embodiments, the phospholipid is selected from the group consisting of
[0057] 1,2-dilinoleoyl-sn-glycero-3-phosphocholine (DLPC),
[0058] 1,2-dimyristoyl-sn-glycero-phosphocholine (DMPC),
[0059] 1,2-dioleoyl-sn-glycero-3-phosphocholine (DOPC),
[0060] 1,2-dipalmitoyl-sn-glycero-3-phosphocholine (DPPC),
[0061] 1,2-distearoyl-sn-glycero-3-phosphocholine (DSPC),
[0062] 1,2-diundecanoyl-sn-glycero-phosphocholine (DUPC),
[0063] 1-palmitoyl-2-oleoyl-sn-glycero-3-phosphocholine (POPC),
[0064] 1,2-di-O-octadecenyl-sn-glycero-3-phosphocholine (18:0 Diether PC),
[0065] 1-oleoyl-2-cholesterylhemisuccinoyl-sn-glycero-3-phosphocholine (OChemsPC),
[0066] 1-hexadecyl-sn-glycero-3-phosphocholine (C16 Lyso PC),
[0067] 1,2-dilinolenoyl-sn-glycero-3-phosphocholine,
[0068] 1,2-diarachidonoyl-sn-glycero-3-phosphocholine,
[0069] 1,2-didocosahexaenoyl-sn-gly cero-3-phosphocholine,
[0070] 1,2-dioleoyl-sn-glycero-3-phosphoethanolamine (DOPE),
[0071] 1,2-diphytanoyl-sn-glycero-3-phosphoethanolamine (ME 16:0 PE),
[0072] 1,2-distearoyl-sn-glycero-3-phosphoethanolamine,
[0073] 1,2-dilinoleoyl-sn-gly cero-3-phosphoethanolamine,
[0074] 1,2-dilinolenoyl-sn-gly cero-3-phosphoethanolamine,
[0075] 1,2-diarachidonoyl-sn-glycero-3-phosphoethanolamine,
[0076] 1,2-didocosahexaenoyl-sn-gly cero-3-phosphoethanolamine,
[0077] 1,2-dioleoyl-sn-glycero-3-phospho-rac-(1-glycerol) sodium salt (DOPG), sphingomyelin,
[0078] and mixtures thereof.

[0079] In some embodiments, the phospholipid is selected from the group consisting of
[0080] 1-myristoyl-2-palmitoyl-sn-glycero-3-phosphocholine (14:0-16:0 PC, MPPC),
[0081] 1-myristoyl-2-stearoyl-sn-glycero-3-phosphocholine (14:0-18:0 PC, MSPC),
[0082] 1-palmitoyl-2-acetyl-sn-glycero-3-phosphocholine (16:0-02:0 PC),
[0083] 1-palmitoyl-2-myristoyl-sn-glycero-3-phosphocholine (16:0-14:0 PC, PMPC),
[0084] 1-palmitoyl-2-stearoyl-sn-glycero-3-phosphocholine (16:0-18:0 PC, PSPC),
[0085] 1-palmitoyl-2-oleoyl-sn-glycero-3-phosphocholine (16:0-18:1 PC, POPC),
[0086] 1-palmitoyl-2-linoleoyl-sn-glycero-3-phosphocholine (16:0-18:2 PC, PLPC),
[0087] 1-palmitoyl-2-arachidonoyl-sn-glycero-3-phosphocholine (16:0-20:4 PC),
[0088] 1-palmitoyl-2-docosahexaenoyl-sn-glycero-3-phosphocholine (14:0-22:6 PC),
[0089] 1-stearoyl-2-myristoyl-sn-glycero-3-phosphocholine (18:0-14:0 PC, SMPC),
[0090] 1-stearoyl-2-palmitoyl-sn-glycero-3-phosphocholine (18:0-16:0 PC, SPPC),
[0091] 1-stearoyl-2-oleoyl-sn-glycero-3-phosphocholine (18:0-18:1 PC, SOPC),
[0092] 1-stearoyl-2-linoleoyl-sn-glycero-3-phosphocholine (18:0-18:2 PC),
[0093] 1-stearoyl-2-arachidonoyl-sn-glycero-3-phosphocholine (18:0-20:4 PC),
[0094] 1-stearoyl-2-docosahexaenoyl-sn-glycero-3-phosphocholine (18:0-22:6 PC),
[0095] 1-oleoyl-2-myristoyl-sn-glycero-3-phosphocholine (18:1-14:0 PC, OMPC),
[0096] 1-oleoyl-2-palmitoyl-sn-glycero-3-phosphocholine (18:1-16:0 PC, OPPC),
[0097] 1-oleoyl-2-stearoyl-sn-glycero-3-phosphocholine (18:1-18:0 PC, OSPC),
[0098] 1-palmitoyl-2-oleoyl-sn-glycero-3-phosphoethanolamine (16:0-18:1 PE, POPE),
[0099] 1-palmitoyl-2-linoleoyl-sn-glycero-3-phosphoethanolamine (16:0-18:2 PE),
[0100] 1-palmitoyl-2-arachidonoyl-sn-glycero-3-phosphoethanolamine (16:0-20:4 PE),
[0101] 1-palmitoyl-2-docosahexaenoyl-sn-glycero-3-phosphoethanolamine (16:0-22:6 PE),
[0102] 1-stearoyl-2-oleoyl-sn-glycero-3-phosphoethanolamine (18:0-18:1 PE),
[0103] 1-stearoyl-2-linoleoyl-sn-glycero-3-phosphoethanolamine (18:0-18:2 PE),
[0104] 1-stearoyl-2-arachidonoyl-sn-glycero-3-phosphoethanolamine (18:0-20:4 PE),
[0105] 1-stearoyl-2-docosahexaenoyl-sn-glycero-3-phosphoethanolamine (18:0-22:6 PE),
[0106] 1-oleoyl-2-cholesterylhemisuccinoyl-sn-glycero-3-phosphocholine (OChemsPC), and any combination thereof.

[0107] In some embodiments, the delivery agent further comprises a structural lipid. In some embodiments, the structural lipid is selected from the group consisting of cholesterol, fecosterol, sitosterol, ergosterol, campesterol, stigmasterol, brassicasterol, tomatidine, ursolic acid, alpha-tocopherol, and mixtures thereof.

[0108] In some embodiments, the delivery agent further comprises a PEG lipid. In some embodiments, the PEG lipid is selected from the group consisting of a PEG-modified phosphatidylethanolamine, a PEG-modified phosphatidic acid, a PEG-modified ceramide, a PEG-modified dialkylamine, a PEG-modified diacylglycerol, a PEG-modified dialkylglycerol, and mixtures thereof.

[0109] In some embodiments, the delivery agent further comprises an ionizable lipid selected from the group consisting of
[0110] 3-(didodecylamino)-N1,N1,4-tridodecyl-1-piperazineethanamine (KL10),
[0111] N1-[2-(didodecylamino)ethyl]-N1,N4,N4-tridodecyl-1,4-piperazinediethanamine (KL22),
[0112] 14,25-ditridecyl-15,18,21,24-tetraaza-octatriacontane (KL25),
[0113] 1,2-dilinoleyloxy-N,N-dimethylaminopropane (DLin-DMA),
[0114] 2,2-dilinoleyl-4-dimethylaminomethyl-[1,3]-dioxolane (DLin-K-DMA),
[0115] heptatriaconta-6,9,28,31-tetraen-19-yl 4-(dimethylamino)butanoate (DLin-MC3-DMA),
[0116] 2,2-dilinoleyl-4-(2-dimethylaminoethyl)-[1,3]-dioxolane (DLin-KC2-DMA),
[0117] 1,2-dioleyloxy-N,N-dimethylaminopropane (DODMA),
[0118] 2-({8-[(3 p)-cholest-5-en-3-yloxy]octyl}oxy)-N,N-dimethyl-3-[(9Z,12Z)-octadeca-9,12-die n-1-yloxy]propan-1-amine (Octyl-CLinDMA),
[0119] (2R)-2-({8-[(3 p)-cholest-5-en-3-yloxy]octyl}oxy)-N,N-dimethyl-3-[(9Z,12Z)-octadeca-9,1 2-dien-1-yloxy]propan-1-amine (Octyl-CLinDMA (2R)), and
[0120] (2S)-2-({8-[(3p)-cholest-5-en-3-yloxy]octyl}oxy)-N,N-dimethyl-3-[(9Z,12Z)-octadeca-9,1 2-dien-1-yloxy]propan-1-amine (Octyl-CLinDMA (2S)).

[0121] In some embodiments, the delivery agent further comprises a quaternary amine compound. In some embodiments, the quaternary amine compound is selected from the group consisting of
[0122] 1,2-dioleoyl-3-trimethylammonium-propane (DOTAP),
[0123] N-[1-(2,3-dioleoyloxy)propyl]-N,N,N-trimethylammonium chloride (DOTMA),
[0124] 1-[2-(oleoyloxy)ethyl]-2-oleyl-3-(2-hydroxyethyl)imidazolinium chloride (DOTIM),
[0125] 2,3-dioleyloxy-N-[2(sperminecarboxamido)ethyl]-N,N-dimethyl-1-propanaminium trifluoroacetate (DOSPA),
[0126] N,N-distearyl-N,N-dimethylammonium bromide (DDAB),
[0127] N-(1,2-dimyristyloxyprop-3-yl)-N,N-dimethyl-N-hy droxyethyl ammonium bromide (DMRIE),
[0128] N-(1,2-dioleoyloxyprop-3-yl)-N,N-dimethyl-N-hy droxyethyl ammonium bromide (DORIE),
[0129] N,N-dioleyl-N,N-dimethylammonium chloride (DODAC),
[0130] 1,2-dilauroyl-sn-glycero-3-ethylphosphocholine (DLePC),
[0131] 1,2-distearoyl-3-trimethylammonium-propane (DSTAP),
[0132] 1,2-dipalmitoyl-3-trimethylammonium-propane (DPTAP),
[0133] 1,2-dilinoleoyl-3-trimethylammonium-propane (DLTAP),
[0134] 1,2-dimyristoyl-3-trimethylammonium-propane (DMTAP),
[0135] 1,2-distearoyl -sn-glycero-3-ethylphosphocholine (DSePC),
[0136] 1,2-dipalmitoyl-sn-glycero-3-ethylphosphocholine (DPePC),
[0137] 1,2-dimyristoyl -sn-glycero-3-ethylphosphocholine (DMePC),
[0138] 1,2-dioleoyl-sn-glycero-3-ethylphosphocholine (DOePC),
[0139] 1,2-di-(9Z-tetradecenoyl)-sn-glycero-3-ethylphosphocholine (14:1 EPC),
[0140] 1-palmitoyl-2-oleoyl-sn-glycero-3-ethylphosphocholine (16:0-18:1 EPC),
[0141] and any combination thereof.

[0142] The present disclosure also provides a composition comprising (i) one or more of the polynucleotides according to the disclosures above and a pharmaceutically acceptable carrier or (ii) one or more of the polynucleotides according to disclosures above formulated in the delivery agent disclosed above. In some embodiments, the compositions disclosed comprise a delivery agent selected from a lipidoid, a liposome, a lipoplex, a lipid nanoparticle, a polymeric compound, a peptide, a protein, a cell, a nanoparticle mimic, a nanotube, or a conjugate. In some embodiments, the delivery agent comprises a lipid composition disclosed above.

[0143] The compositions disclosed herein can be used in reducing or decreasing a size of a tumor or inhibiting a tumor growth in a subject in need thereof.

[0144] In some embodiments, the polynucleotides or compositions disclosed herein are formulated for in vivo delivery. In some embodiments, the polynucleotide or composition is formulated for intramuscular, subcutaneous, intratumoral, or intradermal delivery. In some embodiments, the polynucleotide or composition is administered subcutaneously, intravenously, intramuscularly, intra-articularly, intra-synovially, intrasternally, intrathecally, intrahepatically, intralesionally, intracranially, intraventricularly, orally, by inhalation spray, topically, rectally, nasally, buccally, vaginally or via an implanted reservoir.

[0145] In some embodiments, administration of the compositions disclosed above, e.g., according to the methods disclosed above, treats a cancer. In some embodiments, the cancer is selected from the group consisting of adrenal cortical cancer, advanced cancer, anal cancer, aplastic anemia, bileduct cancer, bladder cancer, bone cancer, bone metastasis, brain tumors, brain cancer, breast cancer, childhood cancer, cancer of unknown primary origin, Castleman disease, cervical cancer, colon/rectal cancer, endometrial cancer, esophagus cancer, Ewing family of tumors, eye cancer, gallbladder cancer, gastrointestinal carcinoid tumors, gastrointestinal stromal tumors, gestational trophoblastic disease, Hodgkin disease, Kaposi sarcoma, renal cell carcinoma, laryngeal and hypopharyngeal cancer, acute lymphocytic leukemia, acute myeloid leukemia, chronic lymphocytic leukemia, chronic myeloid leukemia, chronic myelomonocytic leukemia, liver cancer, hepatocellular carcinoma (HCC), non-small cell lung cancer, small cell lung cancer, lung carcinoid tumor, lymphoma of the skin, malignant mesothelioma, multiple myeloma, myelodysplastic syndrome, nasal cavity and paranasal sinus cancer, nasopharyngeal cancer, neuroblastoma, non-Hodgkin lymphoma, oral cavity and oropharyngeal cancer, osteosarcoma, ovarian cancer, pancreatic cancer, penile cancer, pituitary tumors, prostate cancer, retinoblastoma, rhabdomyosarcoma, salivary gland cancer, sarcoma in adult soft tissue, basal and squamous cell skin cancer, melanoma, small intestine cancer, stomach cancer, testicular cancer, throat cancer, thymus cancer, thyroid cancer, uterine sarcoma, vaginal cancer, vulvar cancer, Waldenstrom macroglobulinemia, Wilms tumor, secondary cancers caused by cancer treatment, and any combination thereof.

[0146] In some embodiments, the polynucleotide or composition is delivered by a device comprising a pump, patch, drug reservoir, short needle device, single needle device, multiple needle device, micro-needle device, jet injection device, ballistic powder/particle delivery device, catheter, lumen, cryoprobe, cannula, microcanular, or devices utilizing heat, RF energy, electric current, or any combination thereof.

[0147] In some embodiments, wherein the effective amount of a composition disclosed herein is between about 0.10 mg/kg to about 1,000 mg/kg.

[0148] In some embodiments, the subject is a human.

[0149] The present disclosure also provides a kit comprising any composition disclosed above, and instructions to use according to the methods disclosed above.

[0150] In some embodiments, the polynucleotide encoding an IL12 polypeptide comprises at least one polynucleotide comprising an ORF encoding an interleukin 12 p40 subunit (IL12B) polypeptide and an interleukin 12 p35 subunit (IL12A) polypeptide. In some embodiments, the IL12B polypeptide is operably linked to the IL12A polypeptide by a linker. In some embodiments, the polynucleotide encoding an IL12 polypeptide comprises a nucleic acid encoding a signal peptide. In some embodiments, the signal peptide is an IL12B signal peptide.

[0151] In some embodiments, the polynucleotide encoding an IL18 polypeptide comprises an ORF encoding a mature IL18 polypeptide. In some embodiments, the polynucleotide encoding an IL18 polypeptide comprises a nucleic acid encoding a signal peptide. In some embodiments, the signal peptide is a heterologous signal peptide. In some embodiments, the heterologous signal peptide is a tissue plasminogen activator (tPA) signal peptide or an interleukin 12 (IL12) signal peptide.

[0152] In some embodiments, the polynucleotide encoding a CD80 polypeptide comprises an ORF encoding a CD80 extracellular domain. In some embodiments, the polynucleotide encoding a CD80 polypeptide comprises a nucleic acid encoding an Fc moiety. In some embodiments, the polynucleotide encoding a CD80 polypeptide comprises a nucleic acid encoding a signal peptide. In some embodiments, the signal peptide is an endogenous CD80 signal peptide.

[0153] In some embodiments, the polynucleotide encoding a TLR4 polypeptide comprises an ORF encoding a constitutively active TLR4 polypeptide comprising the intracellular domain and transmembrane region of TLR4. In some embodiments, the polynucleotide encoding a TLR4 polypeptide comprises a nucleic acid encoding a signal peptide. In some embodiments, the signal peptide is a heterologous signal peptide, wherein the heterologous signal peptide is lysosome-associated membrane glycoprotein 1 (LAMP1) signal peptide.

[0154] In some embodiments, the polynucleotide encoding an IL15 polypeptide comprises at least one polynucleotide comprising an ORF encoding an IL15 polypeptide and an IL15R extracellular domain polypeptide. In some embodiments, the IL15 polypeptide is operably linked to the IL15R extracellular domain polypeptide by a linker. In some embodiments, the IL15 polypeptide further comprises an Fc domain. In some embodiments, the polynucleotide comprising an ORF encoding an IL15 polypeptide comprises a nucleic acid encoding a signal peptide. In some embodiments, the signal peptide is a heterologous signal peptide. In some embodiments, the heterologous signal peptide is a tPA signal peptide.

[0155] In some embodiments, the polynucleotide encoding an IL23 polypeptide comprises an ORF encoding an IL12p40 polypeptide and an IL23p19 polypeptide. In some embodiments, the IL12p40 polypeptide is operably linked to the IL23p19 polypeptide via a linker. In some embodiments, the polynucleotide encoding an IL23 polypeptide comprises a nucleic acid encoding a signal peptide. In some embodiments, the signal peptide is an IL12p40 signal peptide or an IL23p19 signal peptide.

[0156] In some embodiments, the polynucleotide encoding an IL36gamma polypeptide comprises an ORF encoding an IL36gamma polypeptide. In some embodiments, the polynucleotide ORF encoding the mature IL36gamma polypeptide further comprises a nucleic acid encoding a signal peptide. In some embodiments, wherein the signal peptide is a heterologous signal peptide. In some embodiments, the heterologous signal peptide is an hIgKV4 signal peptide.

[0157] The present disclosure also provides a pharmaceutical composition comprising at least two mRNAs and a pharmaceutically acceptable carrier, wherein the mRNAs are selected from (i) one or more mRNAs having an open reading frame encoding an immune response primer polypeptide; (ii) one or more mRNAs having an open reading frame encoding an immune response costimulatory signal polypeptide; and (iii) one or more mRNAs having an open reading frame encoding a checkpoint inhibitor polypeptide. In some embodiments, the pharmaceutical composition comprises (i) an mRNA having an open reading frame encoding an immune response primer polypeptide and (ii) an mRNA having an open reading frame encoding an immune response costimulatory signal polypeptide. In some embodiments, the pharmaceutical composition comprises two mRNAs each having an open reading frame encoding an immune response primer polypeptide. In some embodiments, the pharmaceutical composition comprises (i) an mRNA having an open reading frame encoding an immune response costimulatory signal polypeptide and (ii) an mRNA having an open reading frame encoding a checkpoint inhibitor polypeptide. In some embodiments, the pharmaceutical composition comprises (i) an mRNA having an open reading frame encoding an immune response costimulatory signal polypeptide, (ii) an mRNA having an open reading frame encoding an immune response costimulatory signal polypeptide, and (iii) an mRNA having an open reading frame encoding a checkpoint inhibitor polypeptide.

[0158] In some embodiments, the immune response primer polypeptide comprises interleukin 12 (IL12), interleukin (IL23), Toll-like receptor 4 (TLR4), interleukin 36 gamma (IL36gamma), interleukin 18 (IL18), or a combination thereof. In some embodiments, the immune response co-stimulatory signal polypeptide comprises tumor necrosis factor receptor superfamily member 4 ligand (OX40L), cluster of differentiation 80 (CD80), interleukin 15 (IL15), or a combination thereof. In some embodiments, the checkpoint inhibitor polypeptide inhibits programmed cell death protein 1 (PDT), programmed death-ligand 1 (PD-L1), or cytotoxic T-lymphocyte-associated protein 4 (CTLA-4).

[0159] In some embodiments, the pharmaceutical composition comprises (a) an mRNA that comprises (i) a 5′ untranslated region (5′-UTR); (ii) an open reading frame (ORF) encoding at least one immune response primer polypeptide, an immune response costimulatory signal polypeptide, a checkpoint inhibitor polypeptide, or a combination thereof, wherein the ORF comprises at least one chemically modified nucleobase, sugar, backbone, or any combination thereof, (iii) at least one stop codon; (iv) a microRNA (miRNA) binding site; (v) a 3′ untranslated region (3′-UTR); (vi) a polyA tail; and, (b) a lipid nanoparticle carrier.

[0160] In some embodiments of the pharmaceutical compositions disclosed herein (a) the first mRNA encodes an IL23 polypeptide and the second mRNA encodes an IL18 polypeptide; (b) the first mRNA encodes an IL23 polypeptide and the second mRNA encodes an IL12 polypeptide; (c) the first mRNA encodes an IL23 polypeptide and the second mRNA encodes an OX40L polypeptide; (d) the first mRNA encodes an IL12 polypeptide and the second mRNA encodes an anti-CTLA-4 antibody; (e) the first mRNA encodes an IL12 polypeptide and the second mRNA encodes an anti-PD-1 antibody or an anti-PD-L1 antibody; (f) the first mRNA encodes an IL23 polypeptide and the second mRNA encodes an anti-CTLA-4 antibody; (g) the first mRNA encodes an IL18 polypeptide and the second mRNA encodes an anti-PD-1 antibody or an anti-PD-L1 antibody; (h) the first mRNA encodes an IL18 polypeptide and the second mRNA encodes an anti-CTLA-4 antibody; (i) the first mRNA encodes an IL18 polypeptide and the second mRNA encodes an OX40L polypeptide; (j) the first mRNA encodes an IL18 polypeptide and the second mRNA encodes a TLR4 polypeptide; (k) the first mRNA encodes an IL18 polypeptide and the second mRNA encodes an IL12 polypeptide; (1) the first mRNA encodes an OX40L polypeptide and the second mRNA encodes an anti-CTLA-4 antibody; (m) the first mRNA encodes an OX40L polypeptide and the second mRNA encodes an anti-PD-1 antibody or an anti-PD-L1 antibody; (n) the first mRNA encodes an OX40L polypeptide and the second mRNA encodes an caTLR4 polypeptide; (o) the first mRNA encodes an OX40L polypeptide and the second mRNA encodes an IL23 polypeptide; (p) the first mRNA encodes an OX40L polypeptide and the second mRNA encodes an IL12 polypeptide; (q) the first mRNA encodes a CD80 polypeptide and the second mRNA encodes an anti-CTLA-4 antibody; (r) the first mRNA encodes a TLR4 polypeptide and the second mRNA encodes an anti-CTLA-4 antibody; (s) the first mRNA encodes an IL18 polypeptide and the second mRNA encodes an IL12, and further comprising a third mRNA encoding an IL23 polypeptide; (t) the first mRNA encodes an OX40L polypeptide and the second mRNA encodes a TLR4 polypeptide, and further comprising a third mRNA encoding an IL18 polypeptide; (u) the first mRNA encodes an OX40L polypeptide and the second mRNA encodes an IL12 polypeptide, and further comprising a third mRNA encoding an IL23 polypeptide; (v) the first polynucleotide encodes an IL23 polypeptide and the second polynucleotide encodes an IL12 polypeptide, and further comprising administering a third polynucleotide encoding an anti-CTLA-4 antibody; (w) the first mRNA encodes an IL23 polypeptide and the second mRNA encodes an IL18 polypeptide, and further comprising a third mRNA encoding an anti-CTLA-4 antibody; (x) the first mRNA encodes an IL23 polypeptide and the second mRNA encodes an IL12 polypeptide, and further comprising a third mRNA encoding an IL18 polypeptide and administering a fourth polynucleotide encoding an anti-CTLA-4 antibody; (y) the first mRNA encodes an IL23 polypeptide and the second mRNA encodes an IL12 polypeptide, and further comprising a third mRNA encoding an IL18 polypeptide and a fourth mRNA encoding an anti-PD-1 antibody or an anti-PD-L1 antibody; (z) the first mRNA encodes an OX40L polypeptide and the second mRNA encodes an IL18 polypeptide, and further comprising a third mRNA encoding a TLR4 polypeptide and a fourth mRNA encoding an anti-CTLA-4 antibody; or (aa) the first mRNA encodes an OX40L polypeptide and the second mRNA encodes an IL18 polypeptide, and further comprising a third mRNA encoding a TLR4 polypeptide and a fourth mRNA encoding an anti-PD-1 antibody or an anti-PD-L1 antibody.

[0161] In some embodiments of the pharmaceutical compositions disclosed herein, composition comprises 2, 3, 4, 5, 6 or more mRNAs, wherein each mRNA comprises at least one ORF. In some embodiments, the pharmaceutical composition comprises at least one chemically modified nucleobase, sugar, backbone, or any combination thereof. In some embodiments, each mRNA is formulated in the same lipid nanoparticle carrier. In some embodiments, each mRNA is formulated in a different lipid nanoparticle carrier. In some embodiments, the lipid nanoparticle carrier comprises a lipid selected from the group consisting of DLin-DMA, DLin-K-DMA, 98N12-5, C12-200, DLin-MC3-DMA, DLin-KC2-DMA, DODMA, PLGA, PEG, PEG-DMG, PEGylated lipids, amino alcohol lipids, KL22, and combinations thereof.

[0162] In some embodiments of the pharmaceutical compositions disclosed herein, the lipid nanoparticle carrier comprises a compound having formula (I)

[chemical structure]

or a salt or stereoisomer thereof, wherein R₁ is selected from the group consisting of C₅₋₂₀ alkyl, C₅₋₂₀ alkenyl, -R*YR″, -YR″, and -R″M′R′; R₂ and R₃ are independently selected from the group consisting of H, C₁₋₁₄ alkyl, C₂₋₁₄ alkenyl, -R*YR″, -YR″, and -R*OR″, or R₂ and R₃, together with the atom to which they are attached, form a heterocycle or carbocycle; R₄ is selected from the group consisting of a C₃₋₆ carbocycle, —(CH₂)ₙQ, —(CH₂)ₙCHQR, —CHQR, —CQ(R)₂, and unsubstituted C₁₋₆ alkyl, where Q is selected from a carbocycle, heterocycle, —OR, —O(CH₂)ₙN(R)₂, —C(O)OR, —OC(O)R, —CX₃, —CX₂H, —CXH₂, —CN, —N(R)₂, —C(O)N(R)₂, —N(R)C(O)R, —N(R)S(O)₂R, —N(R)C(O)N(R)₂, —N(R)C(S)N(R)₂, and —C(R)N(R)₂C(O)OR, and each n is independently selected from 1, 2, 3, 4, and 5; each R₅ is independently selected from the group consisting of C₁₋₃ alkyl, C₂₋₃ alkenyl, and H; each R₆ is independently selected from the group consisting of C₁₋₃ alkyl, C₂₋₃ alkenyl, and H; M and M′ are independently selected from —C(O)O—, —OC(O)—, —C(O)N(R′)-, —N(R′)C(O)—, —C(O)—, —C(S)—, —C(S)S—, —SC(S)—, —CH(OH)—, —P(O)(OR′)O—, —S(O)₂—, an aryl group, and a heteroaryl group; R₇ is selected from the group consisting of C₁₋₃ alkyl, C₂₋₃ alkenyl, and H; each R is independently selected from the group consisting of C₁₋₃ alkyl, C₂₋₃ alkenyl, and H; each R′ is independently selected from the group consisting of C₁₋₁₈ alkyl, C₂₋₁₈ alkenyl, -R*YR″, -YR″, and H; each R″ is independently selected from the group consisting of C₃₋₁₄ alkyl and C₃₋₁₄ alkenyl; each R* is independently selected from the group consisting of C₁₋₁₂ alkyl and C₂₋₁₂ alkenyl; each Y is independently a C₃₋₆ carbocycle; each X is independently selected from the group consisting of F, Cl, Br, and I; and m is selected from 5, 6, 7, 8, 9, 10, 11, 12, and 13; and provided when R₄ is —(CH₂)ₙQ, —(CH₂)ₙCHQR, —CHQR, or -CQ(R)₂, then (i) Q is not -N(R)₂ when n is 1, 2, 3, 4 or 5, or (ii) Q is not 5, 6, or 7-membered heterocycloalkyl when n is 1 or 2.

[0163] In some embodiments of the pharmaceutical compositions disclosed herein, the compound is of Formula (IA):

[chemical structure]

or a salt or stereoisomer thereof, wherein 1 is selected from 1, 2, 3, 4, and 5; m is selected from 5, 6, 7, 8, and 9; M₁ is a bond or M′; R₄ is unsubstituted C₁₋₃ alkyl, or —(CH₂)ₙQ, in which n is 1, 2, 3, 4, or 5 and Q is OH, —NHC(S)N(R)₂, or —NHC(O)N(R)₂; M and M′ are independently selected from —C(O)O—, —OC(O)—, —C(O)N(R′)-, —P(O)(OR′)O—, an aryl group, and a heteroaryl group; and R₂ and R₃ are independently selected from the group consisting of H, C₁₋₁₄ alkyl, and C₂₋₁₄ alkenyl. In some embodiments, m is 5, 7, or 9.

[0164] In some embodiments of the pharmaceutical compositions disclosed herein, the compound is of Formula (II):

[chemical structure]

or a salt or stereoisomer thereof, wherein 1 is selected from 1, 2, 3, 4, and 5; M₁ is a bond or M′; R₄ is unsubstituted C₁₋₃ alkyl, or —(CH₂)ₙQ, in which n is 2, 3, or 4 and Q is OH, —NHC(S)N(R)₂, or —NHC(O)N(R)₂; M and M′ are independently selected from —C(O)O—, —OC(O)—, —C(O)N(R′)-, —P(O)(OR′)O—, an aryl group, and a heteroaryl group; and R₂ and R₃ are independently selected from the group consisting of H, C₁₋₁₄ alkyl, and C₂₋₁₄ alkenyl.

[0165] In some embodiments of the pharmaceutical compositions disclosed herein, the compound is selected from Compound 1 to Compound 147, and salts and stereoisomers thereof.

[0166] In some embodiments of the pharmaceutical compositions disclosed herein, the compound is of the Formula (IIa),

[chemical structure]

or a salt or stereoisomer thereof.

[0167] In some embodiments of the pharmaceutical compositions disclosed herein, the compound is of the Formula (IIb),

[chemical structure]

or a salt or stereoisomer thereof.

[0168] In some embodiments of the pharmaceutical compositions disclosed herein, the compound is of the Formula (IIc) or (IIe),

[chemical structure]

or a salt or stereoisomer thereof.

[0169] In some embodiments, wherein R₄ is selected from —(CH₂)ₙQ and —(CH₂)ₙCHQR, wherein Q, R and n are as defined above.

[0170] In some embodiments of the pharmaceutical compositions disclosed herein, the compound is of the Formula (IId),

[chemical structure]

or a salt or stereoisomer thereof,

[0171] wherein R₂ and R₃ are independently selected from the group consisting of C₅₋₁₄ alkyl and C₅₋₁₄ alkenyl, n is selected from 2, 3, and 4, and R′, R″, R₅, R₆ and m are as defined above.

[0172] In some embodiments, R₂ is C₈ alkyl. R₃ is C₅ alkyl, C₆ alkyl, C₇ alkyl, C₈ alkyl, or C₉ alkyl. In some embodiments, m is 5, 7, or 9. In some embodiments, each R₅ is H. In some embodiments, each R₆ is H.
[0173] In some embodiments of the pharmaceutical compositions disclosed herein, the lipid nanoparticle carrier further comprises a phospholipid. In some embodiments, the phospholipid is selected from the group consisting of
[0174] 1,2-dilinoleoyl-sn-glycero-3-phosphocholine (DLPC),
[0175] 1,2-dimyristoyl-sn-glycero-phosphocholine (DMPC),
[0176] 1,2-dioleoyl-sn-glycero-3-phosphocholine (DOPC),
[0177] 1,2-dipalmitoyl-sn-glycero-3-phosphocholine (DPPC),
[0178] 1,2-distearoyl-sn-glycero-3-phosphocholine (DSPC),
[0179] 1,2-diundecanoyl-sn-glycero-phosphocholine (DUPC),
[0180] 1-palmitoyl-2-oleoyl-sn-glycero-3-phosphocholine (POPC),
[0181] 1,2-di-O-octadecenyl-sn-glycero-3-phosphocholine (18:0 Diether PC),
[0182] 1-oleoyl-2-cholesterylhemisuccinoyl-sn-glycero-3-phosphocholine (OChemsPC),
[0183] 1-hexadecyl-sn-glycero-3-phosphocholine (C16 Lyso PC),
[0184] 1,2-dilinolenoyl-sn-glycero-3-phosphocholine,
[0185] 1,2-diarachidonoyl-sn-glycero-3-phosphocholine,
[0186] 1,2-didocosahexaenoyl-sn-gly cero-3-phosphocholine,
[0187] 1,2-dioleoyl-sn-glycero-3-phosphoethanolamine (DOPE),
[0188] 1,2-diphytanoyl-sn-glycero-3-phosphoethanolamine (ME 16:0 PE),
[0189] 1,2-distearoyl-sn-glycero-3-phosphoethanolamine,
[0190] 1,2-dilinoleoyl-sn-gly cero-3-phosphoethanolamine,
[0191] 1,2-dilinolenoyl-sn-gly cero-3-phosphoethanolamine,
[0192] 1,2-diarachidonoyl-sn-glycero-3-phosphoethanolamine,
[0193] 1,2-didocosahexaenoyl-sn-gly cero-3-phosphoethanolamine,
[0194] 1,2-dioleoyl-sn-glycero-3-phospho-rac-(1-glycerol) sodium salt (DOPG), sphingomyelin,
[0195] and mixtures thereof.
[0196] In some embodiments, the phospholipid is selected from the group consisting of
[0197] 1-myristoyl-2-palmitoyl-sn-glycero-3-phosphocholine (14:0-16:0 PC, MPPC),
[0198] 1-myristoyl-2-stearoyl-sn-glycero-3-phosphocholine (14:0-18:0 PC, MSPC),
[0199] 1-palmitoyl-2-acetyl-sn-glycero-3-phosphocholine (16:0-02:0 PC),
[0200] 1-palmitoyl-2-myristoyl-sn-glycero-3-phosphocholine (16:0-14:0 PC, PMPC),
[0201] 1-palmitoyl-2-stearoyl-sn-glycero-3-phosphocholine (16:0-18:0 PC, PSPC),
[0202] 1-palmitoyl-2-oleoyl-sn-glycero-3-phosphocholine (16:0-18:1 PC, POPC),
[0203] 1-palmitoyl-2-linoleoyl-sn-glycero-3-phosphocholine (16:0-18:2 PC, PLPC),
[0204] 1-palmitoyl-2-arachidonoyl-sn-glycero-3-phosphocholine (16:0-20:4 PC),
[0205] 1-palmitoyl-2-docosahexaenoyl-sn-glycero-3-phosphocholine (14:0-22:6 PC),
[0206] 1-stearoyl-2-myristoyl-sn-glycero-3-phosphocholine (18:0-14:0 PC, SMPC),
[0207] 1-stearoyl-2-palmitoyl-sn-glycero-3-phosphocholine (18:0-16:0 PC, SPPC),
[0208] 1-stearoyl-2-oleoyl-sn-glycero-3-phosphocholine (18:0-18:1 PC, SOPC),
[0209] 1-stearoyl-2-linoleoyl-sn-glycero-3-phosphocholine (18:0-18:2 PC),
[0210] 1-stearoyl-2-arachidonoyl-sn-glycero-3-phosphocholine (18:0-20:4 PC),
[0211] 1-stearoyl-2-docosahexaenoyl-sn-glycero-3-phosphocholine (18:0-22:6 PC),
[0212] 1-oleoyl-2-myristoyl-sn-glycero-3-phosphocholine (18:1-14:0 PC, OMPC),
[0213] 1-oleoyl-2-palmitoyl-sn-glycero-3-phosphocholine (18:1-16:0 PC, OPPC),
[0214] 1-oleoyl-2-stearoyl-sn-glycero-3-phosphocholine (18:1-18:0 PC, OSPC),
[0215] 1-palmitoyl-2-oleoyl-sn-glycero-3-phosphoethanolamine (16:0-18:1 PE, POPE),
[0216] 1-palmitoyl-2-linoleoyl-sn-glycero-3-phosphoethanolamine (16:0-18:2 PE),
[0217] 1-palmitoyl-2-arachidonoyl-sn-glycero-3-phosphoethanolamine (16:0-20:4 PE),
[0218] 1-palmitoyl-2-docosahexaenoyl-sn-glycero-3-phosphoethanolamine (16:0-22:6 PE),
[0219] 1-stearoyl-2-oleoyl-sn-glycero-3-phosphoethanolamine (18:0-18:1 PE),
[0220] 1-stearoyl-2-linoleoyl-sn-glycero-3-phosphoethanolamine (18:0-18:2 PE),
[0221] 1-stearoyl-2-arachidonoyl-sn-glycero-3-phosphoethanolamine (18:0-20:4 PE),
[0222] 1-stearoyl-2-docosahexaenoyl-sn-glycero-3-phosphoethanolamine (18:0-22:6 PE),
[0223] 1-oleoyl-2-cholesterylhemisuccinoyl-sn-glycero-3-phosphocholine (OChemsPC), and
[0224] any combination thereof.

[0225] In some embodiments of the pharmaceutical compositions disclosed herein, the lipid nanoparticle carrier further comprises a structural lipid. In some embodiments, the structural lipid is selected from the group consisting of cholesterol, fecosterol, sitosterol, ergosterol, campesterol, stigmasterol, brassicasterol, tomatidine, ursolic acid, alpha-tocopherol, and mixtures thereof.

[0226] In some embodiments of the pharmaceutical compositions disclosed herein, the lipid nanoparticle carrier further comprises a PEG lipid. In some embodiments, the PEG lipid is selected from the group consisting of a PEG-modified phosphatidyIethanolamine, a PEG-modified phosphatidic acid, a PEG-modified ceranide, a PEG-modified dialkylamine, a PEG-modified diacylgicerol, a PEG-modified dialkylglycerol, and mixtures thereof.

[0227] In some embodiments of the pharmaceutical compositions disclosed herein, the lipid nanoparticle carrier further comprises an ionizable lipid selected from the group consisting of 3-(didodecylamino)-N1,N1,4-tridodecyl-1-piperazineethanamine (KL10),
[0228] N1-[2-(didodecylamino)ethyl]-N1,N4,N4-tridodecyl-1,4-piperazinediethanamine (KL22),
[0229] 14,25-ditridecyl-15,18,21,24-tetraaza-octatriacontane (KL25),
[0230] 1,2-dilinoleyloxy-N,N-dimethylaminopropane (DLin-DMA),
[0231] 2,2-dilinoleyl-4-dimethylaminomethyl-[1,3]-dioxolane (DLin-K-DMA),
[0232] heptatriaconta-6,9,28,31-tetraen-19-yl 4-(dimethylamino)butanoate (DLin-MC3-DMA),
[0233] 2,2-dilinoleyl-4-(2-dimethylaminoethyl)-[1,3]-dioxolane (DLin-KC2-DMA),
[0234] 1,2-dioleyloxy-N,N-dimethylaminopropane (DODMA),
[0235] 2-({8-[(3 p)-cholest-5-en-3-yloxy]octyl}oxy)-N,N-dimethyl-3-[(9Z,12Z)-octadeca-9,12-die n-1-yloxy]propan-1-amine (Octyl-CLinDMA),
[0236] (2R)-2-({8-[(3p)-cholest-5-en-3-yloxy]octyl}oxy)-N,N-dimethyl-3-[(9Z,12Z)-octadeca-9,1 2-dien-1-yloxy]propan-1-amine (Octyl-CLinDMA (2R)), and
[0237] (2S)-2-({8-[(3p)-cholest-5-en-3-yloxy]octyl}oxy)-N,N-dimethyl-3-[(9Z,12Z)-octadeca-9,1 2-dien-1-yloxy]propan-1-amine (Octyl-CLinDMA (2S)).

[0238] In some embodiments of the pharmaceutical compositions disclosed herein, the lipid nanoparticle carrier further comprises a quaternary amine compound. In some embodiments, the quaternary amine compound is selected from the group consisting of 1,2-dioleoyl-3-trimethylammonium-propane (DOTAP),
[0239] N-[1-(2,3-dioleoyloxy)propyl]-N,N,N-trimethylammonium chloride (DOTMA),
[0240] 1-[2-(oleoyloxy)ethyl]-2-oleyl-3-(2-hydroxyethyl)imidazolinium chloride (DOTIM),
[0241] 2,3-dioleyloxy-N-[2(sperminecarboxamido)ethyl]-N,N-dimethyl-1-propanaminium trifluoroacetate (DOSPA),
[0242] N,N-distearyl-N,N-dimethylammonium bromide (DDAB),
[0243] N-(1,2-dimyristyloxyprop-3-yl)-N,N-dimethyl-N-hy droxyethyl ammonium bromide (DMRIE),
[0244] N-(1,2-dioleoyloxyprop-3-yl)-N,N-dimethyl-N-hy droxyethyl ammonium bromide (DORIE),
[0245] N,N-dioleyl-N,N-dimethylammonium chloride (DODAC),
[0246] 1,2-dilauroyl-sn-glycero-3-ethylphosphocholine (DLePC),
[0247] 1,2-distearoyl-3-trimethylammonium-propane (DSTAP),
[0248] 1,2-dipalmitoyl-3-trimethylammonium-propane (DPTAP),
[0249] 1,2-dilinoleoyl-3-trimethylammonium-propane (DLTAP),
[0250] 1,2-dimyristoyl-3-trimethylammonium-propane (DMTAP),
[0251] 1,2-distearoyl -sn-glycero-3-ethylphosphocholine (DSePC),
[0252] 1,2-dipalmitoyl-sn-glycero-3-ethylphosphocholine (DPePC),
[0253] 1,2-dimyristoyl -sn-glycero-3-ethylphosphocholine (DMePC),
[0254] 1,2-dioleoyl-sn-glycero-3-ethylphosphocholine (DOePC),
[0255] 1,2-di-(9Z-tetradecenoyl)-sn-glycero-3-ethylphosphocholine (14:1 EPC),
[0256] 1-palmitoyl-2-oleoyl-sn-glycero-3-ethylphosphocholine (16:0-18:1 EPC),
[0257] and any combination thereof.

[0258] In some embodiments of the compositions, pharmaceutical compositions, or kits disclosed above, the administration of the polynucleotide, composition, or pharmaceutical composition to a subject in need thereof reduces the size of a tumor or inhibits growth of a tumor at least 1.5 fold, at least 2 fold, at least 2.5 fold, at least 3 fold, at least 3.5 fold, at least 4 fold, at least 4.5 fold, or at least 5 fold better than a monotherapy consisting of administration of only one polynucleotide in the composition or pharmaceutical composition.

### BRIEF DESCRIPTION OF THE DRAWINGS/FIGURES

[0259] FIG. 1 shows total IgG (mIgG) versus active CTLA-4 binding (mCTLA-4 binding) in HeLa cells expressing mRNA-encoded 9D9 antibodies. The 9D9 antibodies are HC-2Aa:LC (9D9 IgG2a antibody) and HC-2B:LC (9D9 IgG2b antibody).

[0260] FIGS. 2A to 2C show positive/negative efficacy control data in CT26 carcinoma model from 3 doses of 5 mg/kg anti-CTLA-4 protein (FIG. 2B) or 0.5 mg/kg NST FIX (FIG. 2C) administered at days 3, 6 and 9 as compared to untreated animals (FIG. 2A). NST FIX is a negative control mRNA (mRNA encoding non-translated (“non-start”) Factor IX).

[0261] FIGS. 3A to 3F show treatment with 1, 2 or 3 doses of mRNA encoding anti-CTLA-4 (9D9 2b) antibody. FIG. 3A and FIG. 3B show data corresponding to control sample NST FIX and 9D9 2b anti-CTLA-4 antibody, respectively, administered at day 3.

[0262] FIG. 3C and FIG. 3D show data corresponding to control sample NST FIX and 9D9 2b anti-CTLA-4 antibody, respectively, administered at day 3 and day 9. FIG. 3E and FIG. 3F show data corresponding to control sample NST FIX and 9D9 2b anti-CTLA-4 antibody, respectively, administered at day 3, day 6 and day 9.

[0263] FIGS. 4A to 4F show treatment with 1, 2 or 3 doses of mRNA encoding anti-CTLA-4 (9D9 2a). FIG. 4A and FIG. 4B show data corresponding to control sample NST FIX and 9D9 2a anti-CTLA-4 antibody, respectively, administered at day 3. FIG. 4C and FIG. 4D show data corresponding to control sample NST FIX and 9D9 2a anti-CTLA-4 antibody, respectively, administered at day 3 and day 9. FIG. 4E and FIG. 4F show data corresponding to control sample NST FIX and 9D9 2a anti-CTLA-4 antibody, respectively, administered at day 3, day 6 and day 9.

[0264] FIGS. 5A and 5B show the efficacy of 9D9 2b anti-CTLA antibody protein in the CT26 carcinoma model (FIG. 5B) compared to untreated controls (FIG. 5A). The 9D9 2b anti-CTLA-4 antibody was administered at days 3, 6 and 9 after tumor implantation.

[0265] FIG. 6 shows serum levels of anti-CTLA-4 9D9 antibody after administration of a 5 mg/kg dose (observed at 24 hours (left bar), 48 hours (middle bar), and 72 hours (right bar) time points) or after administration of 0.5 mg/kg of mRNA encoding the 9D9 2b antibody, mRNA encoding the 9D9 2a antibody, or controls (NST FIX or DPBS) (observed at 24 hours, 48 hours, 72 hours, and 7 days time points, from left to right respectively).

[0266] FIGS. 7A and 7B show individual tumor growth curves for untreated animals (FIG. 77A) and control animals treated with NST FIX/LNP (FIG. 7B). mRNA encoding the negative control NST FIX was administered at 0.5 mg RNA/kg at day 3, at day 6, and at day 9 after tumor implantation.

[0267] FIG. 8 shows individual tumor growth curves for animals treated with 3 doses of 5 mg/kg anti-CTLA-4 9D9 antibody protein administered at day 3, at day 6, and at day 9 after tumor implantation.

[0268] FIG. 9 shows individual tumor growth curves for animals treated with 3 doses of mRNA designed to express anti-CTLA-4 9D9 2b antibody. 0.5 mg mRNA/kg doses were administered at day 3, at day 6, and at day 9 after tumor implantation.

[0269] FIG. 10 shows individual tumor growth curves for animals treated with 3 doses of mRNA designed to express anti-CTLA-4 9D9 2a antibody. 0.5 mg mRNA/kg doses were administered at day 3, at day 6, and at day 9 after tumor implantation.

[0270] FIGS. 11A and 11B show individual tumor growth curves for animals treated with NST FIX mRNA control (FIG. 11A) and animals treated with mRNA designed to expressed anti-CTLA-4 9D9 2a (FIG. 11B). mRNAs were administered at 0.5 mg RNA/kg at day 3 and at day 9 after tumor implantation.

[0271] FIGS. 12A and 12B show individual tumor growth curves for animals treated with NST FIX mRNA control (FIG. 12A) and animals treated with mRNA designed to expressed anti-CTLA-4 9D9 2a (FIG. 12B). mRNAs were administered at 0.5 mg RNA/kg at day 3 after tumor implantation.

[0272] FIG. 13 shows the survival benefit from treatment with mRNAs encoding CTLA-4 antibodies.

[0273] FIG. 14 is a diagram of the structure of a chimeric CD80Fc polypeptide. Such a chimeric polypeptide is a dimer, each monomer of which comprises CD80's extracellular domain and a Fc domain (itself comprising two CH₂ domains and a hinge region). The CD80Fc dimer is held together by disulfide bonds within the hinge region of Fc.

[0274] FIG. 15 is a graph showing the effectiveness of CD80Fc (“B7.1-Fc”) in treating a mouse model of colon cancer. Colon 26 cells were established in the flank of C57BL/6J mice, and the average tumor volume over time was measured after repeated treatment with a range of CD80Fc concentrations.

[0275] FIG. 16 shows the expression levels of murine and human modified mRNAs encoding CD80Fc constructs.

[0276] FIG. 17 shows the results of testing the ability of the expressed CD80Fc constructs to bind CTLA-4.

[0277] FIG. 18 is a graph showing the secretion of IL-2 after CD80Fc-mediated costimulation of Jurkat cells. Jurkat cells were PHA treated to provide a primary T cell receptor activation signal, and the cells were treated with a CD80Fc polypeptide. Each chimeric polypeptide was administered at a range of concentrations including 62.5 ng/mL, 125 ng/mL, 250 ng/mL, 500 ng/mL, and 1000 ng/mL.

[0278] FIG. 19A, FIG. 19B and FIG. 19C contain graphs of the in vivo efficacy of modified mRNAs encoding chimeric CD80Fc polypeptides in a B-cell lymphoma model. A20 B cell lymphoma cells were established subcutaneously in BALB/c mice (n=12), and subsequently dosed with 12.5 μg modified mRNA doses Q7Dx6. Mice were dosed with modified mRNA encoding chimeric CD80Fc (FIGS. 19B and 19C) or a control mRNA (FIG. 19A). The graphs present individual plots for the growth of each tumor over time, starting at day 18 post-implantation.

[0279] FIG. 20 shows the structures of full-length wild type (“wt”) TLR4 and a caTLR4. The full-length wt TLR4 contains a signal peptide (“sp”) at the amino-terminus (“N”), an extracellular leucine-rich repeat domain (“LRR”), a transmembrane domain (“TM”), and an intracellular toll/interleukin-1 receptor-like domain (“TIR”) at the carboxy-terminus (“C”). caTLR4 lacks the wild type signal peptide and LRR, containing instead a human lysosome-associated membrane protein 1 (“hLAMPl”) or mouse immunoglobulin kappa variable (“mIgk”) signal peptide. The remainder of the caTLR4 structure is the same as wt TLR4.

[0280] FIG. 21 shows expression of caTLR4 mRNAs in cell-free translation by QC. Lane “1” is an RNA ladder showing sizes of 20 and 25 kiloDaltons (“kDa”). Lane 2 is a negative control showing absence of bands when no mRNA is included in the cell-free translation system. Lane 3 shows human caTLR4 expressed from an mRNA without any microRNA (“miR”) target sites (“HS caTLR4 miRless”). Lane 4 shows human caTLR4 expressed from an mRNA containing a miR122 target site (“Hs caTLR4 miR122”). Lane 5 shows mouse caTLR4 expressed from an mRNA containing a miR122 target site (“Mm caTLR4 miR122”).

[0281] FIG. 22 is a graph showing alkaline phosphatase activity at 6 and 18 hours after transfection of THP1-Blue™ NF-κB cells with control mRNA, Hs caTLR4 miRless, Hs caTLR4 miR122, or Mm caTLR4 miR122, after infection with Listeria monocytogenes, or after exposure to lipopolysaccharide (“LPS”).

[0282] FIG. 23A and FIG. 23B are graphs showing tumor volume (mm³) in 12 individual mice (“n=12”) after subcutaneous implantation of mouse A20 B-cell lymphoma cells and intratumoral doses of either 12.5 μg NST FIX (FIG. 23A) or 12.5 μg of an mRNA encoding mouse caTLR4 and containing a miR122 target site (“Mouse caTLR4_miR122,” FIG. 23B) at 18, 25, and 32 days after implantation.

[0283] FIGS. 24A to 24C are graphs showing tumor volume (mm³) in 12 individual mice after subcutaneous implantation of an A20 B-cell lymphoma cells and intratumoral dosing with either 3 μg NST 2001 (FIG. 24A), 0.5 μg interleukin-12 (“IL12”)+2.5 μg NST FIX (FIG. 24B), or 0.5 μg IL12+2.5 μg of an mRNA encoding a caTLR4 (FIG. 24C) after implantation.

[0284] FIG. 25 shows an example of an OX40L encoding polynucleotide (mRNA). The mRNA can comprise a 5′cap, 5′ UTR, an ORF (mRNA) encoding an OX40L polypeptide, a 3′UTR, a miR122 binding site, and a poly-A tail.

[0285] FIG. 26 shows expression of OX40L on the surface of B16F10 cells after treatment with a polynucleotide comprising an mRNA encoding an OX40L polypeptide. The left peaks represent the control (either mock-treated or treated with negative control mRNA (non-translatable version of the same mRNA containing multiple stop codons)). The right four peaks represent OX40L expression from the administration of 6.3 ng, 12.5 ng, 25 ng, or 50 ng OX40L mRNA.

[0286] FIG. 27A shows expression of OX40L on the surface of HeLa cells after treatment with a polynucleotide comprising an mRNA encoding an OX40L polypeptide; treatment was in the absence of mitomycin C.

[0287] FIG. 27B show expression of OX40L on the surface of MC-38 cells after treatment with a polynucleotide comprising an mRNA encoding an OX40L polypeptide; treatment was in the absence of mitomycin C. Peak 1 in FIGS. 3A and 3B shows surface expression on mock treated cells. Peaks 2-6 show surface expression on days 1, 2, 3, 5, and 7 (respectively) after treatment with a polynucleotide comprising an mRNA encoding an OX40L polypeptide.

[0288] FIG. 27C shows expression of OX40L on the surface of HeLa cells after treatment with a polynucleotide comprising an mRNA encoding an OX40L polypeptide; treatment was in the presence of mitomycin C.

[0289] FIG. 27D shows expression of OX40L on the surface of MC-38 cells after treatment with a polynucleotide comprising an mRNA encoding an OX40L polypeptide; treatment was in the presence of mitomycin C. Peak 1 in FIGS. 3C and 3D shows surface expression on mock treated cells. Peaks 2-6 show surface expression on days 1, 2, 3, 5, and 7 (respectively) after treatment with a polynucleotide comprising an mRNA encoding an OX40L polypeptide.

[0290] FIG. 27E shows expression of human OX40L on the surface of HeLa cells after treatment with a polynucleotide comprising an mRNA encoding an OX40L polypeptide. Peak 1 shows the surface expression on mock treated cells. Peaks 2-6 show surface expression on day 1, 2, 3, 4, and 5 (respectively) after treatment with a polynucleotide comprising an mRNA encoding an OX40L polypeptide.

[0291] FIG. 27F shows quantitation of mouse OX40L protein in cell lysate and cell culture supernatant after treatment of HeLa cells with a polynucleotide comprising an mRNA encoding an OX40L polypeptide.

[0292] FIG. 27G shows quantitation of human OX40L protein in cell lysate and cell culture supernatant after treatment of HeLa cells with a polynucleotide comprising an mRNA encoding an OX40L polypeptide. The y-axis in FIGS. 3F and 3G shows the amount of protein as nanograms (ng) per well.

[0293] FIGS. 28A to 28E show the costimulatory biological activity of OX40L expressed on the surface of cells treated with OX40L mRNA. FIG. 28A shows a schematic drawing of the T-cell activation assay. OX40L-expressing B16F10 cells or HeLa cells were co-cultured with CD4⁺ T-cells and anti-mouse CD3 antibody (B16F10 cells) or Dynabeads human T-activator (HeLa cells). IL-2 production was measured using ELISA as a correlate of T-cell activation. FIG. 28B shows results of the T-cell activation assay as measured by mouse IL-2. FIG. 28C shows results of the T-cell activation assay as measured by human IL-2. The y-axis shows mIL-2 expression in ng/ml. FIG. 28D shows the data from FIG. 28C with schematic diagram showing the addition of OX40L expressing cells to the naïve T-cell activation assay. FIG. 28E shows a T-cell activation assay using pre-stimulated T-cells cultured in the presence or absence of OX40L expressing HeLa cells and in the presence or absence of anti-human CD3 antibody.

[0294] FIG. 29 shows luciferase flux levels in tumor tissue compared to liver tissue in animals treated with a polynucleotide comprising an mRNA encoding a luciferase polypeptide. Representative symbols are as follows. The open inverted triangle, open star, open diamond, shaded diamond, and open circle show the luciferase flux in tumor tissue after administration of 50 μg, 25 μg, 12.5 μg, 6.25 μg, and 3.125 μg of mOX40L_miR122 mRNA (respectively). The shaded inverted triangle, shaded star, open square, shaded square, and open triangle show the luciferase flux in liver tissue after administration of 50 μg, 25 μg, 12.5 μg, 6.25 μg, and 3.125 μg of mOX40L_miR122 mRNA (respectively). The shaded circle and shaded triangle show luciferase flux in tumor tissue (shaded circle) and liver tissue (shaded triangle) after administration of PBS control.

[0295] FIG. 30 shows the amount of OX40L polypeptide present in melanoma tumor tissue in animals treated with a polynucleotide comprising an mRNA encoding an OX40L polypeptide. The left panel shows 8 hours after treatment, and the right panel shows 24 hours after treatment.

[0296] FIG. 31A shows the amount of OX40L polypeptide present in colon adenocarcinoma tumor tissue in animals treated with a polynucleotide comprising an mRNA encoding an OX40L polypeptide, a polynucleotide comprising an mRNA encoding a NST-OX40L (non translatable OX40L mRNA), or no treatment. The OX40L expression was measured at 3 hours, 6 hours, 24 hours, 48 hours, 72 hours, and 168 hours.

[0297] FIG. 31B shows the amount of OX40L polypeptide (upper) and mRNA (lower) present in tumor tissue following administration of increasing doses of a polynucleotide comprising an mRNA encoding an OX40L polypeptide.

[0298] FIG. 31C shows the amount of OX40L polypeptide (upper) and mRNA (lower) present in liver tissue following administration of the same polynucleotide.

[0299] FIG. 31D shows the amount of OX40L polypeptide (upper) and mRNA (lower) present in spleen tissue following administration of the same polynucleotide.

[0300] FIGS. 32A to 32C show the in vivo efficacy (as measured at Day 42) of administering a polynucleotide comprising an mRNA encoding an OX40L polypeptide in a colon adenocarcinoma model. FIG. 32A shows tumor growth for animals treated with a control mRNA (NT OX40L_miR122 control). FIG. 32B shows tumor growth for animals treated with a polynucleotide comprising an mRNA encoding an OX40L polypeptide (OX40L_miR122). FIG. 32C shows a Kaplan-Meier survival curve for all treatment groups. (OX40L_miR122, NST_OX40L_miR122, and PBS).

[0301] FIGS. 33A to 33C show OX40L expression in A20 B-cell lymphoma tumors in animals treated with a polynucleotide comprising an mRNA encoding an OX40L polypeptide. FIG. 33A shows OX40L expression quantitated in nanograms per gram of tumor tissue, as measured by ELISA. FIG. 33B shows OX40L expression on the cell surface of tumor cells, as measured by flow cytometry. FIG. 33C shows OX40L expression on the cell surface of tumor cells as measured by flow cytometry.

[0302] FIGS. 34A and 34B show Natural Killer (NK) cell infiltration into the tumor microenvironment in animals treated with a polynucleotide comprising an mRNA encoding an OX40L polypeptide. FIG. 34A shows the average percentage of live NK cells present in the tumor microenvironment. The left bar shows the percentage of the NK cells increased after administration of mOX40L_mRNA. The right bar shows the percentage of the NK cells increased after administration of NST mOX40L_mRNA. FIG. 34B shows individual animal data from the same study.

[0303] FIGS. 35A to 35D show in vivo efficacy of administering a polynucleotide comprising an mRNA encoding an OX40L polypeptide in a B-cell lymphoma tumor model. FIG. 35A shows tumor growth in animals treated with a control mRNA (NST-FIX control).

[0304] FIG. 35B shows tumor growth in animals treated with a polynucleotide comprising an mRNA encoding an OX40L polypeptide (OX40L_miR122). FIG. 35C shows the average tumor volume for each group, as measured at Day 35. FIG. 35D shows Kaplan-Meier survival curves for each treatment group. The squares show the tumor volume after administration of OX40L_miR122. The triangles show the tumor volume after administration of NST-FIX (control).

[0305] FIGS. 36A and 36B shows in vivo immune response after administering a polynucleotide comprising an mRNA encoding an OX40L polypeptide. Mice were inoculated with MC-38 colon adenocarcinoma cells. Once the tumors reached palpable size, mice were administered a polynucleotide comprising an mRNA encoding an OX40L polypeptide (OX40L_122; triangle), a control nonsense mRNA (NST-OX40L_122; inverted triangle), or PBS (square). Sixty days following administration of the polypeptide, mice were re-challenged with a second MC-38 tumor cell inoculation. FIG. 36A shows the individual animal tumor during the first period through Day 60. FIG. 36B shows the number of animals presenting with tumor growth 23 days after re-challenge.

[0306] FIG. 37 shows OX40L expression in A20 tumors at various time points after a first and/or second dose of a polynucleotide comprising an mRNA encoding an OX40L polypeptide. Expression is shown at 24 hours, 72 hours, 7 days, and 14 days after administration of a first dose of the polynucleotide and 24 hours, 72 hours, and 7 days after administration of a second dose of the polynucleotide.

[0307] FIGS. 38A to 38C show different cell types present in the tumor microenvironment following administration of a polynucleotide comprising an mRNA encoding an OX40L polypeptide. FIG. 38A shows the percentage of OX40L-expressing cells in A20 tumors that are cancer cells, immune cells, non-cancer/non-immune cells, and cells of myeloid lineage. FIG. 38B shows the percentage of OX40L-expressing cells in MC38 tumors that are tumor cells, immune cells, and cells of myeloid lineage. FIG. 38C shows the percentage of myeloid cells in the tumor microenvironment that are OX40L-expressing cells following administration of the polynucleotide.

[0308] FIGS. 39A to 39D show the different types of immune cells that infiltrate the tumor microenvironment in A20 tumors following administration of a polynucleotide comprising an mRNA encoding an OX40L polypeptide. FIG. 39A shows the percentage of NK cells in the tumor infiltrate 24 hours after treatment, as detected by the DX5 marker.

[0309] FIG. 39B shows the percentage of CD4⁺ T-cells in the tumor infiltrate 14 days after treatment, as detected by the CD4 marker. FIG. 39C shows the percentage of CD8+ T-cells in the tumor infiltrate 14 days after treatment, as detected by the CD8 marker. FIG. 39D shows the percentage of CD8+ T-cells in the tumor infiltrate of MC38 tumors 24 and 72 hours after a first and second dose of a polynucleotide comprising an mRNA encoding an OX40L polypeptide.

[0310] FIGS. 40A and 40B show in vivo efficacy of administration of a polynucleotide comprising an mRNA encoding an OX40L polypeptide in A20 tumors. FIG. 40A shows tumor volume (measured in mm³) over time. Treatments are shown as follows: mOX40L_miR122 (filled circles); control mRNA (NST) (open squares); PBS (open triangles); and untreated (open circles). FIG. 40B shows a Kaplan-Meier survival curve for the same animals.

[0311] FIGS. 41A and 41B show expression of OX40L protein in primary human hepatocytes, human liver cancer cells (Hep3B), and human cervical carcinoma cells (HeLa) at 6 hours, 24 hours, and 48 hours post-transfection. FIG. 41A shows expression of human OX40L polypeptide as measured in nanograms per well. FIG. 41B shows expression of mouse OX40L polypeptide as measured in nanograms per well.

[0312] FIGS. 42A to 42C show in vivo anti-tumor efficacy of mOX40L_miR122 delivered intratumorally or intravenously. FIG. 42A shows tumor growth in animals treated intravenously with PBS (arrows mark injection days). FIG. 42B shows tumor growth in animals treated intravenously with control mRNA (“NST-OX40L”) (arrows mark injection days). FIG. 42C shows tumor growth in animals treated intravenously with mOX40L_miR122 mRNA (“OX40L-miR122”) (arrows mark injection days).

[0313] FIG. 43 shows survival curves for animals treated intravenously with PBS, negative control mRNA (“NST-OX40L”), or mOX40L-miR122 mRNA (“OX40L”). Dose days are indicated by arrows.

[0314] FIG. 44 shows percent change in body weight over time for animals treated intravenously with PBS (filled circles), negative control mRNA (filled squares), and mOX40L-miR122 mRNA (open circles).

[0315] FIG. 45 is a table showing increase in protein expression for different sequence optimized IL12 mRNA constructs with respect to wild type mRNA encoding IL12.

[0316] FIG. 46 is a graph depicting the robust efficacy of a single intravenous (IV) dose of IL12 mRNA in lipid nanoparticle (LNP), at doses of 0.1 mg/kg (Group 4) and 0.05 mg/kg (Group 5)(as indicated by lines with the inverted triangles), compared to Groups 1 (PBS), 2 (IL12 protein), 7 and 8 (controls NST-FIX, 0.1 mg/kg and 0.05 mg/kg, respectively).

[0317] FIG. 47A is a graph depicting the higher AUC and Cₘₐₓ for IL12 plasma levels observed following administration of IL12 mRNA in lipid nanoparticle (LNP) compared to the corresponding IL12 recombinant protein.

[0318] FIG. 47B is a graph depicting the higher AUC and Cₘₐₓ for IFNγ plasma levels observed following administration of IL12 mRNA administered in lipid nanoparticle (LNP) compared to IL12 recombinant protein.

[0319] FIG. 47C is a table depicting the higher AUC levels for IL12 and IFNγ plasma levels observed following treatment with IL12 mRNA administered in lipid nanoparticle (LNP) at 0.1 mpk and 0.05 mpk, compared to treatment with IL12 recombinant protein at approximately 0.05 mpk. The numbers in parentheses indicate the x-fold increase for mRNA over protein.

[0320] FIGS. 48A to 48F are graphs depicting the mean tumor volume and the number of complete responses (CR) seen following administration of a single intravenous (IV) dose of: IL12 mRNA in lipid nanoparticle (LNP), at doses of 0.1 mg/kg (Group 4) (FIG. 48F) and 0.05 mg/kg (Group 5) (FIG. 48E), PBS (Group 1) (FIG. 48A), IL12 protein (Group 2) (FIG. 48D), controls NST-FIX, 0.1 mg/kg and 0.05 mg/kg (Groups 7 and 8, respectively) (FIG. 48C and FIG. 48B, respectively). Complete responses (CRs) are shown in FIG. 48E and FIG. 48F only. FIG. 48E shows that 6 of 8 CRs were seen in Group 5 (IL12 mRNA in lipid nanoparticle (LNP), at a dose of 0.05 mg/kg). FIG. 48F shows that 5 of 9 CRs were seen in Group 4 (IL12 mRNA in lipid nanoparticle (LNP), at a dose of 0.1 mg/kg). Aside from the IL12 mRNA groups, all other groups did not observe any CRs.

[0321] FIG. 49 is a graph depicting the survival benefit at day 47 post tumor-implantation from a single intravenous (IV) dose of IL12 mRNA in lipid nanoparticle (LNP) at a dose of 0.05 mg/kg (Group 5) and a dose of 0.1 mg/kg (Group 4) compared to a single IV dose of IL12 protein at 1 μg (˜0.05 mg/kg) (Group 2), NST-FIX at 0.1 mg/kg (Group 7) or 0.05 mg/kg (Group 8), or PBS (Group 1).

[0322] FIG. 50 is a Table depicting a tolerability advantage of local (intratumoral) administration of IL12 mRNA over systemic (intravenous) administration. Nine (9) of 10 mice intratumorally administered IL12 mRNA at about 0.2 mg/kg (4 μg fixed) were viable at day 20 compared to 3 of 12 mice intravenously administered IL12 mRNA at 0.2 mg/kg. The intravenous administration shows the plasma level of IL12 24 hours post dose (ng/ml) about 18 fold higher than the intratumoral administration (1592 ng/ml v. 89 ng/ml).

[0323] FIGS. 51A and 51B are graphs showing the in vivo anti-tumor efficacy of a single intratumoral dose of IL12 mRNA (4 μg) in a lipid nanoparticle (LNP) administered to mice bearing adenocarcinoma (MC38) tumors. FIG. 51A shows the tumor volume means (mm³), up to day 24, starting at day 10 post implantation. Group 1 (circles) represents mice (n=7) administered 4 μg IL12 mRNA LNP at day 10 post-implantation; Group 2 (squares) represents mice (n=7) administered 4 μg of control mRNA encoding non-translated factor IX (NST-FIX LNP); and Group 3 (triangles) represents another control group of mice (n=7) administered PBS. FIG. 51B shows the individual tumor volumes (mm³) for each group of mice, up to day 47, starting at day 10 post implantation. Complete responses (CR) were achieved in 3 of 7 (44%) animals administered 4 μg IL12 mRNA LNP (circles).

[0324] FIGS. 52A and 52B are graphs showing the in vivo anti-tumor efficacy of an intratumoral dose of IL12 mRNA (5 μg) in MC3-based lipid nanoparticle (LNP) administered to mice bearing A20 B-cell lymphoma tumors. FIG. 52A shows the individual tumor volume (mm³) for mice (n=12) administered 5 μg non-translated control mRNA (NST). FIG. 52B shows the individual tumor volumes for mice (n=12) administered 5 μg of IL12 (miRless) mRNA. Complete responses (CR) were achieved in 5 of 12 animals that received IL12 mRNA.

[0325] FIGS. 53A and 53B are graphs showing comparable in vivo anti-tumor efficacy of IL12 mRNA (5 μg) containing a miR122 binding site (FIG. 53A) to miRless IL12 mRNA (FIG. 53B) in a B-cell lymphoma tumor model (A20). Both IL12 mRNAs (with miR122 binding site and without (i.e., miRless)) were formulated in an MC3-based lipid nanoparticle (LNP). The IL12 mRNAs were administered to mice bearing A20 B-cell lymphoma tumors. Complete responses (CR) were achieved in 5 out of 12 mice in the IL12 miRless group (FIG. 53A) and 6 out of 12 mice in the IL12 miR122 group (FIG. 53B).

[0326] FIGS. 54A and 54B are graphs showing in vivo anti-tumor efficacy of a single dose of 0.5 μg IL12 mRNA in MC3-based lipid nanoparticle (LNP) administered to mice bearing A20 B-cell lymphoma tumors. Complete responses (CR) were achieved in 4 of 12 mice in the IL12 miRless (0.5 μg) group (FIG. 54A) and 3 of 12 mice in the IL12 miR122 (0.5 μg) group (FIG. 54B).

[0327] FIGS. 55A and 55B are graphs showing enhanced in vivo anti-tumor efficacy in a B-cell lymphoma tumor model (A20) by administering multiple doses of 0.5 μg IL12 mRNA in MC3-based lipid nanoparticle (LNP) to mice bearing A20 tumors. Complete responses (CR) were achieved in 3 out of 12 mice (FIG. 55A) administered a single dose of 0.5 μg IL12 miR122 and 5 out of 12 mice (FIG. 55B) administered weekly dosing of 0.5 μg IL12 miR122 for seven (7) days x 6.

[0328] FIGS. 56A and 56B are graphs showing that the in vivo anti-tumor efficacy of weekly intratumoral doses of 0.5 μg IL12 mRNA in lipid nanoparticle (LNP) (i.e., compound 18) administered to mice bearing A20 B-cell lymphoma tumors is similar to the in vivo anti-tumor efficacy of 0.5 μg IL12 mRNA in MC3-based LNP. FIG. 56A shows the individual tumor volume (mm³) for 12 mice administered 0.5 μg IL12 miR122 in MC3-based LNP for 7 days x 6. Complete responses (CR) were achieved in 5 out of 12 animals.

[0329] FIG. 56B shows the individual tumor volumes for 12 mice administered 0.5 μg of IL12 mRNA in compound 18-based LNP for 7 days x 6. Complete responses (CR) were also achieved in 5 out of 12 animals.

[0330] FIGS. 57A and 57B are graphs showing tumor growth in mice bearing A20 tumors administered weekly dosing (7 days×6) of 0.5 μg non-translated negative control mRNA (NST) in MC3-based lipid nanoparticle (LNP) (FIG. 57A) and 0.5 μg non-translated negative control mRNA (NST) in compound 18-based LNP (FIG. 57B).

[0331] FIGS. 58A and 58B are graphs showing dose-dependent levels of IL12 in plasma (FIG. 58A) and tumor (FIG. 58B) at 6 hours and 24 hours following intratumoral administration of the indicated doses of IL12 mRNA to mice bearing A20 tumors. From left to right, the mice were given (i) PBS, (ii) 0.5 μg NST, (iii) 2.5 μg NST, (iv) 5 μg NST, (v) 0.5 μg IL12, (vi) 2.5 μg IL12, (vii) 5 μg IL12, (viii) 0.5 μg IL12 miR122, (ix) 2.5 μg IL12 miR122, and (x) 5 μg IL12 miR122.

[0332] FIGS. 59A to 59C are graphs showing elevated levels of IL12 in plasma and tumor following administration of indicated doses of IL12 mRNA in compound 18-based LNPs compared to IL12 mRNA in MC3-based LNPs. FIG. 59A shows plasma IL12 levels at 6 hours and 24 hours; FIG. 59B shows tumor IL12 levels at 6 hours and 24 hours. From left to right, the mice were given (i) PBS, (ii) 0.5 μg NST in MC3, (iii) 2.5 μg NST in MC3, (iv) 0.5 μg IL12 miR122 in MC3, (v) 2.5 μg IL12 miR122 in MC3, (vi) 0.5 μg NST in Compound 18, (vii) 2.5 μg NST in Compound 18, (viii) 5 μg IL12 miR122, (ix) 0.5 μg IL12 miR122 in Compound 18, and (x) 2.5 μg IL12 miR122 in Compound 18. FIG. 59C shows the fold increase of IL12 from Compound 18 formulated composition compared to MC3 formulated composition.

[0333] FIGS. 60A and 60B are graphs showing increased levels of IFNγ at 6 hours and 24 hours in plasma (FIG. 60A) and in tumor (FIG. 60B) following administration of IL12 mRNA to mice bearing A20 tumors. From left to right, the mice were given (i) PBS, (ii) 0.5 μg NST in MC3, (iii) 2.5 μg NST in MC3, (iv) 5 μg NST in MC3, (v) 0.5 μg IL12 in MC3, (vi) 2.5 μg IL12 in MC3, (vii) 5 μg IL12 in MC3, (viii) 0.5 μg IL12 miR122 in MC3, (ix) 2.5 μg IL12 miR122 in MC3, (x) 5 μg IL12 miR122 in MC3, (xi) 0.5 μg NST in Compound 18, (xii) 2.5 μg NST in Compound 18, (xiii) 0.5 μg IL12 miR122 in Compound 18, and (xiv) 2.5 μg IL12 miR122 in Compound 18.

[0334] FIGS. 61A and 61B are graphs showing increased levels of IP10 at 6 hours and 24 hours in plasma (FIG. 61A) and in tumor (FIG. 61B) following administration of IL12 mRNA to mice bearing A20 tumors. From left to right, the mice were given (i) PBS, (ii) 0.5 μg NST in MC3, (iii) 2.5 μg NST in MC3, (iv) 5 μg NST in MC3, (v) 0.5 μg IL12 in MC3, (vi) 2.5 μg IL12 in MC3, (vii) 5 μg IL12 in MC3, (viii) 0.5 μg IL12 miR122 in MC3, (ix) 2.5 μg IL12 miR122 in MC3, (x) 5 μg IL12 miR122 in MC3, (xi) 0.5 μg NST in Compound 18, (xii) 2.5 μg NST in Compound 18, (xiii) 0.5 μg IL12 miR122 in Compound 18, and (xiv) 2.5 μg IL12 miR122 in Compound 18.

[0335] FIGS. 62A and 62B are graphs showing decreased levels of IL6 at 6 hours and 24 hours in plasma (FIG. 62A) and in tumor (FIG. 62B) following administration of IL12 mRNA. From left to right, the mice were given (i) PBS, (ii) 0.5 μg NST in MC3, (iii) 2.5 μg NST in MC3, (iv) 5 μg NST in MC3, (v) 0.5 μg IL12 in MC3, (vi) 2.5 μg IL12 in MC3, (vii) 5 μg IL12 in MC3, (viii) 0.5 μg IL12 miR122 in MC3, (ix) 2.5 μg IL12 miR122 in MC3, (x) 5 μg IL12 miR122 in MC3, (xi) 0.5 μg NST in Compound 18, (xii) 2.5 μg NST in Compound 18, (xiii) 0.5 μg IL12 miR122 in Compound 18, and (xiv) 2.5 μg IL12 miR122 in Compound 18.

[0336] FIGS. 63A and 63B are graphs showing decreased levels of G-CSF at 6 hours and 24 hours in plasma (FIG. 63A) and in tumor (FIG. 63B) following administration of IL12 mRNA. From left to right, the mice were given (i) PBS, (ii) 0.5 μg NST in MC3, (iii) 2.5 μg NST in MC3, (iv) 5 μg NST in MC3, (v) 0.5 μg IL12 in MC3, (vi) 2.5 μg IL12 in MC3, (vii) 5 μg IL12 in MC3, (viii) 0.5 μg IL12 miR122 in MC3, (ix) 2.5 μg IL12 miR122 in MC3, (x) 5 μg IL12 miR122 in MC3, (xi) 0.5 μg NST in Compound 18, (xii) 2.5 μg NST in Compound 18, (xiii) 0.5 μg IL12 miR122 in Compound 18, and (xiv) 2.5 μg IL12 miR122 in Compound 18.

[0337] FIGS. 64A and 64B are graphs showing decreased levels of GROα at 6 hours and at 24 hours in plasma (FIG. 64A) and tumor (FIG. 64B) following administration of IL12 mRNA. From left to right, the mice were given (i) PBS, (ii) 0.5 μg NST in MC3, (iii) 2.5 μg NST in MC3, (iv) 5 μg NST in MC3, (v) 0.5 μg IL12 in MC3, (vi) 2.5 μg IL12 in MC3, (vii) 5 μg IL12 in MC3, (viii) 0.5 μg IL12 miR122 in MC3, (ix) 2.5 μg IL12 miR122 in MC3, (x) 5 μg IL12 miR122 in MC3, (xi) 0.5 μg NST in Compound 18, (xii) 2.5 μg NST in Compound 18, (xiii) 0.5 μg IL12 miR122 in Compound 18, and (xiv) 2.5 μg IL12 miR122 in Compound 18.

[0338] FIGS. 65A and 65B are graphs showing individual tumor volumes through day 35 post disease induction with A20 tumor following treatment with IL12_miR122 mRNA (FIG. 65B) compared to negative control mRNA (FIG. 65A).

[0339] FIGS. 66A and 66B are graphs showing body weight measurements of mice through day 35 post disease induction with A20 tumor following treatment with IL12_miR122 mRNA (FIG. 66B) compared to negative control mRNA (FIG. 66A).

[0340] FIG. 67 is a graph depicting bioluminescence (BL) as a surrogate for tumor burden at day 22 post disease induction with a luciferase-enabled MC38 colon cancer cell line in mice. From left to right, mice were administered no treatment, 2 μg mIL12_miRless, 2 μg mIL12_miR122, 2 μg NST_OX40L_122, 4 μg mIL12_miRless, 4 μg mIL12_miR122, 4 μg NST_OX40L_122, and rm IL12 1 μg.

[0341] FIG. 68 is a Kaplan-Meier curve showing the percent survival of mice treated with LNPs carrying IL12 mRNA compared to NST-OX40L negative controls. The graph shows survival to day 60 post implantation with A20 tumor.

[0342] FIG. 69A shows a graphic representation of the Fc-IL15R-IL15 fusion construct. The construct comprises a (i) signal peptide, (ii) an Fc region, and (iii) an IL15R joined at its 3′end to the 5′end of an IL15 by a linker.

[0343] FIG. 69B shows change in body weight after administration of a modified mRNA encoding the wild-type IL15 (hOptIL15) with or without another agent. Other agents include modified mRNAs encoding either the wild-type IL15Ra or IL15Ra ECD (mouse or human), recombinant IL15 protein, or NST-OX40L. Change in body weight was measured at various time points for up to 2 weeks after administration.

[0344] FIG. 70 shows IL15 protein levels measured in plasma after a single IV administration of a modified mRNA encoding the wild-type IL15 (hOptIL15) with or without another agent.

[0345] FIG. 71 shows the weight of the spleen after a single IV co-administration of a modified mRNA encoding the wild-type IL15 (hOptIL15) with a modified mRNA encoding the wild-type IL15Ra.

[0346] FIG. 72 shows the spleen cell count after a single IV co-administration of a modified mRNA encoding the wild-type IL15 (hOptIL15) with a modified mRNA encoding the wild-type IL15Ra. Spleen cells were further categorized into CD8a+ T cells, NK T cells, NK cells, CD4+ T cells, and B cells.

[0347] FIG. 73 is a diagram of IL18 polypeptides as used herein. The IL18 WT polypeptide represents the wild-type IL18 pre-polypeptide (SEQ ID NO: 564). The vertical line represents the cleavage site where caspase-1 removes the 35 amino acid signal peptide. The tPA-IL18 polypeptide is a wild-type IL18 mature peptide with a tissue plasminogen activator signal peptide on its N terminus (SEQ ID NO: 572). The IL2sp-IL18 peptide is a wild type IL18 mature peptide with the IL12 signal peptide on its N terminus (SEQ ID NO: 574).

[0348] FIG. 74A is a plot showing expression of both human IL18 (hIL18) and mouse IL18 (mIL18) in HeLa cells. Detection of IL18 polypeptides was performed as described in the examples below. Mock represents cells transfected with control mRNA. mRNAs encoding wild type IL18 (IL18 WT), IL18 with the tissue plasminogen activator signal peptide (tPA-IL18) and IL18 with the IL12 signal peptide (IL2sp-IL18) were transfected as indicated. The presence of the IL18 polypeptide in the HeLa cell lysate indicates that the polypeptide was not secreted from the cell while the presence of the IL18 polypeptide in the supernatant indicates that the polypeptide was secreted.

[0349] FIG. 74B is a plot showing the bioactivity of both mIL2sp-mIL18 and mIL18 polypeptides when contacted with CTLL2 cells in the presence of IL12. Bioactivity was measured by determining the amount of IFN-γ present in the CTLL2 cell supernatant as described in the examples.

[0350] FIG. 75A and FIG. 75B show graphs of the in vivo efficacy of IL23 modified mRNA and IL18 modified mRNA in a B-cell lymphoma model. A20 B cell lymphoma cells were established subcutaneously in BALB/c mice, and subsequently dosed with 12.5*g mRNA on days 18, 25 and 32 after tumor implantation. Mice were dosed with either IL23 mRNA (FIG. 75A) or a mixture of IL23 mRNA and IL18 mRNA (FIG. 75B). The graphs present individual plots for the growth of each tumor over time, starting at day 18 post-implantation.

[0351] FIG. 76 shows a schematic diagram of a single-chain IL12B-linker (G6S)-IL23A fusion protein comprising an IL12B polypeptide joined at its 3′-end by a GS linker to the 5′-end of an IL23A polypeptide.

[0352] FIG. 77A and FIG. 77B provide graphs of the in vivo efficacy of mIL23 encoding mRNA in a B cell lymphoma model. A20 B cell lymphoma cells were established subcutaneously in BALB/c mice, and subsequently dosed with 12.5*g mRNA on days 18, 25 and 32 after tumor implantation. Mice were dosed with either IL23 mRNA (FIG. 77B) or a control mRNA, i.e., NST FIX (FIG. 77A). The graphs present individual plots for the growth of each tumor over time, starting at day 18 post-implantation.

[0353] FIG. 78A and FIG. 78B provide graphs showing the effectiveness of interleukins in mouse models of melanoma, as drawn from Wang et al., J Dermatological Sci. 36:66-68 (2004). B16 melanoma cells were established subcutaneously in C57BL/6J mice, and subsequently dosed with plasmid vectors designed to express IL12 (pcDNA-IL12), IL18 (pcDNA-mproIL18/mice), IL23(pcDNA-IL23), or a GFP control (phGFP-105-C1). FIG. 78A presents the average tumor volume for each group. Final Kaplan-Meier survival curves were prepared and are shown in FIG. 78B.

[0354] FIG. 79A and FIG. 79B provide graphs of the in vivo efficacy of IL23 encoding mRNA and IL18 encoding mRNA in a B-cell lymphoma model. A20 B cell lymphoma cells were established subcutaneously in BALB/c mice, and subsequently dosed with 12.5*g mRNA on days 18, 25 and 32 after tumor implantation. Mice were dosed with either IL23 mRNA alone (FIG. 79A) or a mixture of IL23 mRNA and IL18 mRNA (FIG. 79B). The graphs present individual plots for the growth of each tumor over time, starting at day 18 post-implantation.

[0355] FIGS. 80A to 103A present RNA composition metrics, e.g., (U) metrics, (G) metrics, (C) metrics, (G/C) metrics, and G/C compositional bias for codon positions 1, 2, 3. The columns labeled “U content (%)” correspond to the % U_{TL} parameter. The columns labeled “U Content v. WT (%)” correspond to % U_{WT}. The columns labeled “U Content v. Theoretical Minimum (%)” correspond to % U_{TM}. The columns labeled “G Content (%)” correspond to % G_{TL}. The column labeled “G Content v. WT (%)” correspond to % G_{WT}. The columns labeled “G Content v. Theoretical Maximum (%)” correspond to % G_{TMX}. The columns labeled “C Content (%)” correspond to % C_{TL}. The columns labeled “C Content v. WT (%)” correspond to % C_{WT}. The columns labeled “C Content v. Theoretical Maximum (%)” correspond to % C_{TMX}. The columns labeled “G/C Content (%)” correspond to % G/C_{TL}. The columns labeled “G/C Content v. WT (%)” correspond to % G/C_{WT}. The columns labeled “G/C Content v. Theoretical Maximum (%)” correspond to % G/C_{TMX}. The statistical descriptors in each table (maximum, minimum, mean, median, and standard deviation) correspond to the population of sequence optimized polynucleotides.

[0356] For example, for FIG. 80A, the first row under the “Protein” header would show the construct analyzed (“Treme-LC-VL”), followed by the length of the protein construct in amino acids (“107”), the theoretical minimum U (%) content of an encoding nucleic acid (“11.21%”), the theoretical minimum U (abs) content of an encoding nucleic acid (“36”), and the number of phenylalanine encoding codons (“5”). The first row under the “Nucleic acid header” includes again the name of the construct, its length in nucleobases, and compositional descriptors. The remaining rows provide the distribution of different compositional parameter (maximum, minimum, mean, median, standard deviation) for a population of 25 sequence optimized polynucleotides encoding the specified construct. The same structure use for the rest of composition tables in FIGS. 80A to 103A. The same organization applies to codon bias tables such as FIG. 88A, except that instead of nucleobase composition values, the columns correspond to total GC content in the polynucleotides (“GC”) and GC content in the 1^{st}, 2^{nd}, and 3^{rd} position of each codon in the polynucleotide.

[0357] FIG. 80A shows uracil (U) metrics corresponding to the VL domain of the light chain of tremelimumab and 25 sequence optimized polynucleotides corresponding to that domain. FIG. 80B shows guanine (G) metrics corresponding to the VL domain of the light chain of tremelimumab and 25 sequence optimized polynucleotides corresponding to that domain. FIG. 80C shows cytosine (C) metrics corresponding to the VL domain of the light chain of tremelimumab and 25 sequence optimized polynucleotides corresponding to that domain. FIG. 80D shows guanine plus cytosine (G/C) metrics corresponding to the VL domain of the light chain of tremelimumab and 25 sequence optimized polynucleotides corresponding to that domain.

[0358] FIG. 81A shows uracil (U) metrics corresponding to the VH domain of the heavy chain of tremelimumab and 50 sequence optimized polynucleotides corresponding to that domain. FIG. 81B shows guanine (G) metrics corresponding to the VH domain of the heavy chain of tremelimumab and 50 sequence optimized polynucleotides corresponding to that domain. FIG. 81C shows cytosine (C) metrics corresponding to the VH domain of the heavy chain of tremelimumab and 50 sequence optimized polynucleotides corresponding to that domain. FIG. 81D shows guanine plus cytosine (G/C) metrics corresponding to the VH domain of the heavy chain of tremelimumab and 50 sequence optimized polynucleotides corresponding to that domain.

[0359] FIG. 82A shows uracil (U) metrics corresponding to the VL domain of the light chain of ipilimumab and 25 sequence optimized polynucleotides corresponding to that domain. FIG. 82B shows guanine (G) metrics corresponding to the VL domain of the light chain of ipilimumab and 25 sequence optimized polynucleotides corresponding to that domain. FIG. 82C shows cytosine (C) metrics corresponding the VL domain of the light chain of ipilimumab and 25 sequence optimized polynucleotides corresponding to that domain. FIG. 82D shows guanine plus cytosine (G/C) metrics corresponding the VL domain of the light chain of ipilimumab and 25 sequence optimized polynucleotides corresponding to that domain.

[0360] FIG. 83A shows uracil (U) metrics corresponding to the VH domain of the heavy chain of ipilimumab and 25 sequence optimized polynucleotides corresponding to that domain. FIG. 83B shows guanine (G) metrics corresponding to the VH domain of the heavy chain of ipilimumab and 25 sequence optimized polynucleotides corresponding to that domain. FIG. 83C shows cytosine (C) metrics corresponding to the VH domain of the heavy chain of ipilimumab and 25 sequence optimized polynucleotides corresponding to that domain. FIG. 83D shows guanine plus cytosine (G/C) metrics corresponding to the VH domain of the heavy chain of ipilimumab and 25 sequence optimized polynucleotides corresponding to that domain.

[0361] FIG. 84A shows uracil (U) metrics corresponding to the constant domain (CL) of the light chain used in tremelimumab and ipilimumab constructs and 25 sequence optimized polynucleotides corresponding to that domain. FIG. 84B shows guanine (G) metrics corresponding the constant domain (CL) of the light chain used in tremelimumab and ipilimumab and 25 sequence optimized polynucleotides corresponding to that domain.

[0362] FIG. 84C shows cytosine (C) metrics corresponding the constant domain (CL) of the light chain used in tremelimumab and ipilimumab and 25 sequence optimized polynucleotides corresponding to that domain. FIG. 84D shows guanine plus cytosine (G/C) metrics corresponding to the constant domain (CL) of the light chain used in tremelimumab and ipilimumab and 25 sequence optimized polynucleotides corresponding to that domain.

[0363] FIG. 85A shows uracil (U) metrics corresponding to the constant region (CH) of the IgG2 heavy chain used in tremelimumab constructs and 25 sequence optimized polynucleotides corresponding to that domain. FIG. 85B shows guanine (G) metrics corresponding to the constant region (CH) of the IgG2 heavy chain used in tremelimumab constructs and 25 sequence optimized polynucleotides corresponding to that domain. FIG. 85C shows cytosine (C) metrics corresponding to the constant region (CH) of the IgG2 heavy chain used in tremelimumab constructs and 25 sequence optimized polynucleotides corresponding to that domain. FIG. 85D shows guanine plus cytosine (G/C) metrics corresponding to the constant region (CH) of the IgG2 heavy chain used in tremelimumab constructs and 25 sequence optimized polynucleotides corresponding to that domain.

[0364] FIG. 86A shows uracil (U) metrics corresponding to the constant region (CH) of the IgG1 heavy chain used in tremelimumab and ipilimumab constructs and 50 sequence optimized polynucleotides corresponding to that domain. FIG. 86B shows guanine (G) metrics corresponding to the constant region (CH) of the IgG1 heavy chain used in tremelimumab and ipilimumab constructs and 50 sequence optimized polynucleotides corresponding to that domain. FIG. 86C shows cytosine (C) metrics corresponding to the constant region (CH) of the IgG1 heavy chain used in tremelimumab and ipilimumab constructs and 50 sequence optimized polynucleotides corresponding to that domain. FIG. 86D shows guanine plus cytosine (G/C) metrics corresponding to the constant region (CH) of the IgG1 heavy chain used in tremelimumab and ipilimumab constructs and 50 sequence optimized polynucleotides corresponding to that domain.

[0365] FIGS. 87A and 87B show uracil (U) metrics corresponding to wild type CD80 and 25 sequence optimized CD80 polynucleotides (FIG. 87A) and wild type Fc region and 25 sequence optimized Fc region polynucleotides (FIG. 87B). FIGS. 87C and 87D show guanine (G) metrics corresponding to wild type CD80 and 25 sequence optimized CD80 polynucleotides (FIG. 87C) and wild type Fc region and 25 sequence optimized Fc region polynucleotides (FIG. 87D). FIGS. 87E and 87F shows cytosine (C) metrics corresponding to wild type CD80 and 25 sequence optimized CD80 polynucleotides (FIG. 87E) and wild type Fc region and 25 sequence optimized Fc region polynucleotides (FIG. 87F). FIGS. 87G and 87H shows guanine plus cytosine (G/C) metrics corresponding to wild type CD80 and 25 sequence optimized CD80 polynucleotides (FIG. 87G) and wild type Fc region and 25 sequence optimized Fc region polynucleotides (FIG. 87H).

[0366] FIGS. 88A and 88B show a comparison between the G/C compositional bias for codon positions 1, 2, 3 corresponding to the wild type CD80 and 25 sequence optimized CD80 polynucleotides (FIG. 88A) and wild type Fc region and 25 sequence optimized Fc region polynucleotides (FIG. 88B).

[0367] FIG. 89A shows uracil (U) metrics corresponding to wild type caTLR4 and 25 sequence optimized caTLR4 polynucleotides. FIG. 89B shows guanine (G) metrics corresponding to wild type caTLR4 and 25 sequence optimized caTLR4 polynucleotides.

[0368] FIG. 89C shows cytosine (C) metrics corresponding to wild type caTLR4 and 25 sequence optimized caTLR4 polynucleotides. FIG. 89D shows guanine plus cytosine (G/C) metrics corresponding to wild type caTLR4 and 25 sequence optimized caTLR4 polynucleotides.

[0369] FIG. 90 show a comparison between the G/C compositional bias for codon positions 1, 2, 3 corresponding to the wild type caTLR4 (TLR4ca-WT row) and 25 sequence optimized caTLR4 polynucleotides (Overall row).

[0370] FIG. 91A shows uracil (U) metrics corresponding to wild type IL12B and 20 sequence optimized IL12B polynucleotides (hIL12AB_001 to hIL12AB_020). FIG. 91B shows guanine (G) metrics corresponding to wild type IL12B and 20 sequence optimized IL12B polynucleotides (hIL12AB_001 to hIL12AB_020). FIG. 91C shows cytosine (C) metrics corresponding to wild type IL12B and 20 sequence optimized IL12B polynucleotides (hIL12AB_001 to hIL12AB_020). FIG. 91D shows guanine plus cytosine (G/C) metrics corresponding to wild type IL12B and 20 sequence optimized IL12B polynucleotides (hIL12AB_001 to hIL12AB_020).

[0371] FIG. 92A shows uracil (U) metrics corresponding to wild type IL12B and 20 sequence optimized IL12B polynucleotides (hIL12AB_021 to hIL12AB_040). FIG. 92B shows guanine (G) metrics corresponding to wild type IL12B and 20 sequence optimized IL12B polynucleotides (hIL12AB_021 to hIL12AB_040). FIG. 92C shows cytosine (C) metrics corresponding to wild type IL12B and 20 sequence optimized IL12B polynucleotides (hIL12AB_021 to hIL12AB_040). FIG. 92D shows guanine plus cytosine (G/C) metrics corresponding to wild type IL12B and 20 sequence optimized IL12B polynucleotides (hIL12AB_021 to hIL12AB_040).

[0372] FIG. 93A shows uracil (U) metrics corresponding to wild type IL12A and 20 sequence optimized IL12A polynucleotides (hIL12AB_001 to hIL12AB_020). FIG. 93B shows guanine (G) metrics corresponding to wild type IL12A and 20 sequence optimized IL12A polynucleotides (hIL12AB_001 to hIL12AB_020). FIG. 93C shows cytosine (C) metrics corresponding to wild type IL12A and 20 sequence optimized IL12A polynucleotides (hIL12AB_001 to hIL12AB_020). FIG. 93D shows guanine plus cytosine (G/C) metrics corresponding to wild type IL12A and 20 sequence optimized IL12A polynucleotides (hIL12AB_001 to hIL12AB_020).

[0373] FIG. 94A shows uracil (U) metrics corresponding to wild type IL12A and 20 sequence optimized IL12A polynucleotides (hIL12AB_021 to hIL12AB_040). FIG. 94B shows guanine (G) metrics corresponding to wild type IL12A and 20 sequence optimized IL12A polynucleotides (hIL12AB_021 to hIL12AB_040). FIG. 94C shows cytosine (C) metrics corresponding to wild type IL12A and 20 sequence optimized IL12A polynucleotides (hIL12AB_021 to hIL12AB_040). FIG. 94D shows guanine plus cytosine (G/C) metrics corresponding to wild type IL12A and 20 sequence optimized IL12A polynucleotides (hIL12AB_021 to hIL12AB_040). The column labeled “G/C Content (%)” corresponds to % G/C_{TL}.

[0374] FIG. 95A shows a comparison between the G/C compositional bias for codon positions 1, 2, 3 corresponding to the wild type IL12B and 20 sequence optimized IL12B polynucleotides (hIL12AB_001 to hIL12AB_020). FIG. 95B shows a comparison between the G/C compositional bias for codon positions 1, 2, 3 corresponding to the wild type IL12B and 20 sequence optimized IL12B polynucleotides (hIL12AB_021 to hIL12AB_040). FIG. 95C shows a comparison between the G/C compositional bias for codon positions 1, 2, 3 corresponding to the wild type IL12A and 20 sequence optimized IL12A polynucleotides (hIL12AB_0-1 to hIL12AB_020). FIG. 95D shows a comparison between the G/C compositional bias for codon positions 1, 2, 3 corresponding to the wild type IL12A and 20 sequence optimized IL12A polynucleotides (hIL12AB_021 to hIL12AB_040).

[0375] FIG. 96A shows uracil (U) metrics corresponding to the wild-type IL15 in IL15opt-tPa6 and 50 sequence optimized IL15opt-tPa6 polynucleotides (IL15opt-tPa6-C001 to IL15opt-tPa6-C050). FIG. 96B shows guanine (G) metrics corresponding to the wild-type IL15 in IL15opt-tPa6 and 50 sequence optimized IL15opt-tPa6 polynucleotides (IL15opt-tPa6-CO01 to IL15opt-tPa6-C050). FIG. 96C shows cytosine (C) metrics corresponding to the wild-type IL15 in IL15opt-tPa6 and 50 sequence optimized IL15opt-tPa6 polynucleotides (IL15opt-tPa6-CO01 to IL15opt-tPa6-C050). FIG. 96D shows guanine plus cytosine (G/C) metrics corresponding to the wild-type IL15 in IL15opt-tPa6 and 50 sequence optimized IL15opt-tPa6 polynucleotides (IL15opt-tPa6-CO01 to IL15opt-tPa6-C050). FIG. 96E shows a comparison between the G/C compositional bias for codon positions 1, 2, 3 corresponding to the wild-type IL15 in IL15opt-tPa6 and 50 sequence optimized IL15opt-tPa6 polynucleotides (IL15opt-tPa6-CO01 to IL15opt-tPa6-C050).

[0376] FIG. 97A shows uracil (U) metrics corresponding to the Sushi Domain of wild-type IL15Ra in 25 sequence optimized IL15_RLI (IL15_RLI-CO01 to IL15_RLI-C025) and 25 sequence optimized IL15_Fc_RLI (IL15_Fc_RLI-CO01 to IL15_Fc_RLI-C025) polynucleotides. FIG. 97B shows guanine (G) metrics corresponding to the Sushi Domain of wild-type IL15Ra in 25 sequence optimized IL15 RLI (IL15_RLI-CO01 to IL15_RLI-C025) and 25 sequence optimized IL15_Fc_RLI (IL15 Fc_RLI-CO01 to IL15_Fc_RLI-CO25) polynucleotides. FIG. 97C shows cytosine (C) metrics corresponding to the Sushi Domain of wild-type IL15Ra in 25 sequence optimized IL15_RLI (IL15_RLI-CO01 to IL15_RLI-CO25) and 25 sequence optimized IL15_Fc_RLI (IL15 Fc_RLI-CO01 to IL15_Fc_RLI-CO25) polynucleotides. FIG. 97D shows guanine plus cytosine (G/C) metrics corresponding to the Sushi Domain of wild-type IL15Ra in 25 sequence optimized IL15_RLI (IL15_RLI-CO01 to IL15_RLI-CO25) and 25 sequence optimized IL15_Fc_RLI (IL15_Fc_RLI-CO01 to IL15_Fc_RLI-CO25) polynucleotides. FIG. 97E shows a comparison between the G/C compositional bias for codon positions 1, 2, 3 corresponding to the Sushi Domain of wild-type IL15Ra in 25 sequence optimized IL15 RLI (IL15_RLI-C001 to IL15_RLI-CO25) and 25 sequence optimized IL15_Fc_RLI (IL15 Fc_RLI-CO01 to IL15_Fc_RLI-CO25) polynucleotides.

[0377] FIG. 98A shows uracil (U) metrics corresponding to wild-type IL15Ra in IL15Ra_WT_miR122 and 25 sequence optimized IL15Ra_WT_miR122 polynucleotides (IL15Ra_WT_miR122-CO01 to IL15Ra_WT_miR122-CO25). FIG. 98B shows guanine (G) metrics corresponding wild-type IL15Ra in IL15Ra_WT_miR122 and 25 sequence optimized IL15Ra_WT_miR122 polynucleotides (IL15Ra_WT_miR122-CO01 to IL15Ra_WT_miR122-CO25). FIG. 98C shows cytosine (C) metrics corresponding to wild-type IL15Ra in IL15Ra_WT miR122 and 25 sequence optimized IL15Ra_WT_miR122 polynucleotides (IL15Ra WT_miR122-CO01 to IL15Ra_WT_miR122-CO25). FIG. 98D shows guanine plus cytosine (G/C) metrics corresponding to wild-type IL15Ra in IL15Ra_WT_miR122 and 25 sequence optimized IL15Ra_WT_miR122 polynucleotides (IL15Ra_WT_miR122-CO01 to IL15Ra_WT_miR122-CO25).FIG. 98E shows a comparison between the G/C compositional bias for codon positions 1, 2, 3 corresponding to wild-type IL15Ra in IL15Ra_WT_miR122 and 25 sequence optimized IL15Ra_WT_miR122 polynucleotides (IL15Ra WT miR122-CO01 to IL15Ra_WT_miR122-CO25).

[0378] FIG. 99A shows uracil (U) metrics corresponding to wild-type IL15 in 25 IL15-RLI sequence optimized (IL15-RLI -CO01 to IL15-RLI -C025) and 25 IL15-Fc-RLI sequence optimized (IL15 Fc_RLI-CO01 to IL15_Fc_RLI-CO25) polynucleotides. wild-type IL15Ra and 20 sequence optimized IL15Ra polynucleotides (hIL15RαB_021 to hIL15RαB_040). FIG. 99B shows guanine (G) metrics corresponding to wild-type IL15 in 25 IL15-RLI sequence optimized (IL15-RLI -CO01 to IL15-RLI -C025) and 25 IL15-Fc-RLI sequence optimized (IL15_Fc_RLI-CO01 to IL15_Fc_RLI-CO25) polynucleotides.

[0379] FIG. 99C shows cytosine (C) metrics corresponding to wild-type IL15 in 25 IL15-RLI sequence optimized (IL15-RLI -CO01 to IL15-RLI -C025) and 25 IL15-Fc-RLI sequence optimized (IL15_Fc_RLI-C001 to IL15_Fc_RLI-CO25) polynucleotides. FIG. 99D shows guanine plus cytosine (G/C) metrics corresponding to wild-type IL15 in 25 IL15-RLI sequence optimized (IL15-RLI -CO01 to IL15-RLI -C025) and 25 IL15-Fc-RLI sequence optimized (IL15_Fc_RLI-C001 to IL15_Fc_RLI-CO25) polynucleotides. FIG. 99E shows a comparison between the G/C compositional bias for codon positions 1, 2, 3 corresponding to wild-type IL15 in 25 IL15-RLI sequence optimized (IL15-RLI-C001 to IL15-RLI-C025) and 25 IL15-Fc-RLI sequence optimized (IL15 Fc_RLI-C001 to IL15_Fc_RLI-CO25).

[0380] FIG. 100A shows uracil (U) metrics corresponding to wild-typeIL18 mature peptide with a tissue plasminogen activator (tPA) signal peptide on its N terminus (tPANIL18 wt) and 25 sequence optimized IL18 polynucleotides with tPA signal peptides.

[0381] FIG. 100B shows guanine (G) metrics corresponding to tPANIL18 wt and 25 sequence optimized IL18 polynucleotides with tPA signal peptides. FIG. 100C shows cytosine (C) metrics corresponding to tPANIL18 wt and 25 sequence optimized IL18 polynucleotides with tPA signal peptides. FIG. 100D shows guanine plus cytosine (G/C) metrics corresponding tPANIL18 wt and 25 sequence optimized IL18 polynucleotides with tPA signal peptides. FIG. 100E shows a comparison between the G/C compositional bias for codon positions 1, 2, 3 corresponding to the tPANIL18 wt and 25 sequence optimized IL18 polynucleotides with tPA signal peptides.

[0382] FIG. 101A shows uracil (U) metrics corresponding to wild-typeIL18 mature peptide with an Interleukin-2 signal peptide (IL2sp) on its N terminus (IL2spIL18 wt) and 25 sequence optimizedIL18 polynucleotides with IL2 signal peptides. FIG. 101B shows guanine (G) metrics corresponding to IL2spIL18 wt and 25 sequence optimizedIL18 polynucleotides with IL2 signal peptides. FIG. 101C shows cytosine (C) metrics corresponding to IL2spIL18 wt and 25 sequence optimizedIL18 polynucleotides with IL2 signal peptides. FIG. 101D shows guanine plus cytosine (G/C) metrics corresponding IL2spIL18 wt and 25 sequence optimized IL18 polynucleotides with IL2 signal peptides.

[0383] FIG. 101E shows a comparison between the G/C compositional bias for codon positions 1, 2, 3 corresponding to the IL2sp IL18 wt and 25 sequence optimizedIL18 polynucleotides with IL2 signal peptides.

[0384] FIG. 102A shows uracil (U) metrics corresponding to wild-type IL12B and 25 sequence optimized IL12B polynucleotides. FIG. 102B shows guanine (G) metrics corresponding to wild-type IL12B and 25 sequence optimized IL12B polynucleotides. FIG. 102C shows cytosine (C) metrics corresponding to wild-type IL12B and 25 sequence optimized IL12B polynucleotides. FIG. 102D shows guanine plus cytosine (G/C) metrics corresponding to wild-type isoform 1 of IL12 and 25 sequence optimized IL12 polynucleotides. FIG. 102E shows a comparison between the G/C compositional bias for codon positions 1, 2, 3 corresponding to the wild-type IL12B and 25 sequence optimized IL12B polynucleotides.

[0385] FIG. 103A shows uracil (U) metrics corresponding to wild-type IL23A and 25 sequence optimized IL23A polynucleotides. FIG. 103B shows guanine (G) metrics corresponding to wild-type IL23A and 25 sequence optimized IL23A polynucleotides.

[0386] FIG. 103C shows cytosine (C) metrics corresponding to wild-type IL23A and 25 sequence optimized IL23A polynucleotides. FIG. 103D shows guanine plus cytosine (G/C) metrics corresponding to wild-type IL23A and 25 sequence optimized IL23A polynucleotides.

[0387] FIG. 103E shows a comparison between the G/C compositional bias for codon positions 1, 2, 3 corresponding to the wild-type IL23A and 25 sequence optimized IL23A polynucleotides.

[0388] FIG. 104A shows uracil (U) metrics corresponding to wild-type OX40L and 25 sequence optimized OX40L polynucleotides. FIG. 104B shows guanine (G) metrics corresponding to wild-type OX40L and 25 sequence optimized OX40L polynucleotides.

[0389] FIG. 104C shows cytosine (C) metrics corresponding to wild-type OX40L and 25 sequence optimized OX40L polynucleotides. FIG. 104D shows guanine plus cytosine (G/C) metrics corresponding to wild-type OX40L and 25 sequence optimized OX40L polynucleotides.

[0390] FIG. 104E shows a comparison between the G/C compositional bias for codon positions 1, 2, 3 corresponding to the wild-type OX40L and 25 sequence optimized OX40L polynucleotides.

[0391] FIGS. 105A-105C show the protein sequence (FIG. 105A; SEQ ID NO: 471), table with domain features (FIG. 105B), and nucleic acid sequence (FIG. 105C; SEQ ID NO:472) of CD80 (wtCD80). Isoform 2 of wt CD80 has a substitution of amino acids 234-266 of SEQ ID NO: 471 by a Ser residue, and Isoform 3 of wt CD80 is missing amino acids 141-266 of SEQ ID NO: 471.

[0392] FIGS. 106A-106B show a CD80-Fc fusion construct. FIG. 106A shows the protein sequence of the CD80-Fc fusion construct (SEQ ID NO: 473). The signal peptide (e.g., CD80 signal peptide) is italicized; the extracellular (EC) domain of CD80 is underlined; and the Fc region is bolded. FIG. 106B shows the corresponding wild-type nucleotide sequence encoding the CD80-Fc fusion protein (SEQ ID NO:474).

[0393] FIGS. 107A-107C show the protein sequence (FIG. 107A; SEQ ID NO:523), table with domain features (FIG. 107B), and nucleic acid sequence (FIG. 107C; SEQ ID NO:524) of isoform 1 of wild type TLR4 (wtTLR4). Isoform 2 of wt TLR4 is missing amino acids 1-40 of SEQ ID NO: 523, and Isoform 3 of wt TLR4 is missing amino acids 1-200 of SEQ ID NO: 523.

[0394] FIGS. 108A-108B show a constitutively active TLR4 (caTLR4) construct. FIG. 108A shows the protein sequence (SEQ ID NO:525). The signal peptide (e.g., lysosome-associated membrane glycoprotein 1 (LAMP1) signal peptide) is italicized; the extracellular domain is underlined; the transmembrane domain is bolded; and the cytoplasmic domain has dotted underline. FIG. 108B shows the corresponding wild-type nucleotide sequence (SEQ ID NO:526) encoding the signal peptide of LAMP1 and the caTLR4 polypeptide.

[0395] FIG. 109A shows, from top to bottom, (1) the wild-type IL12B amino acid sequence (SEQ ID NO: 1035), (2) the wild-type nucleic acid encoding the wtIL12B (SEQ ID NO: 1036), (3) the wild-type IL12A amino acid sequence (SEQ ID NO:1037), (4) the wild type nucleic acid encoding the wtIL12A (SEQ ID NO:1038), (5) the wild-type IL12B signal peptide amino acid sequence (SEQ ID NO:1039), and (6) the wild-type nucleic acid encoding the wtIL12B signal peptide (SEQ ID NO:1040).

[0396] FIG. 109B shows a table correlating amino acid numbering in SEQ ID NOs, nucleotide numbering in SEQ ID NOs, and the 5′ UTR, IL12B signal peptide, mature IL12A and IL12B peptides, and linker.

[0397] FIG. 110A shows the wild-type IL15Ra amino acid sequence (SEQ ID NO: 808), FIG. 110B shows the wild-type nucleic acid encoding the wild-type IL15Ra (SEQ ID NO:809), FIG. 110C shows the wild-type IL15 amino acid sequence (SEQ ID NO: 810), and FIG. 110D shows the wild-type nucleic acid encoding the wild-type IL15 (SEQ ID NO: 811). The signal peptide of the wild-type IL15Ra (FIG. 110A) and IL15 (FIG. 110C) are italicized. The sushi domain of the wild-type IL15Ra and the propeptide of the wild-type IL15 are underlined in FIG. 110A (double underline) and in FIG. 110C (solid line), respectively. FIG. 110E shows the wild-type IL15-tPA amino acid sequence (SEQ ID NO: 812). In FIG. 110E the signal peptide is italicized and the mature IL15 is represented by a dotted underline. FIG. 110F shows the amino acid sequence for the wild-type Fc-IL15R-IL15 fusion construct (SEQ ID NO: 813). The signal peptide is italicized, the Fc region is shaded, the IL15R polypeptide is double underlined, the linker is bolded, and the IL15 polypeptide is single underlined.

[0398] FIGS. 111A-111C show the wild type IL18 protein sequence (FIG. 111A; SEQ ID NO: 564), table with domain features (FIG. 111B), and wild type IL18 nucleic acid sequence (FIG. 111C; SEQ ID NO: 565), (FIG. 111C) of isoform 1 of IL18 (wtIL18).

[0399] FIG. 112A-112C show the wild type IL18 protein sequence (FIG. 112A; SEQ ID NO:566), table with domain features (FIG. 112B), and wild type IL18 nucleic acid sequences (FIG. 112C; SEQ ID NO: 567) of isoform 2 of wtIL18. Isoform 2 of wtIL18 is missing amino acids 27-30 of SEQ ID NO: 564.

[0400] FIG. 113A shows an amino acid sequence of tPA-IL18 (SEQ ID NO: 572). The signal peptide is underlined, and the mature protein sequence is bolded. FIG. 113B shows a nucleotide sequence of tPA-IL18 (SEQ ID NO: 573). FIG. 113C shows an amino acid sequence of IL2-IL18 (SEQ ID NO: 574). FIG. 113D shows a nucleotide sequence of IL2-IL18 (SEQ ID NO: 575).

[0401] FIG. 114A shows an amino acid sequence of IgLC-IL18 (SEQ ID NO: 576).

[0402] FIG. 114B shows an amino acid sequence of IL-1ra-IL18 (SEQ ID NO: 577). FIG. 114C shows an amino acid sequence of IL18 double mutant, which contains amino acid substitutions at D71S and D71N (SEQ ID NO: 578).

[0403] FIG. 115A shows the wild-type IL12B amino acid sequence (SEQ ID NO: 979), FIG. 115B shows the wild-type nucleic acid encoding the IL12B polypeptide (SEQ ID NO: 980), FIG. 115C shows the wild-type IL23A amino acid sequence (SEQ ID NO: 981), and FIG. 115D shows the wild-type nucleic acid encoding the IL23A polypeptide (SEQ ID NO: 982). The signal peptides for both the IL12B and IL23A polypeptides are underlined.

[0404] FIG. 116A provides the amino acid sequence of IL12B-Linker(G6S)-IL23A fusion protein (SEQ ID NO: 983). FIG. 116B provides a table identifying the various domain features of a single-chain IL12B-Linker(G6S)-IL23A fusion protein. FIG. 116C provides the nucleic acid sequence encoding the single-chain IL12B-Linker(G6S)-IL23A fusion protein (SEQ ID NO: 984).

### DETAILED DESCRIPTION

[0405] A particularly exciting approach to treating cancer involves the prevention or treatment of disease with substances that stimulate the immune response, known as cancer immunotherapy. Cancer immunotherapy, also referred in the art as immuno-oncology, has began to revolutionize cancer treatment, by introducing therapies that target not the tumor, but the host immune system. These therapies possess unique pharmacological response profiles, and thus represent therapies that might cure distinct types of cancer. Cancers of the lungs, kidney, bladder and skin are among those that derive substantial efficacy from treatment with immuno-oncology in terms of survival or tumor response, with melanoma possibly showing the greatest benefits. Cancer immunotherapy often features checkpoint inhibitor treatment with an exciting new class of biologic drugs known as checkpoint inhibitor antibodies.

[0406] The present disclosure provides compositions and methods for the treatment of cancer, in particular, cancer immunotherapeutic combinations and cancer immunotherapeutic methods. In particular, the disclosure relates the compositions and methods for the treatment of cancer using a combination approach that features mRNAs encoding at least two polypeptides capable of promoting or enhancing an immune response against the tumor. Without being bound in theory, it is believed that priming of an anti-cancer immune response is possible by administering, e.g., a first polynucleotide (e.g., an mRNA) comprising an open reading frame encoding a first protein (e.g., IL12 or IL23) which is important in the stimulation of, for example, T-cells, or natural killer cells. Such priming compound can be administered, for example, in combination with a second polynucleotide (e.g., an mRNA) comprising an open reading frame encoding a second protein (e.g., OXL) which provides a second stimulation signal (i.e., a co-stimulatory signal), therefore amplifying the immune response elicited by the primer. The combination can further comprise a third component, for example, a third polynucleotide (e.g., an mRNA) comprising an open reading frame encoding a third protein (e.g., an anti-CTLA-4) which blocks or inhibits a checkpoint in the immune system (e.g., CTLA-4 or PD-1). The inhibition of the checkpoint would further amplify the immune response.

[0407] In some embodiments, the immuno therapeutic compositions and methods disclosed herein can enhance an immune response, and/or to trigger or enhance anti-cancer memory. Preferred aspects of the disclosure feature treatment with at least two polynucleotides (e.g., mRNAs) are selected from the group consisting of (i) a polynucleotide (e.g., an mRNA) comprising an open reading frame (ORF) encoding an immune response primer polypeptide (e.g., an IL12 or IL23 polypeptide); (ii) a polynucleotide (e.g., mRNAs) comprising an ORF encoding an immune response co-stimulatory signal polypeptide (e.g., an OX40L polypeptide); (iii) a polynucleotide (e.g., mRNAs) comprising an ORF encoding a checkpoint inhibitor polypeptide or a checkpoint inhibitor polypeptide (e.g., and anti-CTLA-4 antibody); and, (iv) a combination thereof.

[0408] Exemplary aspects feature treatment with the combinations or mRNA described above (i.e., mRNAs encoding immune response primer polypeptides, immune response co-stimulatory signal polypeptides, checkpoint inhibitor polypeptides, or combinations thereof) encapsulated in lipid nanoparticles (LNP). In some exemplary aspects, these LNPs are cationic lipid-based LNPs, which can be administered, e.g., intratumorally.

[0409] Thus, the present disclosure is directed, e.g., to compositions, pharmaceutical formulations comprising such compositions, and methods of treatment of cancer (e.g., methods of reducing or decreasing the size of a tumor or inhibiting growth of a tumor in a subject in need thereof) comprising administering the compositions or formulations disclosed herein to a subject in need thereof. In particular, the present disclosure provides method of treatment of cancer (e.g., tumors) comprising administering to a subject in need thereof an effective amount of a combination of mRNAs encoding, e.g., an immune response primer polypeptide, an immune response co-stimulatory signal polypeptide, a checkpoint inhibitor polypeptide, or a combination thereof. In some specific embodiments, the mRNAs in the therapies disclosed herein are encapsulated in LNPs comprising an ionizable amino lipid of Formula (I) as disclosed below, e.g., Compounds 18, 25, 26 or 48.

[0410] The headings provided herein are not limitations of the various aspects or aspects of the disclosure, which can be defined by reference to the specification as a whole. Accordingly, the terms defined immediately below are more fully defined by reference to the specification in its entirety. Before describing the present disclosure in detail, it is to be understood that this disclosure is not limited to specific compositions or process steps, as such can vary.

### I. Definitions

[0411] In order that the present disclosure can be more readily understood, certain terms are first defined. As used in this application, except as otherwise expressly provided herein, each of the following terms shall have the meaning set forth below. Additional definitions are set forth throughout the application.

[0412] The present disclosure includes embodiments in which exactly one member of the group is present in, employed in, or otherwise relevant to a given product or process. The present disclosure includes embodiments in which more than one, or all of the group members are present in, employed in, or otherwise relevant to a given product or process.

[0413] In this specification and the appended claims, the singular forms “a”, “an” and “the” include plural referents unless the context clearly dictates otherwise. The terms “a” (or “an”), as well as the terms “one or more,” and “at least one” can be used interchangeably herein. In certain aspects, the term “a” or “an” means “single.” In other aspects, the term “a” or “an” includes “two or more” or “multiple.”

[0414] Furthermore, “and/or” where used herein is to be taken as specific disclosure of each of the two specified features or components with or without the other. Thus, the term “and/or” as used in a phrase such as “A and/or B” herein is intended to include “A and B,” “A or B,” “A” (alone), and “B” (alone). Likewise, the term “and/or” as used in a phrase such as “A, B, and/or C” is intended to encompass each of the following aspects: A, B, and C; A, B, or C; A or C; A or B; B or C; A and C; A and B; B and C; A (alone); B (alone); and C (alone).

[0415] Unless defined otherwise, all technical and scientific terms used herein have the same meaning as commonly understood by one of ordinary skill in the art to which this disclosure is related. For example, the Concise Dictionary of Biomedicine and Molecular Biology, Juo, Pei-Show, 2nd ed., 2002, CRC Press; The Dictionary of Cell and Molecular Biology, 3rd ed., 1999, Academic Press; and the Oxford Dictionary Of Biochemistry And Molecular Biology, Revised, 2000, Oxford University Press, provide one of skill with a general dictionary of many of the terms used in this disclosure.

[0416] Wherever aspects are described herein with the language “comprising,” otherwise analogous aspects described in terms of “consisting of” and/or “consisting essentially of” are also provided.

[0417] Units, prefixes, and symbols are denoted in their Systeme International de Unites (SI) accepted form. Numeric ranges are inclusive of the numbers defining the range. Where a range of values is recited, it is to be understood that each intervening integer value, and each fraction thereof, between the recited upper and lower limits of that range is also specifically disclosed, along with each subrange between such values. The upper and lower limits of any range can independently be included in or excluded from the range, and each range where either, neither or both limits are included is also encompassed within the present disclosure. Where a value is explicitly recited, it is to be understood that values which are about the same quantity or amount as the recited value are also within the scope of the present disclosure. Where a combination is disclosed, each subcombination of the elements of that combination is also specifically disclosed and is within the scope of the present disclosure. Conversely, where different elements or groups of elements are individually disclosed, combinations thereof are also disclosed. Where any element of an invention is disclosed as having a plurality of alternatives, examples of that invention in which each alternative is excluded singly or in any combination with the other alternatives are also hereby disclosed; more than one element of an invention can have such exclusions, and all combinations of elements having such exclusions are hereby disclosed.

[0418] Nucleotides are referred to by their commonly accepted single-letter codes. Unless otherwise indicated, nucleic acids are written left to right in 5′ to 3′ orientation. Nucleotides are referred to herein by their commonly known one-letter symbols recommended by the IUPAC-IUB Biochemical Nomenclature Commission. Accordingly, A represents adenine, C represents cytosine, G represents guanine, T represents thymine, U represents uracil.

[0419] Amino acids are referred to herein by either their commonly known three letter symbols or by the one-letter symbols recommended by the IUPAC-IUB Biochemical Nomenclature Commission. Unless otherwise indicated, amino acid sequences are written left to right in amino to carboxy orientation.

[0420] About: The term “about” as used in connection with a numerical value throughout the specification and the claims denotes an interval of accuracy, familiar and acceptable to a person skilled in the art. In general, such interval of accuracy is ±10%.

[0421] Where ranges are given, endpoints are included. Furthermore, unless otherwise indicated or otherwise evident from the context and understanding of one of ordinary skill in the art, values that are expressed as ranges can assume any specific value or subrange within the stated ranges in different embodiments of the invention, to the tenth of the unit of the lower limit of the range, unless the context clearly dictates otherwise.

[0422] Administered in combination: As used herein, the term “administered in combination” or “combined administration” means that two or more agents (e.g., mRNAs) are administered to a subject at the same time or within an interval such that there can be an overlap of an effect of each agent on the patient. In some embodiments, they are administered within about 60, 30, 15, 10, 5, or 1 minute of one another. In some embodiments, the administrations of the agents are spaced sufficiently closely together such that a combinatorial (e.g., a synergistic) effect is achieved. In some embodiments, the administration in combination can be concurrent (i.e., all the mRNAs are administered as part of a single formulation, or different mRNAs in different formulation are administered simultaneous), or consecutive (e.g., several mRNAs in several formulations are administered consecutively).

[0423] Amino acid substitution: The term “amino acid substitution” refers to replacing an amino acid residue present in a parent sequence (e.g., a consensus sequence) with another amino acid residue. An amino acid can be substituted in a parent sequence, for example, via chemical peptide synthesis or through recombinant methods known in the art. Accordingly, a reference to a “substitution at position X” refers to the substitution of an amino acid present at position X with an alternative amino acid residue. In some aspects, substitution patterns can be described according to the schema AnY, wherein A is the single letter code corresponding to the amino acid naturally or originally present at position n, and Y is the substituting amino acid residue. In other aspects, substitution patterns can be described according to the schema An(YZ), wherein A is the single letter code corresponding to the amino acid residue substituting the amino acid naturally or originally present at position X, and Y and Z are alternative substituting amino acid residue.

[0424] In the context of the present disclosure, substitutions (even when they referred to as amino acid substitution) are conducted at the nucleic acid level, i.e., substituting an amino acid residue with an alternative amino acid residue is conducted by substituting the codon encoding the first amino acid with a codon encoding the second amino acid.

[0425] Animal: As used herein, the term “animal” refers to any member of the animal kingdom. In some embodiments, “animal” refers to humans at any stage of development. In some embodiments, “animal” refers to non-human animals at any stage of development. In certain embodiments, the non-human animal is a mammal (e.g., a rodent, a mouse, a rat, a rabbit, a monkey, a dog, a cat, a sheep, cattle, a primate, or a pig). In some embodiments, animals include, but are not limited to, mammals, birds, reptiles, amphibians, fish, and worms. In some embodiments, the animal is a transgenic animal, genetically-engineered animal, or a clone.

[0426] Approximately: As used herein, the term “approximately,” as applied to one or more values of interest, refers to a value that is similar to a stated reference value. In certain embodiments, the term “approximately” refers to a range of values that fall within 25%, 20%, 19%, 18%, 17%, 16%, 15%, 14%, 13%, 12%, 11%, 10%, 9%, 8%, 7%, 6%, 5%, 4%, 3%, 2%, 1%, or less in either direction (greater than or less than) of the stated reference value unless otherwise stated or otherwise evident from the context (except where such number would exceed 100% of a possible value).

[0427] Associated with: As used herein with respect to a disease, the term “associated with” means that the symptom, measurement, characteristic, or status in question is linked to the diagnosis, development, presence, or progression of that disease. As association may, but need not, be causatively linked to the disease. For example, symptoms, sequelae, or any effects causing a decrease in the quality of life of a patient of cancer are considered associated with cancer and in some embodiments of the present disclosure can be treated, ameliorated, or prevented by administering the polynucleotides of the present disclosure to a subject in need thereof.

[0428] When used with respect to two or more moieties, the terms “associated with,” “conjugated,” “linked,” “attached,” and “tethered,” when used with respect to two or more moieties, means that the moieties are physically associated or connected with one another, either directly or via one or more additional moieties that serves as a linking agent, to form a structure that is sufficiently stable so that the moieties remain physically associated under the conditions in which the structure is used, e.g., physiological conditions. An “association” need not be strictly through direct covalent chemical bonding. It may also suggest ionic or hydrogen bonding or a hybridization based connectivity sufficiently stable such that the “associated” entities remain physically associated.

[0429] Bifunctional: As used herein, the term “bifunctional” refers to any substance, molecule or moiety that is capable of or maintains at least two functions. The functions may affect the same outcome or a different outcome. The structure that produces the function can be the same or different. For example, a bifunctional modified RNA of the present disclosure may comprise an sequence encoding an CD80 polypeptide (a first function) which would be therapeutically active, linked to a sequence encoding an Fc (a second function) which would be capable of extending the half-life of the RNA. In this example, delivery of the bifunctional modified RNA to a subject in need thereof would produce not only a peptide or protein molecule that may ameliorate or treat the disease or conditions, but would also maintain a population of the active molecule encoded by the mRNA present in the subject for a prolonged period of time. In other aspects, a bifunctional modified mRNA can be a chimeric molecule comprising, for example, an mRNA encoding an IL15 polypeptide (a first function), which would be therapeutically active, and also encoding a second polypeptide such as IL15Ralpha (a second function) either fused to first polypeptide or co-expressed with the first polypeptide.

[0430] Biocompatible: As used herein, the term “biocompatible” means compatible with living cells, tissues, organs or systems posing little to no risk of injury, toxicity or rejection by the immune system.

[0431] Biodegradable: As used herein, the term “biodegradable” means capable of being broken down into innocuous products by the action of living things.

[0432] Biologically active: As used herein, the phrase “biologically active” refers to a characteristic of any substance that has activity in a biological system and/or organism. For instance, a substance that, when administered to an organism, has a biological effect on that organism, is considered to be biologically active. In particular embodiments, a polynucleotide of the present disclosure can be considered biologically active if even a portion of the polynucleotide is biologically active or mimics an activity considered biologically relevant.

[0433] Chimera: As used herein, “chimera” is an entity having two or more incongruous or heterogeneous parts or regions. For example, a chimeric molecule can comprise a first part comprising an IL12B polypeptide, an IL23A polypeptide, or both IL12B and IL23A polypeptides, and a second part (e.g., genetically fused to the first part) comprising a second therapeutic protein (e.g., a protein with a distinct enzymatic activity, an antigen binding moiety, or a moiety capable of extending the plasma half life of IL12B and/or IL23A polypeptide, for example, an Fc region of an antibody).

[0434] Codon substitution: The terms “codon substitution” or “codon replacement” in the context of codon optimization refer to replacing a codon present in a candidate nucleotide sequence (e.g., an mRNA encoding the heavy chain or light chain of an antibody or a fragment thereof) with another codon. A codon can be substituted in a candidate nucleic acid sequence, for example, via chemical peptide synthesis or through recombinant methods known in the art. Accordingly, references to a “substitution” or “replacement” at a certain location in a nucleic acid sequence (e.g., an mRNA) or within a certain region or subsequence of a nucleic acid sequence (e.g., an mRNA) refer to the substitution of a codon at such location or region with an alternative codon.

[0435] A candidate nucleic acid sequence can be codon-optimized by replacing all or part of its codons according to a substitution table map. As used herein, the terms “candidate nucleic acid sequence” and “candidate nucleotide sequence” refer to a nucleotide sequence (e.g., a nucleotide sequence encoding an antibody or a functional fragment thereof) that can be codon-optimized, for example, to improve its translation efficacy. In some aspects, the candidate nucleotide sequence is optimized for improved translation efficacy after in vivo administration.

[0436] As used herein, the terms “coding region” and “region encoding” and grammatical variants thereof, refer to an Open Reading Frame (ORF) in a polynucleotide that upon expression yields a polypeptide or protein.

[0437] Combination therapy: As used herein, the term “combination therapy” as well as variants such as a “therapy administered in combination” or “combined administration,” means that two or more agents are administered to a subject at the same time or within an interval such that there can be an overlap of an effect of each agent on the patient. In some embodiments, they are administered within about 60, 30, 15, 10, 5, or 1 minute of one another. In some embodiments, the administrations of the agents are spaced sufficiently closely together such that a combinatorial (e.g., a synergistic) effect is achieved.

[0438] Compound: As used herein, the term “compound,” is meant to include all stereoisomers and isotopes of the structure depicted. As used herein, the term “stereoisomer” means any geometric isomer (e.g., cis- and trans-isomer), enantiomer, or diastereomer of a compound. The present disclosure encompasses any and all stereoisomers of the compounds described herein, including stereomerically pure forms (e.g., geometrically pure, enantiomerically pure, or diastereomerically pure) and enantiomeric and stereoisomeric mixtures, e.g., racemates. Enantiomeric and stereomeric mixtures of compounds and means of resolving them into their component enantiomers or stereoisomers are well-known. “Isotopes” refers to atoms having the same atomic number but different mass numbers resulting from a different number of neutrons in the nuclei. For example, isotopes of hydrogen include tritium and deuterium. Further, a compound, salt, or complex of the present disclosure can be prepared in combination with solvent or water molecules to form solvates and hydrates by routine methods.

[0439] Conservative amino acid substitution: A “conservative amino acid substitution” is one in which the amino acid residue is replaced with an amino acid residue having a similar side chain. Families of amino acid residues having similar side chains have been defined in the art, including basic side chains (e.g., lysine, arginine, or histidine), acidic side chains (e.g., aspartic acid or glutamic acid), uncharged polar side chains (e.g., glycine, asparagine, glutamine, serine, threonine, tyrosine, or cysteine), nonpolar side chains (e.g., alanine, valine, leucine, isoleucine, proline, phenylalanine, methionine, or tryptophan), beta-branched side chains (e.g., threonine, valine, isoleucine) and aromatic side chains (e.g., tyrosine, phenylalanine, tryptophan, or histidine). Thus, if an amino acid in a polypeptide is replaced with another amino acid from the same side chain family, the amino acid substitution is considered to be conservative. In another aspect, a string of amino acids can be conservatively replaced with a structurally similar string that differs in order and/or composition of side chain family members.

[0440] Non-conservative amino acid substitution: Non-conservative amino acid substitutions include those in which (i) a residue having an electropositive side chain (e.g., Arg, His or Lys) is substituted for, or by, an electronegative residue (e.g., Glu or Asp), (ii) a hydrophilic residue (e.g., Ser or Thr) is substituted for, or by, a hydrophobic residue (e.g., Ala, Leu, Ile, Phe or Val), (iii) a cysteine or proline is substituted for, or by, any other residue, or (iv) a residue having a bulky hydrophobic or aromatic side chain (e.g., Val, His, Ile or Trp) is substituted for, or by, one having a smaller side chain (e.g., Ala or Ser) or no side chain (e.g., Gly).

[0441] Other amino acid substitutions can be readily identified by workers of ordinary skill. For example, for the amino acid alanine, a substitution can be taken from any one of D-alanine, glycine, beta-alanine, L-cysteine and D-cysteine. For lysine, a replacement can be any one of D-lysine, arginine, D-arginine, homo-arginine, methionine, D-methionine, ornithine, or D-omithine. Generally, substitutions in functionally important regions that can be expected to induce changes in the properties of isolated polypeptides are those in which (i) a polar residue, e.g., serine or threonine, is substituted for (or by) a hydrophobic residue, e.g., leucine, isoleucine, phenylalanine, or alanine; (ii) a cysteine residue is substituted for (or by) any other residue; (iii) a residue having an electropositive side chain, e.g., lysine, arginine or histidine, is substituted for (or by) a residue having an electronegative side chain, e.g., glutamic acid or aspartic acid; or (iv) a residue having a bulky side chain, e.g., phenylalanine, is substituted for (or by) one not having such a side chain, e.g., glycine. The likelihood that one of the foregoing non-conservative substitutions can alter functional properties of the protein is also correlated to the position of the substitution with respect to functionally important regions of the protein: some non-conservative substitutions can accordingly have little or no effect on biological properties.

[0442] Conserved: As used herein, the term “conserved” refers to nucleotides or amino acid residues of a polynucleotide sequence or polypeptide sequence, respectively, that are those that occur unaltered in the same position of two or more sequences being compared. Nucleotides or amino acids that are relatively conserved are those that are conserved amongst more related sequences than nucleotides or amino acids appearing elsewhere in the sequences.

[0443] In some embodiments, two or more sequences are said to be “completely conserved” if they are 100% identical to one another. In some embodiments, two or more sequences are said to be “highly conserved” if they are at least 70% identical, at least 80% identical, at least 90% identical, or at least 95% identical to one another. In some embodiments, two or more sequences are said to be “highly conserved” if they are about 70% identical, about 80% identical, about 90% identical, about 95%, about 98%, or about 99% identical to one another. In some embodiments, two or more sequences are said to be “conserved” if they are at least 30% identical, at least 40% identical, at least 50% identical, at least 60% identical, at least 70% identical, at least 80% identical, at least 90% identical, or at least 95% identical to one another. In some embodiments, two or more sequences are said to be “conserved” if they are about 30% identical, about 40% identical, about 50% identical, about 60% identical, about 70% identical, about 80% identical, about 90% identical, about 95% identical, about 98% identical, or about 99% identical to one another. Conservation of sequence may apply to the entire length of an polynucleotide or polypeptide or may apply to a portion, region or feature thereof.

[0444] Contacting: As used herein, the term “contacting” means establishing a physical connection between two or more entities. For example, contacting a mammalian cell with a nanoparticle composition means that the mammalian cell and a nanoparticle are made to share a physical connection. Methods of contacting cells with external entities both in vivo and ex vivo are well known in the biological arts. For example, contacting a nanoparticle composition and a mammalian cell disposed within a mammal may be performed by varied routes of administration (e.g., intravenous, intramuscular, intradermal, and subcutaneous) and may involve varied amounts of nanoparticle compositions. Moreover, more than one mammalian cell may be contacted by a nanoparticle composition.

[0445] Controlled Release: As used herein, the term “controlled release” refers to a pharmaceutical composition or compound release profile that conforms to a particular pattern of release to effect a therapeutic outcome.

[0446] Covalent Derivative: The term “covalent derivative” when referring to polypeptides include modifications of a native or starting protein with an organic proteinaceous or non-proteinaceous derivatizing agent, and/or post-translational modifications. Covalent modifications are traditionally introduced by reacting targeted amino acid residues of the protein with an organic derivatizing agent that is capable of reacting with selected side-chains or terminal residues, or by harnessing mechanisms of post-translational modifications that function in selected recombinant host cells. The resultant covalent derivatives are useful in programs directed at identifying residues important for biological activity, for immunoassays, or for the preparation of anti-protein antibodies for immunoaffinity purification of the recombinant glycoprotein. Such modifications are within the ordinary skill in the art and are performed without undue experimentation.

[0447] Cyclic or Cyclized: As used herein, the term “cyclic” refers to the presence of a continuous loop. Cyclic molecules need not be circular, only joined to form an unbroken chain of subunits. Cyclic molecules such as the engineered RNA or mRNA of the present disclosure can be single units or multimers or comprise one or more components of a complex or higher order structure.

[0448] Cytotoxic: As used herein, “cytotoxic” refers to killing or causing injurious, toxic, or deadly effect on a cell (e.g., a mammalian cell (e.g., a human cell)), bacterium, virus, fungus, protozoan, parasite, prion, or a combination thereof.

[0449] Delivering: As used herein, the term “delivering” means providing an entity to a destination. For example, delivering a polynucleotide to a subject may involve administering a nanoparticle composition including the polynucleotide to the subject (e.g., by an intravenous, intramuscular, intradermal, or subcutaneous route). Administration of a nanoparticle composition to a mammal or mammalian cell may involve contacting one or more cells with the nanoparticle composition.

[0450] Delivery Agent: As used herein, “delivery agent” refers to any substance that facilitates, at least in part, the in vivo, in vitro, or ex vivo delivery of a polynucleotide to targeted cells.

[0451] Destabilized: As used herein, the term “destable,” “destabilize,” or “destabilizing region” means a region or molecule that is less stable than a starting, wild-type or native form of the same region or molecule.

[0452] Detectable label: As used herein, “detectable label” refers to one or more markers, signals, or moieties that are attached, incorporated or associated with another entity that is readily detected by methods known in the art including radiography, fluorescence, chemiluminescence, enzymatic activity, absorbance and the like. Detectable labels include radioisotopes, fluorophores, chromophores, enzymes, dyes, metal ions, ligands such as biotin, avidin, streptavidin and haptens, quantum dots, and the like. Detectable labels can be located at any position in the polynucleotides (e.g., mRNAs) disclosed herein, and used for example, to determine tissue distribution, metabolisation, biological stability, excretion, etc.

[0453] Diastereomer: As used herein, the term “diastereomer,” means stereoisomers that are not mirror images of one another and are non-superimposable on one another.

[0454] Digest: As used herein, the term “digest” means to break apart into smaller pieces or components. When referring to polypeptides or proteins, digestion results in the production of peptides.

[0455] Distal: As used herein, the term “distal” means situated away from the center or away from a point or region of interest.

[0456] Domain: As used herein, when referring to polypeptides, the term “domain” refers to a motif of a polypeptide having one or more identifiable structural or functional characteristics or properties (e.g., binding capacity, serving as a site for protein-protein interactions). As used herein, the term domain also encompasses the nucleic acid sequence (e.g., an mRNA sequence) encoding the polypeptide domain.

[0457] Dosing regimen: As used herein, a “dosing regimen” or a “dosing regimen” is a schedule of administration or physician determined regimen of treatment, prophylaxis, or palliative care.

[0458] Effective Amount: As used herein, the term “effective amount” of an agent is that amount sufficient to effect beneficial or desired results, for example, clinical results, and, as such, an “effective amount” depends upon the context in which it is being applied. For example, in the context of administering an agent that treats a tumor, an effective amount of an agent is, for example, an amount sufficient to reduce or decrease a size of a tumor or to inhibit a tumor growth, as compared to the response obtained without administration of the agent. The term “effective amount” can be used interchangeably with “effective dose,” “therapeutically effective amount,” or “therapeutically effective dose.”

[0459] Enantiomer: As used herein, the term “enantiomer” means each individual optically active form of a compound of the disclosure, having an optical purity or enantiomeric excess (as determined by methods standard in the art) of at least 80% (i.e., at least 90% of one enantiomer and at most 10% of the other enantiomer), at least 90%, or at least 98%.

[0460] Encapsulate: As used herein, the term “encapsulate” means to enclose, surround or encase.

[0461] Encapsulation efficiency: As used herein, “encapsulation efficiency” refers to the amount of a polynucleotide that becomes part of a nanoparticle composition, relative to the initial total amount of polynucleotide used in the preparation of a nanoparticle composition. For example, if 97 mg of polynucleotide are encapsulated in a nanoparticle composition out of a total 100 mg of polynucleotide initially provided to the composition, the encapsulation efficiency may be given as 97%. As used herein, “encapsulation” may refer to complete, substantial, or partial enclosure, confinement, surrounding, or encasement.

[0462] Encodedprotein cleavage signal: As used herein, “encoded protein cleavage signal” refers to the nucleotide sequence that encodes a protein cleavage signal.

[0463] Engineered: As used herein, embodiments of the disclosure are “engineered” when they are designed to have a feature or property, whether structural or chemical, that varies from a starting point, wild type or native molecule.

[0464] Enhanced Delivery: As used herein, the term “enhanced delivery” means delivery of more (e.g., at least 1.5 fold more, at least 2-fold more, at least 3-fold more, at least 4-fold more, at least 5-fold more, at least 6-fold more, at least 7-fold more, at least 8-fold more, at least 9-fold more, at least 10-fold more) of a polynucleotide by a nanoparticle to a target tissue of interest (e.g., mammalian liver) compared to the level of delivery of a polynucleotide by a control nanoparticle to a target tissue of interest (e.g., MC3, KC2, or DLinDMA). The level of delivery of a nanoparticle to a particular tissue may be measured by comparing the amount of protein produced in a tissue to the weight of said tissue, comparing the amount of polynucleotide in a tissue to the weight of said tissue, comparing the amount of protein produced in a tissue to the amount of total protein in said tissue, or comparing the amount of polynucleotide in a tissue to the amount of total polynucleotide in said tissue. It will be understood that the enhanced delivery of a nanoparticle to a target tissue need not be determined in a subject being treated, it may be determined in a surrogate such as an animal model (e.g., a rat model).

[0465] Exosome: As used herein, “exosome” is a vesicle secreted by mammalian cells or a complex involved in RNA degradation.

[0466] Expression: As used herein, “expression” of a nucleic acid sequence refers to one or more of the following events: (1) production of an RNA template from a DNA sequence (e.g., by transcription); (2) processing of an RNA transcript (e.g., by splicing, editing, 5′ cap formation, and/or 3′ end processing); (3) translation of an RNA into a polypeptide or protein; and (4) post-translational modification of a polypeptide or protein. The term “protein expression” (and related terms such as “expressed protein”) specifically refers to the translation of an RNA into a polypeptide or protein.

[0467] Ex Vivo: As used herein, the term “ex vivo” refers to events that occur outside of an organism (e.g., animal, plant, or microbe or cell or tissue thereof). Ex vivo events may take place in an environment minimally altered from a natural (e.g., in vivo) environment.

[0468] Feature: As used herein, a “feature” refers to a characteristic, a property, or a distinctive element. When referring to polypeptides, “features” are defined as distinct amino acid sequence-based components of a molecule. Features of the polypeptides encoded by the polynucleotides of the present disclosure include surface manifestations, local conformational shape, folds, loops, half-loops, domains, half-domains, sites, termini or any combination thereof.

[0469] Formulation: As used herein, a “formulation” includes at least a polynucleotide and one or more of a carrier, an excipient, and a delivery agent.

[0470] Fragment: A “fragment,” as used herein, refers to a portion. For example, fragments of proteins can comprise polypeptides obtained by digesting full-length protein isolated from cultured cells. In some embodiments, a fragment is a subsequences of a full-length protein (e.g., one of the subunits of IL23) wherein N-terminal, and/or C-terminal, and/or internal subsequences have been deleted. In some preferred aspects of the present disclosure, the fragments of a protein of the present disclosure are functional fragments.

[0471] Functional: As used herein, a “functional” biological molecule is a biological molecule in a form in which it exhibits a property and/or activity by which it is characterized. Thus, a “functional fragment” of a polynucleotide of the present disclosure is, e.g., a polynucleotide capable of expressing a functional polypeptide, such as an interleukin fragment. As used herein, a “functional fragment” of an biological molecule, e.g., an interleukin, refers to a fragment of a wild type molecule, e.g., a wild type interleukin (i.e., a fragment of a naturally occurring form of the interleukin), or a mutant or variant thereof, wherein the fragment retains a least about 10%, at least about 15%, at least about 20%, at least about 25%, at least about 30%, at least about 35%, at least about 40%, at least about 45%, at least about 50%, at least about 55%, at least about 60%, at least about 65%, at least about 70%, at least about 75%, at least about 80%, at least about 85%, at least about 90%, or at least about 95% of the biological activity of the corresponding full-length protein.

[0472] Helper Lipid: As used herein, the term “helper lipid” refers to a compound or molecule that includes a lipidic moiety (for insertion into a lipid layer, e.g., lipid bilayer) and a polar moiety (for interaction with physiologic solution at the surface of the lipid layer). Typically the helper lipid is a phospholipid. A function of the helper lipid is to “complement” the amino lipid and increase the fusogenicity of the bilayer and/or to help facilitate endosomal escape, e.g., of nucleic acid delivered to cells. Helper lipids are also believed to be a key structural component to the surface of the LNP.

[0473] Homology: As used herein, the term “homology” refers to the overall relatedness between polymeric molecules, e.g. between nucleic acid molecules (e.g. DNA molecules and/or RNA molecules) and/or between polypeptide molecules. In some embodiments, polymeric molecules are considered to be “homologous” to one another if their sequences are at least 25%, 30%, 35%, 40%4, 45%, 50%, 55%, 60%, 65%, 70%, 75%, 80%, 85%, 90%, 95%, or 99% identical or similar. The term “homologous” necessarily refers to a comparison between at least two sequences (polynucleotide or polypeptide sequences). In accordance with the disclosure, two polynucleotide sequences are considered to be homologous if the polypeptides they encode are at least about 50%, 60%, 70%, 80%, 90%, 95%, or even 99% for at least one stretch of at least about 20 amino acids. In some embodiments, homologous polynucleotide sequences are characterized by the ability to encode a stretch of at least 4-5 uniquely specified amino acids. For polynucleotide sequences less than 60 nucleotides in length, homology is determined by the ability to encode a stretch of at least 4-5 uniquely specified amino acids. In accordance with the disclosure, two protein sequences are considered to be homologous if the proteins are at least about 50%, 60%, 70%, 80%, or 90% identical for at least one stretch of at least about 20 amino acids.

[0474] Identity: As used herein, the term “identity” refers to the overall monomer conservation between polymeric molecules, e.g., between polynucleotide molecules (e.g. DNA molecules and/or RNA molecules) and/or between polypeptide molecules. Calculation of the percent identity of two polynucleotide sequences, for example, can be performed by aligning the two sequences for optimal comparison purposes (e.g., gaps can be introduced in one or both of a first and a second nucleic acid sequences for optimal alignment and non-identical sequences can be disregarded for comparison purposes). In certain embodiments, the length of a sequence aligned for comparison purposes is at least 30%, at least 40%, at least 50%, at least 60%, at least 70%, at least 80%, at least 90%, at least 95%, or 100% of the length of the reference sequence. The nucleotides at corresponding nucleotide positions are then compared. When a position in the first sequence is occupied by the same nucleotide as the corresponding position in the second sequence, then the molecules are identical at that position. The percent identity between the two sequences is a function of the number of identical positions shared by the sequences, taking into account the number of gaps, and the length of each gap, which needs to be introduced for optimal alignment of the two sequences. The comparison of sequences and determination of percent identity between two sequences can be accomplished using a mathematical algorithm. When comparing DNA and RNA, thymine (T) and uracil (U) can be considered equivalent.

[0475] Suitable software programs are available from various sources, and for alignment of both protein and nucleotide sequences. One suitable program to determine percent sequence identity is bl2seq, part of the BLAST suite of program available from the U.S. government's National Center for Biotechnology Information BLAST web site (blast.ncbi.nlm.nih.gov). Bl2seq performs a comparison between two sequences using either the BLASTN or BLASTP algorithm. BLASTN is used to compare nucleic acid sequences, while BLASTP is used to compare amino acid sequences. Other suitable programs are, e.g., Needle, Stretcher, Water, or Matcher, part of the EMBOSS suite of bioinformatics programs and also available from the European Bioinformatics Institute (EBI) at www.ebi.ac.uk/Tools/psa.

[0476] Sequence alignments can be conducted using methods known in the art such as MAFFT, Clustal (ClustalW, Clustal X or Clustal Omega), MUSCLE, etc. Unless otherwise specified, the percentage of identity values disclosed in the present application are obtained by using the implementation of MAFFT (Multiple Alignment using Fast Fourier Transform) version 7 available at the European Bioinformatics Institute (www.ebi.ac.uk/Tools/msa/mafft/with default parameters.

[0477] Different regions within a single polynucleotide or polypeptide target sequence that aligns with a polynucleotide or polypeptide reference sequence can each have their own percent sequence identity. It is noted that the percent sequence identity value is rounded to the nearest tenth. For example, 80.11, 80.12, 80.13, and 80.14 are rounded down to 80.1, while 80.15, 80.16, 80.17, 80.18, and 80.19 are rounded up to 80.2. It also is noted that the length value will always be an integer.

[0478] In certain aspects, the percentage identity “% ID” of a first amino acid sequence (or nucleic acid sequence) to a second amino acid sequence (or nucleic acid sequence) is calculated as % ID=100×(Y/Z), where Y is the number of amino acid residues (or nucleobases) scored as identical matches in the alignment of the first and second sequences (as aligned by visual inspection or a particular sequence alignment program) and Z is the total number of residues in the second sequence. If the length of a first sequence is longer than the second sequence, the percent identity of the first sequence to the second sequence will be higher than the percent identity of the second sequence to the first sequence.

[0479] One skilled in the art will appreciate that the generation of a sequence alignment for the calculation of a percent sequence identity is not limited to binary sequence-sequence comparisons exclusively driven by primary sequence data. It will also be appreciated that sequence alignments can be generated by integrating sequence data with data from heterogeneous sources such as structural data (e.g., crystallographic protein structures), functional data (e.g., location of mutations), or phylogenetic data. A suitable program that integrates heterogeneous data to generate a multiple sequence alignment is T-Coffee, available at www.tcoffee.org, and alternatively available, e.g., from the EBI. It will also be appreciated that the final alignment used to calculate percent sequence identity can be curated either automatically or manually.

[0480] Immune response: The term “immune response” refers to the action of, for example, lymphocytes, antigen presenting cells, phagocytic cells, granulocytes, and soluble macromolecules produced by the above cells or the liver (including antibodies, cytokines, and complement) that results in selective damage to, destruction of, or elimination from the human body of invading pathogens, cells or tissues infected with pathogens, cancerous cells, or, in cases of autoimmunity or pathological inflammation, normal human cells or tissues.

[0481] Inflammatory response: “Inflammatory response” refers to immune responses involving specific and non-specific defense systems. A specific defense system reaction is a specific immune system reaction to an antigen. Examples of specific defense system reactions include antibody responses. A non-specific defense system reaction is an inflammatory response mediated by leukocytes generally incapable of immunological memory, e.g., macrophages, eosinophils and neutrophils. In some aspects, an immune response includes the secretion of inflammatory cytokines, resulting in elevated inflammatory cytokine levels.

[0482] Inflammatory cytokines: The term “inflammatory cytokine” refers to cytokines that are elevated in an inflammatory response. Examples of inflammatory cytokines include interleukin-6 (IL-6), CXCL1 (chemokine (C-X-C motif) ligand 1; also known as GROα, interferon-γ (IFNγ), tumor necrosis factor α (TNFαx), interferon γ-induced protein 10 (IP-10), or granulocyte-colony stimulating factor (G-CSF). The term inflammatory cytokines includes also other cytokines associated with inflammatory responses known in the art, e.g., interleukin-1 (IL-1), interleukin-8 (IL-8), interleukin-12 (IL12), interleukin-13 (IL-13), interferon α (IFN-α), etc.

[0483] In Vitro: As used herein, the term “in vitro” refers to events that occur in an artificial environment, e.g., in a test tube or reaction vessel, in cell culture, in a Petri dish, etc., rather than within an organism (e.g., animal, plant, or microbe).

[0484] In Vivo: As used herein, the term “in vivo” refers to events that occur within an organism (e.g., animal, plant, or microbe or cell or tissue thereof).

[0485] Insertional and deletional variants: “Insertional variants” when referring to polypeptides are those with one or more amino acids inserted immediately adjacent to an amino acid at a particular position in a native or starting sequence. “Immediately adjacent” to an amino acid means connected to either the alpha-carboxy or alpha-amino functional group of the amino acid. “Deletional variants” when referring to polypeptides are those with one or more amino acids in the native or starting amino acid sequence removed. Ordinarily, deletional variants will have one or more amino acids deleted in a particular region of the molecule.

[0486] Intact: As used herein, in the context of a polypeptide, the term “intact” means retaining an amino acid corresponding to the wild type protein, e.g., not mutating or substituting the wild type amino acid. Conversely, in the context of a nucleic acid, the term “intact” means retaining a nucleobase corresponding to the wild type nucleic acid, e.g., not mutating or substituting the wild type nucleobase.

[0487] Ionizable amino lipid: The term “ionizable amino lipid” includes those lipids having one, two, three, or more fatty acid or fatty alkyl chains and a pH-titratable amino head group (e.g., an alkylamino or dialkylamino head group). An ionizable amino lipid is typically protonated (i.e., positively charged) at a pH below the pKa of the amino head group and is substantially not charged at a pH above the pKa. Such ionizable amino lipids include, but are not limited to DLin-MC3-DMA (MC3) and (13Z,165Z)-N,N-dimethyl-3-nonydocosa-13-16-dien-1-amine (L608).

[0488] Isolated: As used herein, the term “isolated” refers to a substance or entity that has been separated from at least some of the components with which it was associated (whether in nature or in an experimental setting). Isolated substances (e.g., nucleotide sequence or protein sequence) can have varying levels of purity in reference to the substances from which they have been associated. Isolated substances and/or entities can be separated from at least about 10%, about 20%, about 30%, about 40%, about 50%, about 60%, about 70%, about 80%, about 90%, or more of the other components with which they were initially associated. In some embodiments, isolated agents are more than about 80%, about 85%, about 90%, about 91%, about 92%, about 93%, about 94%, about 95%, about 96%, about 97%, about 98%, about 99%, or more than about 99% pure. As used herein, a substance is “pure” if it is substantially free of other components.

[0489] The term “substantially isolated” means that the compound is substantially separated from the environment in which it was formed or detected. Partial separation can include, for example, a composition enriched in the compound of the present disclosure. Substantial separation can include compositions containing at least about 50%, at least about 60%, at least about 70%, at least about 80%, at least about 90%, at least about 95%, at least about 97%, or at least about 99% by weight of the compound of the present disclosure, or salt thereof.

[0490] A polynucleotide, vector, polypeptide, cell, or any composition disclosed herein which is “isolated” is a polynucleotide, vector, polypeptide, cell, or composition which is in a form not found in nature. Isolated polynucleotides, vectors, polypeptides, or compositions include those which have been purified to a degree that they are no longer in a form in which they are found in nature. In some aspects, a polynucleotide, vector, polypeptide, or composition which is isolated is substantially pure.

[0491] Isomer: As used herein, the term “isomer” means any tautomer, stereoisomer, enantiomer, or diastereomer of any compound of the disclosure. It is recognized that the compounds of the disclosure can have one or more chiral centers and/or double bonds and, therefore, exist as stereoisomers, such as double-bond isomers (i.e., geometric E/Z isomers) or diastereomers (e.g., enantiomers (i.e., (+) or (−)) or cis/trans isomers). According to the disclosure, the chemical structures depicted herein, and therefore the compounds of the disclosure, encompass all of the corresponding stereoisomers, that is, both the stereomerically pure form (e.g., geometrically pure, enantiomerically pure, or diastereomerically pure) and enantiomeric and stereoisomeric mixtures, e.g., racemates. Enantiomeric and stereoisomeric mixtures of compounds of the disclosure can typically be resolved into their component enantiomers or stereoisomers by well-known methods, such as chiral-phase gas chromatography, chiral-phase high performance liquid chromatography, crystallizing the compound as a chiral salt complex, or crystallizing the compound in a chiral solvent. Enantiomers and stereoisomers can also be obtained from stereomerically or enantiomerically pure intermediates, reagents, and catalysts by well-known asymmetric synthetic methods.

[0492] Linker: As used herein, a “linker” refers to a group of atoms, e.g., 10-1,000 atoms, and can be comprised of the atoms or groups such as, but not limited to, carbon, amino, alkylamino, oxygen, sulfur, sulfoxide, sulfonyl, carbonyl, and imine. The linker can be attached to a modified nucleoside or nucleotide on the nucleobase or sugar moiety at a first end, and to a payload, e.g., a detectable or therapeutic agent, at a second end. The linker can be of sufficient length as to not interfere with incorporation into a nucleic acid sequence. The linker can be used for any useful purpose, such as to form polynucleotide multimers (e.g., through linkage of two or more chimeric polynucleotides molecules or IVT polynucleotides) or polynucleotides conjugates, as well as to administer a payload, as described herein. Examples of chemical groups that can be incorporated into the linker include, but are not limited to, alkyl, alkenyl, alkynyl, amido, amino, ether, thioether, ester, alkylene, heteroalkylene, aryl, or heterocyclyl, each of which can be optionally substituted, as described herein. Examples of linkers include, but are not limited to, unsaturated alkanes, polyethylene glycols (e.g., ethylene or propylene glycol monomeric units, e.g., diethylene glycol, dipropylene glycol, triethylene glycol, tripropylene glycol, tetraethylene glycol, or tetraethylene glycol), and dextran polymers and derivatives thereof, Other examples include, but are not limited to, cleavable moieties within the linker, such as, for example, a disulfide bond (—S—S—) or an azo bond (—N═N-), which can be cleaved using a reducing agent or photolysis. Non-limiting examples of a selectively cleavable bond include an amido bond can be cleaved for example by the use of tris(2-carboxyethyl)phosphine (TCEP), or other reducing agents, and/or photolysis, as well as an ester bond can be cleaved for example by acidic or basic hydrolysis.

[0493] Methods ofAdministration: As used herein, “methods of administration” may include intravenous, intramuscular, intradermal, subcutaneous, or other methods of delivering a composition to a subject. A method of administration may be selected to target delivery (e.g., to specifically deliver) to a specific region or system of a body.

[0494] Modified: As used herein “modified” refers to a changed state or structure of a molecule of the disclosure. Molecules can be modified in many ways including chemically, structurally, and functionally. In some embodiments, the mRNA molecules of the present disclosure are modified by the introduction of non-natural nucleosides and/or nucleotides, e.g., as it relates to the natural ribonucleotides A, U, G, and C. Noncanonical nucleotides such as the cap structures are not considered “modified” although they differ from the chemical structure of the A, C, G, U ribonucleotides.

[0495] Nanoparticle Composition: As used herein, a “nanoparticle composition” is a composition comprising one or more lipids. Nanoparticle compositions are typically sized on the order of micrometers or smaller and may include a lipid bilayer. Nanoparticle compositions encompass lipid nanoparticles (LNPs), liposomes (e.g., lipid vesicles), and lipoplexes. For example, a nanoparticle composition may be a liposome having a lipid bilayer with a diameter of 500 nm or less.

[0496] Naturally occurring: As used herein, “naturally occurring” means existing in nature without artificial aid.

[0497] Non-human vertebrate: As used herein, a “non-human vertebrate” includes all vertebrates except Homo sapiens, including wild and domesticated species. Examples of non-human vertebrates include, but are not limited to, mammals, such as alpaca, banteng, bison, camel, cat, cattle, deer, dog, donkey, gayal, goat, guinea pig, horse, llama, mule, pig, rabbit, reindeer, sheep water buffalo, and yak.

[0498] Nucleic acid sequence: The terms “nucleic acid sequence,” “nucleotide sequence,” or “polynucleotide sequence” are used interchangeably and refer to a contiguous nucleic acid sequence. The sequence can be either single stranded or double stranded DNA or RNA, e.g., an mRNA.

[0499] The term “nucleic acid,” in its broadest sense, includes any compound and/or substance that comprises a polymer of nucleotides. These polymers are often referred to as polynucleotides. Exemplary nucleic acids or polynucleotides of the disclosure include, but are not limited to, ribonucleic acids (RNAs), deoxyribonucleic acids (DNAs), threose nucleic acids (TNAs), glycol nucleic acids (GNAs), peptide nucleic acids (PNAs), locked nucleic acids (LNAs, including LNA having a β—D-ribo configuration, α-LNA having an a-L-ribo configuration (a diastereomer of LNA), 2′-amino-LNA having a 2′-amino functionalization, and 2′-amino-α-LNA having a 2′-amino functionalization), ethylene nucleic acids (ENA), cyclohexenyl nucleic acids (CeNA) or hybrids or combinations thereof.

[0500] The phrase “nucleotide sequence encoding” refers to the nucleic acid (e.g., an mRNA or DNA molecule) coding sequence which encodes a polypeptide. The coding sequence can further include initiation and termination signals operably linked to regulatory elements including a promoter and polyadenylation signal capable of directing expression in the cells of an individual or mammal to which the nucleic acid is administered. The coding sequence can further include sequences that encode signal peptides.

[0501] Off-target: As used herein, “off target” refers to any unintended effect on any one or more target, gene, or cellular transcript.

[0502] Open reading frame: As used herein, “open reading frame” or “ORF” refers to a sequence which does not contain a stop codon in a given reading frame.

[0503] Operably linked: As used herein, the phrase “operably linked” refers to a functional connection between two or more molecules, constructs, transcripts, entities, moieties or the like.

[0504] Optimized sequence: The term optimized sequence refers to the product of a sequence optimization process.

[0505] Optionally substituted: Herein a phrase of the form “optionally substituted X” (e.g., optionally substituted alkyl) is intended to be equivalent to “X, wherein X is optionally substituted” (e.g., “alkyl, wherein said alkyl is optionally substituted”). It is not intended to mean that the feature “X” (e.g., alkyl)per se is optional.

[0506] Part: As used herein, a “part” or “region” of a polynucleotide is defined as any portion of the polynucleotide that is less than the entire length of the polynucleotide.

[0507] Patient: As used herein, “patient” refers to a subject who may seek or be in need of treatment, requires treatment, is receiving treatment, will receive treatment, or a subject who is under care by a trained professional for a particular disease or condition.

[0508] Pharmaceutically acceptable: The phrase “pharmaceutically acceptable” is employed herein to refer to those compounds, materials, compositions, and/or dosage forms that are, within the scope of sound medical judgment, suitable for use in contact with the tissues of human beings and animals without excessive toxicity, irritation, allergic response, or other problem or complication, commensurate with a reasonable benefit/risk ratio.

[0509] Pharmaceutically acceptable excipients: The phrase “pharmaceutically acceptable excipient,” as used herein, refers any ingredient other than the compounds described herein (for example, a vehicle capable of suspending or dissolving the active compound) and having the properties of being substantially nontoxic and non-inflammatory in a patient. Excipients can include, for example: antiadherents, antioxidants, binders, coatings, compression aids, disintegrants, dyes (colors), emollients, emulsifiers, fillers (diluents), film formers or coatings, flavors, fragrances, glidants (flow enhancers), lubricants, preservatives, printing inks, sorbents, suspensing or dispersing agents, sweeteners, and waters of hydration. Exemplary excipients include, but are not limited to: butylated hydroxytoluene (BHT), calcium carbonate, calcium phosphate (dibasic), calcium stearate, croscarmellose, crosslinked polyvinyl pyrrolidone, citric acid, crospovidone, cysteine, ethylcellulose, gelatin, hydroxypropyl cellulose, hydroxypropyl methylcellulose, lactose, magnesium stearate, maltitol, mannitol, methionine, methylcellulose, methyl paraben, microcrystalline cellulose, polyethylene glycol, polyvinyl pyrrolidone, povidone, pregelatinized starch, propyl paraben, retinyl palmitate, shellac, silicon dioxide, sodium carboxymethyl cellulose, sodium citrate, sodium starch glycolate, sorbitol, starch (corn), stearic acid, sucrose, talc, titanium dioxide, vitamin A, vitamin E, vitamin C, and xylitol.

[0510] Pharmaceutically acceptable salts: The present disclosure also includes pharmaceutically acceptable salts of the compounds described herein. As used herein, “pharmaceutically acceptable salts” refers to derivatives of the disclosed compounds wherein the parent compound is modified by converting an existing acid or base moiety to its salt form (e.g., by reacting the free base group with a suitable organic acid). Examples of pharmaceutically acceptable salts include, but are not limited to, mineral or organic acid salts of basic residues such as amines; alkali or organic salts of acidic residues such as carboxylic acids; and the like. Representative acid addition salts include acetate, acetic acid, adipate, alginate, ascorbate, aspartate, benzenesulfonate, benzene sulfonic acid, benzoate, bisulfate, borate, butyrate, camphorate, camphorsulfonate, citrate, cyclopentanepropionate, digluconate, dodecylsulfate, ethanesulfonate, fumarate, glucoheptonate, glycerophosphate, hemisulfate, heptonate, hexanoate, hydrobromide, hydrochloride, hydroiodide, 2-hydroxy-ethanesulfonate, lactobionate, lactate, laurate, lauryl sulfate, malate, maleate, malonate, methanesulfonate, 2-naphthalenesulfonate, nicotinate, nitrate, oleate, oxalate, palmitate, pamoate, pectinate, persulfate, 3-phenylpropionate, phosphate, picrate, pivalate, propionate, stearate, succinate, sulfate, tartrate, thiocyanate, toluenesulfonate, undecanoate, valerate salts, and the like. Representative alkali or alkaline earth metal salts include sodium, lithium, potassium, calcium, magnesium, and the like, as well as nontoxic ammonium, quaternary ammonium, and amine cations, including, but not limited to ammonium, tetramethylammonium, tetraethylammonium, methylamine, dimethylamine, trimethylamine, triethylamine, ethylamine, and the like. The pharmaceutically acceptable salts of the present disclosure include the conventional non-toxic salts of the parent compound formed, for example, from non-toxic inorganic or organic acids. The pharmaceutically acceptable salts of the present disclosure can be synthesized from the parent compound that contains a basic or acidic moiety by conventional chemical methods. Generally, such salts can be prepared by reacting the free acid or base forms of these compounds with a stoichiometric amount of the appropriate base or acid in water or in an organic solvent, or in a mixture of the two; generally, nonaqueous media like ether, ethyl acetate, ethanol, isopropanol, or acetonitrile are used. Lists of suitable salts are found in Remington's Pharmaceutical Sciences, 17^{th} ed., Mack Publishing Company, Easton, Pa., 1985, p. 1418, Pharmaceutical Salts: Properties, Selection, and Use, P. H. Stahl and C. G. Wermuth (eds.), Wiley-VCH, 2008, and Berge et al., Journal of Pharmaceutical Science, 66, 1-19 (1977), each of which is incorporated herein by reference in its entirety.

[0511] Pharmaceutically acceptable solvate: The term “pharmaceutically acceptable solvate,” as used herein, means a compound of the disclosure wherein molecules of a suitable solvent are incorporated in the crystal lattice. A suitable solvent is physiologically tolerable at the dosage administered. For example, solvates can be prepared by crystallization, recrystallization, or precipitation from a solution that includes organic solvents, water, or a mixture thereof. Examples of suitable solvents are ethanol, water (for example, mono-, di-, and tri-hydrates), N-methylpyrrolidinone (NMP), dimethyl sulfoxide (DMSO), N,N′-dimethylformamide (DMF), N,N′-dimethylacetamide (DMAC), 1,3-dimethyl-2-imidazolidinone (DMEU), 1,3-dimethyl-3,4,5,6-tetrahydro-2-(1H)-pyrimidinone (DMPU), acetonitrile (ACN), propylene glycol, ethyl acetate, benzyl alcohol, 2-pyrrolidone, benzyl benzoate, and the like. When water is the solvent, the solvate is referred to as a “hydrate.”

[0512] Pharmacokinetic: As used herein, “pharmacokinetic” refers to any one or more properties of a molecule or compound as it relates to the determination of the fate of substances administered to a living organism. Pharmacokinetics is divided into several areas including the extent and rate of absorption, distribution, metabolism and excretion. This is commonly referred to as ADME where: (A) Absorption is the process of a substance entering the blood circulation; (D) Distribution is the dispersion or dissemination of substances throughout the fluids and tissues of the body; (M) Metabolism (or Biotransformation) is the irreversible transformation of parent compounds into daughter metabolites; and (E) Excretion (or Elimination) refers to the elimination of the substances from the body. In rare cases, some drugs irreversibly accumulate in body tissue.

[0513] Physicochemical: As used herein, “physicochemical” means of or relating to a physical and/or chemical property.

[0514] Polynucleotide: The term “polynucleotide” as used herein refers to polymers of nucleotides of any length, including ribonucleotides, deoxyribonucleotides, analogs thereof, or mixtures thereof. This term refers to the primary structure of the molecule. Thus, the term includes triple-, double- and single-stranded deoxyribonucleic acid (“DNA”), as well as triple-, double- and single-stranded ribonucleic acid (“RNA”). It also includes modified, for example by alkylation, and/or by capping, and unmodified forms of the polynucleotide. More particularly, the term “polynucleotide” includes polydeoxyribonucleotides (containing 2-deoxy-D-ribose), polyribonucleotides (containing D-ribose), including tRNA, rRNA, hRNA, siRNA and mRNA, whether spliced or unspliced, any other type of polynucleotide which is an N- or C-glycoside of a purine or pyrimidine base, and other polymers containing normucleotidic backbones, for example, polyamide (e.g., peptide nucleic acids “PNAs”) and polymorpholino polymers, and other synthetic sequence-specific nucleic acid polymers providing that the polymers contain nucleobases in a configuration which allows for base pairing and base stacking, such as is found in DNA and RNA. In particular aspects, the polynucleotide comprises an mRNA. In other aspect, the mRNA is a synthetic mRNA. In some aspects, the synthetic mRNA comprises at least one unnatural nucleobase. In some aspects, all nucleobases of a certain class have been replaced with unnatural nucleobases (e.g., all uridines in a polynucleotide disclosed herein can be replaced with an unnatural nucleobase, e.g., 5-methoxyuridine). In some aspects, the polynucleotide (e.g., a synthetic RNA or a synthetic DNA) comprises only natural nucleobases, i.e., A,C, T and U in the case of a synthetic DNA, or A, C, T, and U in the case of a synthetic RNA.

[0515] The skilled artisan will appreciate that the T bases in the codon maps disclosed herein are present in DNA, whereas the T bases would be replaced by U bases in corresponding RNAs. For example, a codon-nucleotide sequence disclosed herein in DNA form, e.g., a vector or an in-vitro translation (IVT) template, would have its T bases transcribed as U based in its corresponding transcribed mRNA. In this respect, both codon-optimized DNA sequences (comprising T) and their corresponding RNA sequences (comprising U) are considered codon-optimized nucleotide sequence of the present disclosure. A skilled artisan would also understand that equivalent codon-maps can be generated by replaced one or more bases with non-natural bases. Thus, e.g., a TTC codon (DNA map) would correspond to a UUC codon (RNA map), which in turn would correspond to ψψC codon (RNA map in which U has been replaced with pseudouridine).

[0516] Standard A-T and G-C base pairs form under conditions which allow the formation of hydrogen bonds between the N3—H and C4—oxy of thymidine and the N1 and C6—NH2, respectively, of adenosine and between the C2-oxy, N3 and C4—NH2, of cytidine and the C2—NH2, N′—H and C6-oxy, respectively, of guanosine. Thus, for example, guanosine (2-amino-6-oxy-9-β-D-ribofuranosyl-purine) can be modified to form isoguanosine (2-oxy-6-amino-9-β-D-ribofuranosyl-purine). Such modification results in a nucleoside base which will no longer effectively form a standard base pair with cytosine. However, modification of cytosine (1-β-D-ribofuranosyl-2-oxy-4-amino-pyrimidine) to form isocytosine (1-β-D-ribofuranosyl-2-amino-4-oxy-pyrimidine-) results in a modified nucleotide which will not effectively base pair with guanosine but will form a base pair with isoguanosine (U.S. Pat. No. 5,681,702 to Collins et al.). Isocytosine is available from Sigma Chemical Co. (St. Louis, Mo.); isocytidine can be prepared by the method described by Switzer et al. (1993) Biochemistry 32:10489-10496 and references cited therein; 2′-deoxy-5-methyl-isocytidine can be prepared by the method of Tor et al., 1993, J. Am. Chem. Soc. 115:4461-4467 and references cited therein; and isoguanine nucleotides can be prepared using the method described by Switzer et al., 1993, supra, and Mantsch et al., 1993, Biochem. 14:5593-5601, or by the method described in U.S. Pat. No. 5,780,610 to Collins et al. Other nonnatural base pairs can be synthesized by the method described in Piccirilli et al., 1990, Nature 343:33-37, for the synthesis of 2,6-diaminopyrimidine and its complement (1-methylpyrazolo-[4,3]pyrimidine-5,7-(4H,6H)-dione. Other such modified nucleotide units which form unique base pairs are known, such as those described in Leach et al. (1992) J. Am. Chem. Soc. 114:3675-3683 and Switzer et al., supra.

[0517] Nucleic acid sequence: The terms “nucleic acid sequence,” “nucleotide sequence,” or “polynucleotide” are used interchangeably and refer to a contiguous nucleic acid sequence. The sequence can be either single stranded or double stranded DNA or RNA, e.g., an mRNA.

[0518] The phrase “nucleotide sequence encoding” and variants thereof refers to the nucleic acid (e.g., an mRNA or DNA molecule) coding sequence that comprises a nucleotide sequence which encodes a polypeptide or functional fragment thereof as set forth herein. The coding sequence can further include initiation and termination signals operably linked to regulatory elements including a promoter and polyadenylation signal capable of directing expression in the cells of an individual or mammal to which the nucleic acid is administered. The coding sequence can further include sequences that encode signal peptides.

[0519] Polypeptide: The terms “polypeptide,” “peptide,” and “protein” are used interchangeably herein to refer to polymers of amino acids of any length. The polymer can comprise modified amino acids. The terms also encompass an amino acid polymer that has been modified naturally or by intervention; for example, disulfide bond formation, glycosylation, lipidation, acetylation, phosphorylation, or any other manipulation or modification, such as conjugation with a labeling component. Also included within the definition are, for example, polypeptides containing one or more analogs of an amino acid (including, for example, unnatural amino acids such as homocysteine, ornithine, p-acetylphenylalanine, D-amino acids, and creatine), as well as other modifications known in the art.

[0520] The term, as used herein, refers to proteins, polypeptides, and peptides of any size, structure, or function. Polypeptides include gene products, naturally occurring polypeptides, synthetic polypeptides, homologs, orthologs, paralogs, fragments and other equivalents, variants, and analogs of the foregoing. A polypeptide can be a single polypeptide or can be a multi-molecular complex such as a dimer, trimer or tetramer. They can also comprise single chain or multichain polypeptides. Most commonly disulfide linkages are found in multichain polypeptides. The term polypeptide can also apply to amino acid polymers in which one or more amino acid residues are an artificial chemical analogue of a corresponding naturally occurring amino acid. In some embodiments, a “peptide” can be less than or equal to 50 amino acids long, e.g., about 5, 10, 15, 20, 25, 30, 35, 40, 45, or 50 amino acids long.

[0521] Polypeptide variant: As used herein, the term “polypeptide variant” refers to molecules that differ in their amino acid sequence from a native or reference sequence. The amino acid sequence variants can possess substitutions, deletions, and/or insertions at certain positions within the amino acid sequence, as compared to a native or reference sequence. Ordinarily, variants will possess at least about 50% identity, at least about 60% identity, at least about 70% identity, at least about 80% identity, at least about 90% identity, at least about 95% identity, at least about 99% identity to a native or reference sequence. In some embodiments, they will be at least about 80%, or at least about 90% identical to a native or reference sequence.

[0522] Polypeptide per unit drug (PUD): As used herein, a PUD or product per unit drug, is defined as a subdivided portion of total daily dose, usually 1 mg, pg, kg, etc., of a product (such as a polypeptide) as measured in body fluid or tissue, usually defined in concentration such as pmol/mL, mmol/mL, etc. divided by the measure in the body fluid.

[0523] Preventing: As used herein, the term “preventing” refers to partially or completely delaying onset of an infection, disease, disorder and/or condition; partially or completely delaying onset of one or more symptoms, features, or clinical manifestations of a particular infection, disease, disorder, and/or condition; partially or completely delaying onset of one or more symptoms, features, or manifestations of a particular infection, disease, disorder, and/or condition; partially or completely delaying progression from an infection, a particular disease, disorder and/or condition; and/or decreasing the risk of developing pathology associated with the infection, the disease, disorder, and/or condition.

[0524] Prodrug: The present disclosure also includes prodrugs of the compounds described herein. As used herein, “prodrugs” refer to any substance, molecule or entity that is in a form predicate for that substance, molecule or entity to act as a therapeutic upon chemical or physical alteration. Prodrugs may by covalently bonded or sequestered in some way and that release or are converted into the active drug moiety prior to, upon or after administered to a mammalian subject. Prodrugs can be prepared by modifying functional groups present in the compounds in such a way that the modifications are cleaved, either in routine manipulation or in vivo, to the parent compounds. Prodrugs include compounds wherein hydroxyl, amino, sulfhydryl, or carboxyl groups are bonded to any group that, when administered to a mammalian subject, cleaves to form a free hydroxyl, amino, sulfhydryl, or carboxyl group respectively. Preparation and use of prodrugs is discussed in T. Higuchi and V. Stella, “Pro-drugs as Novel Delivery Systems,” Vol. 14 of the A.C.S. Symposium Series, and in Bioreversible Carriers in Drug Design, ed. Edward B. Roche, American Pharmaceutical Association and Pergamon Press, 1987, both of which are hereby incorporated by reference in their entirety.

[0525] Proliferate: As used herein, the term “proliferate” means to grow, expand or increase or cause to grow, expand or increase rapidly. “Proliferative” means having the ability to proliferate. “Anti-proliferative” means having properties counter to or inapposite to proliferative properties.

[0526] Prophylactic: As used herein, “prophylactic” refers to a therapeutic or course of action used to prevent the spread of disease.

[0527] Prophylaxis: As used herein, a “prophylaxis” refers to a measure taken to maintain health and prevent the spread of disease. An “immune prophylaxis” refers to a measure to produce active or passive immunity to prevent the spread of disease.

[0528] Protein cleavage site: As used herein, “protein cleavage site” refers to a site where controlled cleavage of the amino acid chain can be accomplished by chemical, enzymatic or photochemical means.

[0529] Protein cleavage signal: As used herein “protein cleavage signal” refers to at least one amino acid that flags or marks a polypeptide for cleavage.

[0530] Protein of interest: As used herein, the terms “proteins of interest” or “desired proteins” include those provided herein and fragments, mutants, variants, and alterations thereof.

[0531] Proximal: As used herein, the term “proximal” means situated nearer to the center or to a point or region of interest.

[0532] Pseudouridine: As used herein, pseudouridine refers to the C-glycoside isomer of the nucleoside uridine. A “pseudouridine analog” is any modification, variant, isoform or derivative of pseudouridine. For example, pseudouridine analogs include but are not limited to 1-carboxymethyl-pseudouridine, 1-propynyl-pseudouridine, 1-taurinomethyl-pseudouridine, 1-taurinomethyl-4-thio-pseudouridine, 1-methylpseudouridine (m¹ψ), 1-methyl-4-thio-pseudouridine (m¹s⁴ψ), 4-thio-1-methyl-pseudouridine, 3-methyl-pseudouridine (m³ψ), 2-thio-1-methyl-pseudouridine, 1-methyl-1-deaza-pseudouridine, 2-thio-1-methyl-1-deaza-pseudouridine, dihydropseudouridine, 2-thio-dihydropseudouridine, 2-methoxyuridine, 2-methoxy-4-thio-uridine, 4-methoxy-pseudouridine, 4-methoxy-2-thio-pseudouridine, N1-methyl-pseudouridine, 1-methyl-3-(3-amino-3-carboxypropyl)pseudouridine (acp³ψ), and 2′-O-methyl-pseudouridine (win).

[0533] Purified: As used herein, “purify,” “purified,” “purification” means to make substantially pure or clear from unwanted components, material defilement, admixture or imperfection.

[0534] Reference Nucleic Acid Sequence: The term “reference nucleic acid sequence” or “reference nucleic acid” or “reference nucleotide sequence” or “reference sequence” refers to a starting nucleic acid sequence (e.g., a RNA, e.g., a mRNA sequence) that can be sequence optimized. In some embodiments, the reference nucleic acid sequence is a wild type nucleic acid sequence, a fragment or a variant thereof. In some embodiments, the reference nucleic acid sequence is a previously sequence optimized nucleic acid sequence.

[0535] Repeated transfection: As used herein, the term “repeated transfection” refers to transfection of the same cell culture with a polynucleotide a plurality of times. The cell culture can be transfected at least twice, at least 3 times, at least 4 times, at least 5 times, at least 6 times, at least 7 times, at least 8 times, at least 9 times, at least 10 times, at least 11 times, at least 12 times, at least 13 times, at least 14 times, at least 15 times, at least 16 times, at least 17 times at least 18 times, at least 19 times, at least 20 times, at least 25 times, at least 30 times, at least 35 times, at least 40 times, at least 45 times, at least 50 times or more.

[0536] Salts: In some aspects, the pharmaceutical composition for intratumoral delivery disclosed herein and comprises salts of some of their lipid constituents. The term “salt” includes any anionic and cationic complex. Non-limiting examples of anions include inorganic and organic anions, e.g., fluoride, chloride, bromide, iodide, oxalate (e.g., hemioxalate), phosphate, phosphonate, hydrogen phosphate, dihydrogen phosphate, oxide, carbonate, bicarbonate, nitrate, nitrite, nitride, bisulfite, sulfide, sulfite, bisulfate, sulfate, thiosulfate, hydrogen sulfate, borate, formate, acetate, benzoate, citrate, tartrate, lactate, acrylate, polyacrylate, fumarate, maleate, itaconate, glycolate, gluconate, malate, mandelate, tiglate, ascorbate, salicylate, polymethacrylate, perchlorate, chlorate, chlorite, hypochlorite, bromate, hypobromite, iodate, an alkylsulfonate, an arylsulfonate, arsenate, arsenite, chromate, dichromate, cyanide, cyanate, thiocyanate, hydroxide, peroxide, permanganate, and mixtures thereof.

[0537] Sample: As used herein, the term “sample” or “biological sample” refers to a subset of its tissues, cells or component parts (e.g., body fluids, including but not limited to blood, mucus, lymphatic fluid, synovial fluid, cerebrospinal fluid, saliva, amniotic fluid, amniotic cord blood, urine, vaginal fluid and semen). A sample further can include a homogenate, lysate or extract prepared from a whole organism or a subset of its tissues, cells or component parts, or a fraction or portion thereof, including but not limited to, for example, plasma, serum, spinal fluid, lymph fluid, the external sections of the skin, respiratory, intestinal, and genitourinary tracts, tears, saliva, milk, blood cells, tumors, organs. A sample further refers to a medium, such as a nutrient broth or gel, which may contain cellular components, such as proteins or nucleic acid molecule.

[0538] Sequence Optimization: The term “sequence optimization” refers to a process or series of processes by which nucleobases in a reference nucleic acid sequence are replaced with alternative nucleobases, resulting in a nucleic acid sequence with improved properties, e.g., improved protein expression or decreased immunogenicity.

[0539] In general, the goal in sequence optimization is to produce a synonymous nucleotide sequence than encodes the same polypeptide sequence encoded by the reference nucleotide sequence. Thus, there are no amino acid substitutions (as a result of codon optimization) in the polypeptide encoded by the optimized nucleotide sequence with respect to the polypeptide encoded by the reference nucleotide sequence.

[0540] Signal Sequence: As used herein, the phrases “signal sequence,” “signal peptide,” and “transit peptide” are used interchangeably and refer to a sequence that can direct the transport or localization of a protein to a certain organelle, cell compartment, or extracellular export. The term encompasses both the signal sequence polypeptide and the nucleic acid sequence encoding the signal sequence. Thus, references to a signal sequence in the context of a nucleic acid refer in fact to the nucleic acid sequence encoding the signal sequence polypeptide.

[0541] Signal transduction pathway: A “signal transduction pathway” refers to the biochemical relationship between a variety of signal transduction molecules that play a role in the transmission of a signal from one portion of a cell to another portion of a cell. As used herein, the phrase “cell surface receptor” includes, for example, molecules and complexes of molecules capable of receiving a signal and the transmission of such a signal across the plasma membrane of a cell.

[0542] Similarity: As used herein, the term “similarity” refers to the overall relatedness between polymeric molecules, e.g. between polynucleotide molecules (e.g. DNA molecules and/or RNA molecules) and/or between polypeptide molecules. Calculation of percent similarity of polymeric molecules to one another can be performed in the same manner as a calculation of percent identity, except that calculation of percent similarity takes into account conservative substitutions as is understood in the art.

[0543] Specific delivery: As used herein, the term “specific delivery,” “specifically deliver,” or “specifically delivering” means delivery of more (e.g., at least 1.5 fold more, at least 2-fold more, at least 3-fold more, at least 4-fold more, at least 5-fold more, at least 6-fold more, at least 7-fold more, at least 8-fold more, at least 9-fold more, at least 10-fold more) of a polynucleotide by a nanoparticle to a target tissue of interest (e.g., mammalian liver) compared to an off-target tissue (e.g., mammalian spleen). The level of delivery of a nanoparticle to a particular tissue may be measured by comparing the amount of protein produced in a tissue to the weight of said tissue, comparing the amount of polynucleotide in a tissue to the weight of said tissue, comparing the amount of protein produced in a tissue to the amount of total protein in said tissue, or comparing the amount of polynucleotide in a tissue to the amount of total polynucleotide in said tissue. For example, for renovascular targeting, a polynucleotide is specifically provided to a mammalian kidney as compared to the liver and spleen if 1.5, 2-fold, 3-fold, 5-fold, 10-fold, 15 fold, or 20 fold more polynucleotide per 1 g of tissue is delivered to a kidney compared to that delivered to the liver or spleen following systemic administration of the polynucleotide. It will be understood that the ability of a nanoparticle to specifically deliver to a target tissue need not be determined in a subject being treated, it may be determined in a surrogate such as an animal model (e.g., a rat model).

[0544] Stable: As used herein “stable” refers to a compound that is sufficiently robust to survive isolation to a useful degree of purity from a reaction mixture, and in some cases capable of formulation into an efficacious therapeutic agent.

[0545] Stabilized: As used herein, the term “stabilize,” “stabilized,” “stabilized region” means to make or become stable.

[0546] Stereoisomer: As used herein, the term “stereoisomer” refers to all possible different isomeric as well as conformational forms that a compound may possess (e.g., a compound of any formula described herein), in particular all possible stereochemically and conformationally isomeric forms, all diastereomers, enantiomers and/or conformers of the basic molecular structure. Some compounds of the present disclosure may exist in different tautomeric forms, all of the latter being included within the scope of the present disclosure.

[0547] Subject: By “subject” or “individual” or “animal” or “patient” or “mammal,” is meant any subject, particularly a mammalian subject, for whom diagnosis, prognosis, or therapy is desired. Mammalian subjects include, but are not limited to, humans, domestic animals, farm animals, zoo animals, sport animals, pet animals such as dogs, cats, guinea pigs, rabbits, rats, mice, horses, cattle, cows; primates such as apes, monkeys, orangutans, and chimpanzees; canids such as dogs and wolves; felids such as cats, lions, and tigers; equids such as horses, donkeys, and zebras; bears, food animals such as cows, pigs, and sheep; ungulates such as deer and giraffes; rodents such as mice, rats, hamsters and guinea pigs; and so on. In certain embodiments, the mammal is a human subject. In other embodiments, a subject is a human patient. In a particular embodiment, a subject is a human patient in need of a cancer treatment.

[0548] Substantially: As used herein, the term “substantially” refers to the qualitative condition of exhibiting total or near-total extent or degree of a characteristic or property of interest. One of ordinary skill in the biological arts will understand that biological and chemical phenomena rarely, if ever, go to completion and/or proceed to completeness or achieve or avoid an absolute result. The term “substantially” is therefore used herein to capture the potential lack of completeness inherent in many biological and chemical phenomena.

[0549] Substantially equal: As used herein as it relates to time differences between doses, the term means plus/minus 2%.

[0550] Substantially simultaneous: As used herein and as it relates to plurality of doses, the term means within 2 seconds.

[0551] Suffering from: An individual who is “suffering from” a disease, disorder, and/or condition has been diagnosed with or displays one or more symptoms of the disease, disorder, and/or condition.

[0552] Susceptible to: An individual who is “susceptible to” a disease, disorder, and/or condition has not been diagnosed with and/or may not exhibit symptoms of the disease, disorder, and/or condition but harbors a propensity to develop a disease or its symptoms. In some embodiments, an individual who is susceptible to a disease, disorder, and/or condition (for example, cancer) can be characterized by one or more of the following: (1) a genetic mutation associated with development of the disease, disorder, and/or condition; (2) a genetic polymorphism associated with development of the disease, disorder, and/or condition; (3) increased and/or decreased expression and/or activity of a protein and/or nucleic acid associated with the disease, disorder, and/or condition; (4) habits and/or lifestyles associated with development of the disease, disorder, and/or condition; (5) a family history of the disease, disorder, and/or condition; and (6) exposure to and/or infection with a microbe associated with development of the disease, disorder, and/or condition. In some embodiments, an individual who is susceptible to a disease, disorder, and/or condition will develop the disease, disorder, and/or condition. In some embodiments, an individual who is susceptible to a disease, disorder, and/or condition will not develop the disease, disorder, and/or condition.

[0553] Sustained release: As used herein, the term “sustained release” refers to a pharmaceutical composition or compound release profile that conforms to a release rate over a specific period of time.

[0554] Synthetic: The term “synthetic” means produced, prepared, and/or manufactured by the hand of man. Synthesis of polynucleotides or other molecules of the present disclosure can be chemical or enzymatic.

[0555] Targeted cells: As used herein, “targeted cells” refers to any one or more cells of interest. The cells may be found in vitro, in vivo, in situ, or in the tissue or organ of an organism. The organism may be an animal, preferably a mammal, more preferably a human and most preferably a patient.

[0556] Target tissue: As used herein “target tissue” refers to any one or more tissue types of interest in which the delivery of a polynucleotide would result in a desired biological and/or pharmacological effect. Examples of target tissues of interest include specific tissues, organs, and systems or groups thereof. In particular applications, a target tissue may be a kidney, a lung, a spleen, vascular endothelium in vessels (e.g., intra-coronary or intra-femoral), or tumor tissue (e.g., via intratumoral injection). An “off-target tissue” refers to any one or more tissue types in which the expression of the encoded protein does not result in a desired biological and/or pharmacological effect. In particular applications, off-target tissues may include the liver and the spleen.

[0557] Targeting sequence: As used herein, the phrase “targeting sequence” refers to a sequence that can direct the transport or localization of a protein or polypeptide.

[0558] Terminus: As used herein the terms “termini” or “terminus,” when referring to polypeptides, refers to an extremity of a peptide or polypeptide. Such extremity is not limited only to the first or final site of the peptide or polypeptide but can include additional amino acids in the terminal regions. The polypeptide based molecules of the disclosure can be characterized as having both an N-terminus (terminated by an amino acid with a free amino group (NH₂)) and a C-terminus (terminated by an amino acid with a free carboxyl group (COOH)). Proteins of the disclosure are in some cases made up of multiple polypeptide chains brought together by disulfide bonds or by non-covalent forces (multimers, oligomers). These sorts of proteins will have multiple N- and C-termini. Alternatively, the termini of the polypeptides can be modified such that they begin or end, as the case can be, with a non-polypeptide based moiety such as an organic conjugate.

[0559] Therapeutic Agent: The term “therapeutic agent” refers to an agent (e.g., an mRNA) that, when administered to a subject, has a therapeutic, diagnostic, and/or prophylactic effect and/or elicits a desired biological and/or pharmacological effect. For example, in some embodiments, a mRNA encoding an IL12, IL15, IL18, IL23 or IL36 polypeptide or a combination thereof can be a therapeutic agent.

[0560] Therapeutically effective amount: As used herein, the term “therapeutically effective amount” means an amount of an agent to be delivered (e.g., nucleic acid, drug, therapeutic agent, diagnostic agent, prophylactic agent, etc.) that is sufficient, when administered to a subject suffering from or susceptible to an infection, disease, disorder, and/or condition, to treat, improve symptoms of, diagnose, prevent, and/or delay the onset of the infection, disease, disorder, and/or condition.

[0561] Therapeutically effective outcome: As used herein, the term “therapeutically effective outcome” means an outcome that is sufficient in a subject suffering from or susceptible to an infection, disease, disorder, and/or condition, to treat, improve symptoms of, diagnose, prevent, and/or delay the onset of the infection, disease, disorder, and/or condition.

[0562] Total daily dose: As used herein, a “total daily dose” is an amount given or prescribed in 24 hr. period. The total daily dose can be administered as a single unit dose or a split dose.

[0563] Transcription factor: As used herein, the term “transcription factor” refers to a DNA-binding protein that regulates transcription of DNA into RNA, for example, by activation or repression of transcription. Some transcription factors effect regulation of transcription alone, while others act in concert with other proteins. Some transcription factor can both activate and repress transcription under certain conditions. In general, transcription factors bind a specific target sequence or sequences highly similar to a specific consensus sequence in a regulatory region of a target gene. Transcription factors may regulate transcription of a target gene alone or in a complex with other molecules.

[0564] Transcription: As used herein, the term “transcription” refers to methods to introduce exogenous nucleic acids into a cell. Methods of transfection include, but are not limited to, chemical methods, physical treatments and cationic lipids or mixtures.

[0565] Transfection: As used herein, “transfection” refers to the introduction of a polynucleotide into a cell wherein a polypeptide encoded by the polynucleotide is expressed (e.g., mRNA) or the polypeptide modulates a cellular function (e.g., siRNA, miRNA). As used herein, “expression” of a nucleic acid sequence refers to translation of a polynucleotide (e.g., an mRNA) into a polypeptide or protein and/or post-translational modification of a polypeptide or protein.

[0566] Treating, treatment, therapy: As used herein, the term “treating” or “treatment” or “therapy” refers to partially or completely alleviating, ameliorating, improving, relieving, delaying onset of, inhibiting progression of, reducing severity of, and/or reducing incidence of one or more symptoms or features of a hyper-proliferative disease, e.g., cancer. For example, “treating” cancer can refer to inhibiting survival, growth, and/or spread of a tumor. Treatment can be administered to a subject who does not exhibit signs of a disease, disorder, and/or condition and/or to a subject who exhibits only early signs of a disease, disorder, and/or condition for the purpose of decreasing the risk of developing pathology associated with the disease, disorder, and/or condition.

[0567] Unmodified: As used herein, “unmodified” refers to any substance, compound or molecule prior to being changed in any way. Unmodified can, but does not always, refer to the wild type or native form of a biomolecule. Molecules can undergo a series of modifications whereby each modified molecule can serve as the “unmodified” starting molecule for a subsequent modification.

[0568] Uracil: Uracil is one of the four nucleobases in the nucleic acid of RNA, and it is represented by the letter U. Uracil can be attached to a ribose ring, or more specifically, a ribofuranose via a β-N₁-glycosidic bond to yield the nucleoside uridine. The nucleoside uridine is also commonly abbreviated according to the one letter code of its nucleobase, i.e., U. Thus, in the context of the present disclosure, when a monomer in a polynucleotide sequence is U, such U is designated interchangeably as a “uracil” or a “uridine.”

[0569] Uridine Content: The terms “uridine content” or “uracil content” are interchangeable and refer to the amount of uracil or uridine present in a certain nucleic acid sequence. Uridine content or uracil content can be expressed as an absolute value (total number of uridine or uracil in the sequence) or relative (uridine or uracil percentage respect to the total number of nucleobases in the nucleic acid sequence).

[0570] Uridine-Modified Sequence: The terms “uridine-modified sequence” refers to a sequence optimized nucleic acid (e.g., a synthetic mRNA sequence) with a different overall or local uridine content (higher or lower uridine content) or with different uridine patterns (e.g., gradient distribution or clustering) with respect to the uridine content and/or uridine patterns of a candidate nucleic acid sequence. In the content of the present disclosure, the terms “uridine-modified sequence” and “uracil-modified sequence” are considered equivalent and interchangeable.

[0571] A “high uridine codon” is defined as a codon comprising two or three uridines, a “low uridine codon” is defined as a codon comprising one uridine, and a “no uridine codon” is a codon without any uridines. In some embodiments, a uridine-modified sequence comprises substitutions of high uridine codons with low uridine codons, substitutions of high uridine codons with no uridine codons, substitutions of low uridine codons with high uridine codons, substitutions of low uridine codons with no uridine codons, substitution of no uridine codons with low uridine codons, substitutions of no uridine codons with high uridine codons, and combinations thereof. In some embodiments, a high uridine codon can be replaced with another high uridine codon. In some embodiments, a low uridine codon can be replaced with another low uridine codon. In some embodiments, a no uridine codon can be replaced with another no uridine codon. A uridine-modified sequence can be uridine enriched or uridine rarefied.

[0572] Uridine Enriched: As used herein, the terms “uridine enriched” and grammatical variants refer to the increase in uridine content (expressed in absolute value or as a percentage value) in an sequence optimized nucleic acid (e.g., a synthetic mRNA sequence) with respect to the uridine content of the corresponding candidate nucleic acid sequence. Uridine enrichment can be implemented by substituting codons in the candidate nucleic acid sequence with synonymous codons containing less uridine nucleobases. Uridine enrichment can be global (i.e., relative to the entire length of a candidate nucleic acid sequence) or local (i.e., relative to a subsequence or region of a candidate nucleic acid sequence).

[0573] Uridine Rarefied: As used herein, the terms “uridine rarefied” and grammatical variants refer to a decrease in uridine content (expressed in absolute value or as a percentage value) in an sequence optimized nucleic acid (e.g., a synthetic mRNA sequence) with respect to the uridine content of the corresponding candidate nucleic acid sequence. Uridine rarefication can be implemented by substituting codons in the candidate nucleic acid sequence with synonymous codons containing less uridine nucleobases. Uridine rarefication can be global (i.e., relative to the entire length of a candidate nucleic acid sequence) or local (i.e., relative to a subsequence or region of a candidate nucleic acid sequence).

[0574] Variant: The term variant as used in present disclosure refers to both natural variants (e.g, polymorphisms, isoforms, etc) and artificial variants in which at least one amino acid residue in a native or starting sequence (e.g., a wild type sequence) has been removed and a different amino acid inserted in its place at the same position. These variants can be described as “substitutional variants.” The substitutions can be single, where only one amino acid in the molecule has been substituted, or they can be multiple, where two or more amino acids have been substituted in the same molecule. If amino acids are inserted or deleted, the resulting variant would be an “insertional variant” or a “deletional variant” respectively.

[0575] Antibody: The terms “antibody” or “immunoglobulin,” are used interchangeably herein, and include whole antibodies and any antigen binding portion or single chains thereof. A typical antibody comprises at least two heavy (H) chains and two light (L) chains interconnected by disulfide bonds. Each heavy chain is comprised of a heavy chain variable region (abbreviated herein as VH or VH) and a heavy chain constant region. The heavy chain constant region is comprised of three domains, CHI, CH2, and CH3. Each light chain is comprised of a light chain variable region (abbreviated herein as VL or VL) and a light chain constant region. The light chain constant region is comprised of one domain, CL. The VH and VL regions can be further subdivided into regions of hypervariability, termed Complementarity Determining Regions (CDR), interspersed with regions that are more conserved, termed framework regions (FW). Each VH and VL is composed of three CDRs and four FWs, arranged from amino-terminus to carboxy-terminus in the following order: FW1, CDR1, FW2, CDR2, FW3, CDR3, and FW4. The variable regions of the heavy and light chains contain a binding domain that interacts with an antigen. The constant regions of the antibodies can mediate the binding of the immunoglobulin to host tissues or factors, including various cells of the immune system (e.g., effector cells) and the first component (C1q) of the classical complement system.

[0576] The term “antibody” encompasses any immunoglobulin molecules that recognize and specifically bind to a target, e.g., CTLA-4, through at least one antigen recognition site within the variable region of the immunoglobulin molecule. The term “antibody” encompasses intact polyclonal antibodies, intact monoclonal antibodies, antibody fragments (such as Fab, Fab′, F(ab′)2, and Fv fragments), single chain Fv (scFv) mutants, multispecific antibodies such as bispecific antibodies generated from at least two intact antibodies, chimeric antibodies, humanized antibodies, human antibodies, fusion proteins comprising an antigen determination portion of an antibody, and any other modified immunoglobulin molecule comprising an antigen recognition site so long as the antibodies exhibit the desired biological activity.

[0577] An antibody can be of any the five major classes of immunoglobulins: IgA, IgD, IgE, IgG, and IgM, or subclasses (isotypes) thereof (e.g. IgG1, IgG2, IgG3, IgG4, IgA1 and IgA2), based on the identity of their heavy-chain constant domains referred to as alpha, delta, epsilon, gamma, and mu, respectively. The different classes of immunoglobulins have different and well known subunit structures and three-dimensional configurations.

[0578] The term antibody also encompasses molecules comprising an immunoglobulin domain from an antibody (e.g., a VH, CL, CL, CHI, CH2 or CH3 domain) fused to other molecules, i.e., fusion proteins. In some aspects, such fusion protein comprises an antigen-binding moiety (e.g., an scFv). The antibody moiety of a fusion protein comprising g an antigen-binding moiety can be used to direct a therapeutic agent (e.g., a cytotoxin) to a desired cellular or tissue location determined by the specificity of the antigen-binding moiety.

[0579] Therapeutic antibody: The term “therapeutic antibody” is used in a broad sense, and encompasses any antibody or a functional fragment thereof that functions to deplete target cells in a patient. Such target cells include, e.g., tumor cells. The therapeutic antibodies can, for instance, mediate a cytotoxic effect or cell lysis, particularly by antibody-dependent cell-mediated cytotoxicity (ADCC). Therapeutic antibodies according to the disclosure can be directed to epitopes of surface which are overexpressed by cancer cells.

[0580] Blocking antibody: In some aspects, the therapeutic antibody is a blocking antibody. The terms “blocking antibody” or “antagonist antibody” refer to an antibody which inhibits or reduces the biological activity of the antigen it binds. In a certain aspect blocking antibodies or antagonist antibodies substantially or completely inhibit the biological activity of the antigen. In some aspects, the biological activity is reduced by at least 10%, at least 15%, at least 20%, at least 25%, at least 30%, at least 35%, at least 40%, at least 45%, at least 50%, at least 55%, at least 60%, at least 65%, at least 70%, at least 75%, at least 80%,at least 85%, at least 90%, at least 95%, or even 100%.

[0581] Antigen binding portion thereof. The term “antigen binding portion” as used herein, when used in reference to an antibody disclosed herein, is intended to refer to a portion of the antibody which is capable of specifically binding an antigen that is specifically bound by the antibody. The term antigen binding portion also refers to a construct derived from an antibody that functions as a blocking or a targeting antibody, e.g., an scFv. Whether a binding portion is still capable to specifically binding to its antigen can be determined using binding assays known in the art (e.g., BIACORE).

[0582] Variable region: A “variable region” of an antibody refers to the variable region of the antibody light chain or the variable region of the antibody heavy chain, either alone or in combination. The variable regions of the heavy and light chain each consist of four FW regions connected by three CDR regions. The CDRs in each chain are held together in close proximity by the FW regions and, with the CDRs from the other chain, contribute to the formation of the antigen-binding site of antibodies. There are several techniques for determining the location of CDRs. The Kabat numbering system is generally used when referring to a residue in the variable domain (approximately residues 1-107 of the light chain and residues 1-113 of the heavy chain) (e.g., Kabat et al., Sequences of Immunological Interest, 5th Ed. Public Health Service, National Institutes of Health, Bethesda, Md. (1991)).

[0583] The boundaries of the antibody structural elements presented in this disclosure, namely, CDR1, CDR2, and CDR3 of a VH or VL domain; VH and VL domain; and constant domains CL, CHI, CH₂, and CH3 can be identified according to methods know in the art. For example, the boundaries between structural elements in an antibody can be identified from sequence data alone by using the Paratome tool available at URL tools.immuneepitope.org/paratome/. See, Kunik et al. (2012) PLoS Comput. Biol. 8:2; Kunik et al. (2012). Nucleic Acids Res. 40(Web Server issue):W521-4.

[0584] Epitope: The term “epitope” as used herein refers to an antigenic protein determinant capable of binding to an antibody or antigen-binding portion thereof disclosed herein. Epitopes usually consist of chemically active surface groupings of molecules such as amino acids or sugar side chains and usually have specific three dimensional structural characteristics, as well as specific charge characteristics. The part of an antibody or binding molecule that recognizes the epitope is called a paratope. The epitopes of protein antigens are divided into two categories, conformational epitopes and linear epitopes, based on their structure and interaction with the paratope. A conformational epitope is composed of discontinuous sections of the antigen's amino acid sequence. These epitopes interact with the paratope based on the 3-D surface features and shape or tertiary structure of the antigen. By contrast, linear epitopes interact with the paratope based on their primary structure. A linear epitope is formed by a continuous sequence of amino acids from the antigen.

II. mRNA Combination Therapy for the Treatment of Cancer

[0585] The present disclosure provides a new approach to treat cancer involving the prevention or treatment of disease with polynucleotides (e.g., mRNAs) comprising open reading frames encoding polypeptides that stimulate the immune response to cancer, i.e., cancer immunotherapy.

[0586] In particular, the present disclosure provides compositions for the treatment of cancer (e.g., tumors) comprising, e.g., at least two polynucleotides (e.g., mRNAs), wherein the at least two polynucleotides are selected from the group consisting of
[0587] (i) a polynucleotide (e.g., an mRNA) comprising an ORF encoding an immune response primer polypeptide;
[0588] (ii) a polynucleotide (e.g., an mRNA) comprising an ORF encoding an immune response co-stimulatory signal polypeptide;
[0589] (iii) a polynucleotide (e.g., an mRNA) comprising an ORF encoding a checkpoint inhibitor polypeptide or a checkpoint inhibitor polypeptide; and,
[0590] (iv) a combination thereof.

[0591] In some embodiments, the polynucleotides in the composition are in a single formulation.

[0592] The present disclosure also provide methods for the treatment of cancer using the compositions disclosed herein. Accordingly, the present disclosure provides a method of reducing the size of a tumor or inhibiting growth of a tumor in a subject in need thereof comprising administering to the subject at least two polynucleotides (e.g., mRNAs) and optionally a checkpoint inhibitor polypeptide, wherein the at least two polynucleotides are selected from the group consisting of
[0593] (i) a polynucleotide (e.g., an mRNA) comprising an ORF encoding an immune response primer polypeptide;
[0594] (ii) a polynucleotide (e.g., an mRNA) comprising an ORF encoding an immune response co-stimulatory signal polypeptide;
[0595] (iii) a polynucleotide (e.g., an mRNA) comprising an ORF encoding a checkpoint inhibitor polypeptide or a checkpoint inhibitor polypeptide; and,
[0596] (iv) a combination thereof.

[0597] The disclosure also provides a method of reducing the size of a tumor or inhibiting growth of a tumor in a subject in need thereof comprising administering to the subject at least one polynucleotide and a checkpoint inhibitor polypeptide, wherein the at least one polynucleotide is selected from the group consisting of
[0598] (i) a polynucleotide (e.g., an mRNA) comprising an ORF encoding an immune response primer polypeptide;
[0599] (ii) a polynucleotide (e.g., an mRNA) comprising an ORF encoding an immune response co-stimulatory signal polypeptide; and,
[0600] (iii) a combination thereof.

[0601] As used throughout the present disclosure, the term “combination therapy” refers to a combination of polynucleotides (e.g., mRNAs) wherein each polynucleotide comprises an ORF encoding an immune response primer polypeptide, an immune response co-stimulatory signal polypeptide, or a checkpoint inhibitor polypeptide, which can be administered simultaneously, concurrently, or consecutively to a subject in need thereof as part of a single or multiple formulations. For example, a combination therapy can comprise (i) a first polynucleotide (e.g., an mRNA) comprising a first ORF encoding a first polypeptide (e.g., an immune response primer polypeptide such as IL23), and (ii) a second polynucleotide (e.g., mRNA) comprising a second ORF encoding a second polypeptide (e.g., an immune response co-stimulatory signal polypeptide such as OX40L). Or, for example, the combination therapy can comprise (i) a first polynucleotide (e.g., an mRNA) comprising a first ORF encoding a first polypeptide, (ii) a second polynucleotide (e.g., an mRNA) comprising a second ORF encoding a second polypeptide, and (iii) a third polynucleotide (e.g., an mRNA) comprising a third ORF encoding a third polypeptide. It is to be understood that the term “combination therapy” is not limited to the physical combination of polynucleotides, but also encompasses the separate administration of both these polynucleotides simultaneously, concurrently, or consecutively to a subject in need thereof as part of a single or multiple formulations.

[0602] As used herein, the term “doublet” refers to a combination therapy comprising two components (polynucleotides, polypeptides, or combinations thereof), i.e.,
[0603] (i) a first polynucleotide comprising a first ORF encoding a first polypeptide, and a second polynucleotide comprising a second ORF encoding a second polypeptide; or,
[0604] (ii) a first polynucleotide comprising a first ORF encoding a first polypeptide, and a second polypeptide.

[0605] As used herein, the term “triplet” refers to a combination therapy comprising three components (polynucleotides, polypeptides, or combinations thereof), i.e.,
[0606] (i) a first polynucleotide comprising a first ORF encoding a first polypeptide, a second polynucleotide comprising a second ORF encoding a second polypeptide, and, a third polynucleotide comprising a third ORF encoding a third polypeptide; or,
[0607] (ii) a first polynucleotide comprising a first ORF encoding a first polypeptide, a second polynucleotide comprising a second ORF encoding a second polypeptide, and, a third polypeptide; or,
[0608] (iii) a first polynucleotide comprising a first ORF encoding a first polypeptide, a second polypeptide, and, a third polypeptide.

[0609] Thus, as illustrated in the examples above, the term combination therapy encompasses any combination of immune response primer (polynucleotide or polypeptide), immune response co-stimulatory signal (polynucleotide or polypeptide), and checkpoint inhibitor (polynucleotide or polypeptide), with the proviso that at least one of the components in the combination therapy is a polynucleotide, and particularly, an mRNA. For example, in some particular embodiments, immune response primers, immune response co-stimulatory signals, and checkpoint inhibitors such as, e.g., IL12, IL18, IL23, IL36gamma, TLR4, CD80, OX40L, anti-CTLA-4, anti-PD-1, or anti-PD-L1, can be administered either as polypeptides or as polynucleotides encoding such polypeptides.

[0610] As used herein, the term “immune response primer” refers to a molecule that enhances antigen presentation and/or recognition. In some embodiments, the immune response primer is IL12 or IL23. In specific embodiments of the methods and compositions disclosed herein, the immuno response primer is interleukin 12 (IL12), interleukin (IL23), Toll-like receptor 4 (TLR4), interleukin 36 gamma (IL36gamma), interleukin 18 (IL18), or a combination thereof. The combination therapies of the present disclosure, i.e., those combining immune response primers, immune response co-stimulatory signals, checkpoint inhibitors, and combinations thereof, can also incorporate other immune response primers known in the art (either as polypeptides or as polynucleotides encoding such polypeptides).

[0611] As used herein, the term “immune response co-stimulatory signal” refers to immuno-stimulatory molecule that promotes T/NK cell recruitment, proliferation, activation, survival, or a combination thereof. In some embodiments, the immune response co-stimulatory signal enhances T-cell expansion, function, and memory formation (e.g., OX40L). In specific embodiments of the methods and compositions disclosed herein, the immune response co-stimulatory signal is tumor necrosis factor receptor superfamily member 4 ligand (OX40L), cluster of differentiation 80 (CD80), interleukin 15 (IL15), or a combination thereof. The combination therapies of the present disclosure, i.e., those combining immune response primers, immune response co-stimulatory signals, checkpoint inhibitors, and combinations thereof, can also incorporate other immune response co-stimulatory signals known in the art either as polypeptides or as polynucleotides encoding such polypeptides.

[0612] As used herein, the term “checkpoint inhibitor” refers to a molecule that prevents immune cells from being “turned off” by cancer cells. As used herein, the term checkpoint inhibitor refers to polypeptides (e.g., antibodies) or polynucleotides encoding such polypeptides (e.g., mRNAs) that neutralize or inhibit inhibitory checkpoint molecules such as cytotoxic T-lymphocyte-associated protein 4 (CTLA-4), programmed death 1 receptor (PD-1), or PD-1 ligand 1 (PD-L1), and combinations thereof. Thus, in some embodiments, the checkpoint inhibitor polypeptide is an antibody or a polynucleotide encoding the antibody. In some embodiments, the antibody is an anti-CTLA-4 antibody or antigen-binding fragment thereof that specifically binds CTLA-4, an anti-PD-1 antibody or antigen-binding fragment thereof that specifically binds PD-1, an anti-PD-L1 antibody or antigen-binding fragment thereof that specifically binds PD-L1, and a combination thereof. In some embodiments, the anti-PD-L1 antibody is atezolizumab, avelumab, or durvalumab. In some embodiments, the anti-CTLA-4 antibody is tremelimumab or ipilimumab. In some embodiments, the anti-PD-1 antibody is nivolumab or pembrolizumab. The combination therapies of the present disclosure, i.e., those combining immune response primers, immune response co-stimulatory signals, checkpoint inhibitors, and combinations thereof, can also incorporate other checkpoint inhibitors known in the art either as polypeptides or as polynucleotides encoding such polypeptides.

[0613] These examples are not limiting, and merely illustrate that the combination therapies disclosed herein can fine tune an immune response to cancer by intervening at multiple intervention points in the immune system, e.g.,
[0614] (a) Priming an immune response by administering an immune response primer; and/or,
[0615] (b) boosting the immune response triggered by the administration of the immune response primer(s) or enhanced by the administration of the immune response primer(s), or boosting an existing immune response, by administering immune response co-stimulatory signals; and/or,
[0616] (c) removing inhibition of the immune response by inhibitory checkpoint molecules or preventing inhibition of the immuno response by inhibitory checkpoint molecules by administering one or more checkpoint inhibitors (at one or more intervention points, e.g., by co-administration of an anti-CTLA-4 antibody and/or an anti-PD-1 antibody).

[0617] In particular embodiments of the methods disclosed herein, the at least two polynucleotides administered in a combination therapy are
[0618] (i) a first polynucleotide (e.g., an mRNA) comprising an ORF encoding an first immune response primer polypeptide and a second polynucleotide (e.g., an mRNA) comprising an ORF encoding a second immune response primer polypeptide;
[0619] (ii) a first a polynucleotide (e.g., an mRNA) comprising an ORF encoding an immune response primer polypeptide and a second polynucleotide (e.g., an mRNA) comprising an ORF encoding an immune response co-stimulatory signal polypeptide; or
[0620] (iii) (i) or (ii) further comprising a polynucleotide (e.g., an mRNA) comprising an ORF encoding a checkpoint inhibitor polypeptide, or a checkpoint inhibitor polypeptide.

[0621] The present disclosure provides also method of reducing the size of a tumor or inhibiting growth of a tumor in a subject in need thereof comprising administering to the subject at least two polynucleotides (e.g, mRNAs) encoding a first polypeptide and a second polypeptide, wherein (1) the first polypeptide is selected from the group consisting of an IL12 polypeptide, an IL23 polypeptide, an IL36gamma polypeptide, an OX40L polypeptide, a CD80 polypeptide (e.g., CD80-Fc), a TLR4 polypeptide (e.g., caTLR4), an IL18 polypeptide, an IL15 polypeptide, an anti-CTLA-4 antibody, and, a combination thereof, and (2) the second polypeptide is an immune response primer polypeptide; an immune response co-stimulatory signal polypeptide; or a checkpoint inhibitor polypeptide.

[0622] In some embodiments, the disclosure includes a method of reducing the size of a tumor or inhibiting growth of a tumor in a subject in need thereof comprising administering to the subject (i) at least one polynucleotide (e.g, mRNAs) encoding a first polypeptide and (ii) a checkpoint inhibitor polypeptide, wherein the first polypeptide is selected from the group consisting of (i) an IL12 polypeptide, (ii) an IL23 polypeptide, (iii) an IL36gamma polypeptide, (iv) an OX40L polypeptide, (v) a CD80 polypeptide (e.g., CD80-Fc), (vi) a TLR4 polypeptide (e.g., caTLR4), (vii) an IL18 polypeptide, (viii) an IL15 polypeptide, (ix) an anti-CTLA-4 antibody, and (x) a combination thereof. In some embodiments, the checkpoint inhibitor is an anti-PD-1 antibody, an anti-PD-L1 antibody, an anti-CTLA-4 antibody, or any combination thereof.

[0623] The present disclosure provides a method of reducing the size of a tumor or inhibiting growth of a tumor in a subject in need thereof comprising administering at least two polynucleotides, wherein the first polynucleotide comprises an ORF encoding an IL12 polypeptide (an “IL12 polynucleotide”), and the second polynucleotide comprises an ORF encoding an immune response primer polypeptide, an immune response co-stimulatory signal polypeptide, or a checkpoint inhibitor polypeptide or a polynucleotide encoding the same. In some embodiments, the second polynucleotide comprises an ORF encoding an OX40L polypeptide. In other embodiments, the present disclosure provides a method of reducing the size of a tumor or inhibiting growth of a tumor in a subject in need thereof comprising administering an IL12 polynucleotide and a check point inhibitor polypeptide comprising an anti-PD-1 antibody, an anti-PD-L1 antibody, an anti-CTLA-4 antibody, or any combination thereof. In other embodiments, the present method comprises administering an IL12 polynucleotide, e.g., mRNA, in combination with an anti-PD-1 antibody. In some embodiments, the present method comprises administering an IL12 polynucleotide, e.g., mRNA, and an anti-PD-L1 antibody. In other embodiments, the present method comprises administering an IL12 polynucleotide, e.g., mRNA, and an anti-CTLA-4 antibody. In certain embodiments, the present method comprises administering an IL12 polynucleotide, e.g., mRNA, and a polynucleotide comprising an ORF encoding an OX40L polypeptide (“an OX40L polynucleotide). In other embodiments, the present method comprises administering an IL12 polynucleotide, an OX40L polynucleotide, and a checkpoint inhibitor polypeptide, e.g., an anti-CTLA-4 antibody, an anti-PD-1 antibody, an anti-PD-L1 antibody, or any combination thereof.

[0624] The present disclosure also provides a method of reducing the size of a tumor or inhibiting growth of a tumor in a subject in need thereof comprising administering at least two polynucleotides, wherein the first polynucleotide comprises an ORF encoding an IL15 polypeptide (an” IL15 polynucleotide) and the second polynucleotide comprises an ORF encoding an immune response primer polypeptide, an immune response co-stimulatory signal polypeptide, or a checkpoint inhibitor polypeptide. In other embodiments, the disclosure includes a method of reducing the size of a tumor or inhibiting growth of a tumor in a subject in need thereof comprising administering at least one polynucleotide and a checkpoint inhibitor, wherein the first polynucleotide comprises an IL15 polynucleotide and the checkpoint inhibitor comprises an anti-CTLA-4 antibody, an anti-PD-1 antibody, an anti-PD-L1 antibody, or any combination thereof.

[0625] The present disclosure also provides a method of reducing the size of a tumor or inhibiting growth of a tumor in a subject in need thereof comprising administering at least two polynucleotides, wherein the first polynucleotide comprises an ORF encoding an IL18 polypeptide (“an IL18 polynucleotide”), and the second polynucleotide comprises an ORF encoding an immune response primer polypeptide, an immune response co-stimulatory signal polypeptide, or a checkpoint inhibitor polypeptide. In some embodiments, the second polynucleotide comprises an ORF encoding a polypeptide selected from the group consisting of an IL12 polypeptide, an IL23 polypeptide, a TLR4 polypeptide (e.g., caTLR4), an OX40L polypeptide, an anti-CTLA-4 antibody, and any combination thereof. In other embodiments, the disclosure provides a method of reducing the size of a tumor or inhibiting growth of a tumor in a subject in need thereof comprising administering an IL18 polynucleotide and a checkpoint inhibitor polypeptide comprising an anti-PD-1 antibody, an anti-PD-L1 antibody, an anti-CTLA-4 antibody, or any combination thereof. In some embodiments, the present method comprises administering an IL18 polynucleotide and an OX40L polynucleotide. In other embodiments, the present method comprises administering an IL18 polynucleotide and a polynucleotide comprising an ORF encoding an IL23 polypeptide (“an IL23 polynucleotide”). In some embodiments, the present method comprises administering an IL18 polynucleotide and a polynucleotide comprising an ORF encoding a TLR4 polypeptide, e.g., caTLR4, (“a TLR4 polynucleotide”). In other embodiments, the present method comprises administering an IL18 polynucleotide and an IL12 polynucleotide. In some embodiments, the present method comprises administering an IL18 polynucleotide, an IL12 polynucleotide, and an IL23 polynucleotide in combination. In still other embodiments, the present method comprises administering an IL18 polynucleotide, an IL12 polynucleotide, an IL23 polynucleotide, a TLR4 polynucleotide, an OX40L polynucleotide, an anti-CTLA-4 antibody or a polynucleotide encoding the same, an anti-PD1 antibody, and/or an anti-PD-L1 antibody in any combination.

[0626] Also provided is a method of reducing the size of a tumor or inhibiting growth of a tumor in a subject in need thereof comprising administering at least two polynucleotides, wherein the first polynucleotide comprises an ORF encoding an IL23 polypeptide (“an IL23 polynucleotide”) and the second polynucleotide comprises an ORF encoding an immune response primer polypeptide, an immune response co-stimulatory signal polypeptide, or a checkpoint inhibitor polypeptide. In some embodiments, the second polynucleotide comprises an ORF encoding a polypeptide selected from the group consisting of an IL12 polypeptide, an IL18 polypeptide, an OX40L polypeptide, and any combination thereof. In other embodiments, the disclosure provides a method of reducing the size of a tumor or inhibiting growth of a tumor in a subject in need thereof comprising administering an IL23 polynucleotide and a checkpoint inhibitor polypeptide comprising an anti-PD-1 antibody, an anti-PD-L1 antibody, an anti-CTLA-4 antibody, or any combination thereof. In some embodiments, the present method comprises administering an IL23 polynucleotide and an OX40L polynucleotide. In some embodiments, the present method comprises administering an IL23 polynucleotide and an IL12 polynucleotide. In other embodiments, the present method comprises administering an IL23 polynucleotide and an anti-CTLA-4 antibody. In other embodiments, the present method comprises administering an IL23 polynucleotide, an OX40L polynucleotide, an IL12 polypeptide, an IL18 polypeptide, and an anti-CTLA-4 antibody in combination. In other embodiments, the present method comprises administering an IL23 polynucleotide, an IL12 polypeptide, an IL18 polypeptide, and an anti-CTLA-4 antibody in any combination.

[0627] Also provided is a method of reducing the size of a tumor or inhibiting growth of a tumor in a subject in need thereof comprising administering at least two polynucleotides, wherein the first polynucleotide comprises an ORF encoding an IL36gamma polypeptide (“an IL36gamma polynucleotide”) and the second polynucleotide comprises an ORF encoding an immune response primer polypeptide, an immune response co-stimulatory signal polypeptide, or a checkpoint inhibitor polypeptide.

[0628] The present disclosure also provides a method of reducing the size of a tumor or inhibiting growth of a tumor in a subject in need thereof comprising administering at least two polynucleotides, wherein the first polynucleotide comprises an ORF encoding a TLR4 polypeptide (e.g., caTLR4) (“a TLR4 polynucleotide”) and the second polynucleotide comprises an ORF encoding an immune response primer polypeptide, an immune response co-stimulatory signal polypeptide, or a checkpoint inhibitor polypeptide.

[0629] Also provided is a method of reducing the size of a tumor or inhibiting growth of a tumor in a subject in need thereof comprising administering at least two polynucleotides, wherein the first polynucleotide comprises an ORF encoding an CD80 polypeptide (“a CD80 polynucleotide”) and the second polynucleotide comprises an ORF encoding an immune response primer polypeptide, an immune response co-stimulatory signal polypeptide, or a checkpoint inhibitor polypeptide. In some embodiments, the second polynucleotide comprises an ORF encoding an anti-CTLA-4 antibody.

[0630] Also provided is a method of reducing the size of a tumor or inhibiting growth of a tumor in a subject in need thereof comprising administering at least two polynucleotides, wherein the first polynucleotide comprises an ORF encoding an OX40L polypeptide (“an OX40L polynucleotide”) and the second polynucleotide comprises an ORF encoding an immune response primer polypeptide, an immune response co-stimulatory signal polypeptide, or a checkpoint inhibitor polypeptide. In some embodiments, the present method comprises administering an OX40L polynucleotide and an IL18 polynucleotide. In some embodiments, the present method comprises administering an OX40L polynucleotide and a TLR4 (e.g., caTLR4) polynucleotide. In some embodiments, the present method comprises administering an OX40L polynucleotide, an IL12 polynucleotide, and an IL23 polynucleotide in combination. In some embodiments, the present method comprises administering an OX40L polynucleotide and a TLR4 (e.g., caTLR4) polynucleotide. In some embodiments, the present method comprises administering an OX40L polynucleotide, a TLR4 (e.g., caTLR4) polynucleotide, and an IL18 polynucleotide in combination. In some embodiments, the present method comprises administering an OX40L polynucleotide and a TLR4 (e.g., caTLR4) polynucleotide. In some embodiments, the present method comprises administering an OX40L polynucleotide and an anti-CTLA-4 antibody or a polynucleotide encoding the same. In some embodiments, the present method comprises administering an OX40L polynucleotide and an anti-PD-1 antibody or an anti-PD-L1 antibody. In other embodiments, the present method comprises administering an OX40L polynucleotide, an IL12 polynucleotide, an IL23 polynucleotide, and an anti-CTLA-4 antibody or a polynucleotide encoding the same. In certain embodiments, the present method comprises administering an OX40L polynucleotide, an IL12 polynucleotide, an IL23 polynucleotide, and an anti-PD-1 antibody or an anti-PD-L1 antibody. In other embodiments, the present method comprises administering an OX40L polynucleotide, a TLR4 (e.g., caTLR4) polynucleotide, an IL18 polynucleotide, and an anti-PD-1 antibody or an anti-PD-L1 antibody. In other embodiments, the present method comprises administering an OX40L polynucleotide, a TLR4 (e.g., caTLR4) polynucleotide, an IL18 polynucleotide, and an anti-CTLA-4 antibody or a polynucleotide encoding the same.

[0631] Also provided is a method of reducing the size of a tumor or inhibiting growth of a tumor in a subject in need thereof comprising administering at least two polynucleotides, wherein the first polynucleotide comprises an ORF encoding an anti-CTLA-4 antibody (“an anti-CTLA-4 polynucleotide”) and the second polynucleotide comprises an ORF encoding an immune response primer polypeptide, an immune response co-stimulatory signal polypeptide, or a checkpoint inhibitor polypeptide. In some embodiments, the present method comprises administering an anti-CTLA-4 polynucleotide and an IL18 polynucleotide. In some embodiments, the present method comprises administering an anti-CTLA-4 polynucleotide and an IL12 polynucleotide. In some embodiments, the present method comprises administering an anti-CTLA-4 polynucleotide and an IL23 polynucleotide. In some embodiments, the present method comprises administering an anti-CTLA-4 polynucleotide and a TLR4 polynucleotide. In other embodiments, the present method comprises administering an anti-CTLA-4 polynucleotide, an IL18 polynucleotide, an IL23 polynucleotide, an OX40L polynucleotide, a TLR4 polynucleotide, or any combination thereof.

[0632] In some specific embodiments, the IL12 polynucleotide comprises at least one polynucleotide comprising an ORF encoding an IL12 polypeptide, wherein the IL12 polypeptide comprises an interleukin 12 p40 subunit (IL12B) polypeptide and an interleukin 12 p35 subunit (IL12A) polypeptide. The IL12B polypeptide can be operably linked to the IL12A polypeptide by a linker. In some embodiments, the polynucleotide encoding the IL12 polypeptide can further comprise a nucleic acid encoding a signal peptide, e.g., an IL12B signal peptide. Accordingly, in some embodiments, the sequence of the IL12 polypeptide has the structure

[SP]-[IL12B]-[L]-[IL12A]

wherein [SP] is a signal peptide, [IL12B] is a polypeptide corresponding to mature IL12B, [L] is a peptide linker, and [IL12A] is a polypeptide corresponding to mature IL12A. In other embodiments, the sequence of the IL12 polypeptide has the structure [SP]—[IL12A]-[L]-[IL12B].

[0633] In some specific embodiments, the IL18 polynucleotide comprises an ORF encoding an IL18 polypeptide, wherein the IL18 polypeptide has the structure [SP]-[IL18], wherein [SP] is a signal peptide, an [IL18] is a polypeptide corresponding to mature IL18. In some embodiments, the signal peptide is a native IL18 signal peptide. In other embodiments, the signal peptide is a heterologous signal peptide, e.g., a tissue plasminogen activator (tPA) signal peptide or an interleukin 12 (IL12) signal peptide.

[0634] In some specific embodiments, the CD80 polynucleotide comprises an ORF encoding a CD80 extracellular domain. In some embodiments, the CD80 polynucleotide comprises nucleic acid sequence encoding an Fc moiety, which is operably linked to the nucleic acid encoding the CD80 extracellular domain. Accordingly, in some embodiments, the ORF in a CD80 polynucleotide encodes a CD80Fc fusion protein. In some embodiments, the CD80 polypeptide, e.g., a CD80Fc fusion protein, has the structure

[SP]-[CD80]-[Fc]

where [SP] is a signal peptide, [CD80] is the extracellular domain of CD80 or a functional portion thereof, and [Fc] is an Fc moiety. In some embodiments, the signal peptide is an endogenous CD80 signal peptide.

[0635] In some embodiments, the TLR4 polynucleotide comprises an ORF encoding a constitutively active TLR4 (caTLR4) polypeptide comprising the intracellular domain and transmembrane region of TLR4. In some embodiment, TLR4 polypeptide encoded by the ORF in the TLR polynucleotide has the structure

[SP]-[TLR4]

wherein [SP] is a signal peptide, and [TLR4] is TLR4 polypeptide, e.g., a caTLR4 polypeptide. In some embodiments, the signal peptide is a heterologous signal peptide, wherein the heterologous signal peptide is lysosome-associated membrane glycoprotein 1 (LAMP1) signal peptide.

[0636] In some embodiments, the IL15 polynucleotide comprises an ORF encoding a fusion protein comprising an IL15 polypeptide fused to an IL15R polypeptide by a linker. In some embodiments, the IL15R polypeptide consists or consists essentially of the extracellular domain of IL15Ralpha. In some embodiments, the IL15-IL15R fusion polypeptide further comprises an Fc domain. Accordingly, in some embodiments the IL15 polypeptide encoded by the ORF in the IL15 polynucleotide has the structure

[SP]—[Fc]-[IL15R]-[L]-[IL15]

wherein [SP] is a signal peptide, [IL15] is the sequence of mature IL15, [L] is a polypeptide linker, [IL15R] is the extracellular of the IL15Ralpha, and [Fc] is an Fc moiety. In some embodiments, the signal peptide is a heterologous signal peptide, e.g., a tPA signal peptide.

[0637] In some embodiments, the IL23 polynucleotide comprises an ORF encoding an IL23 polypeptide, wherein the IL23 polypeptide comprises an IL12p40 polypeptide and an IL23p19 polypeptide. In some embodiments, the IL12p40 polypeptide is fused to the IL23p19 polypeptide via a linker. In some embodiments, the IL23 polypeptide further comprises a signal peptide. Accordingly, in some embodiments the IL23 polypeptide encoded by the ORF in the IL23 polynucleotide has the structure

[SP]-[IL12p40]-[L]-[IL23p19]

wherein [SP] is a signal peptide, [IL12p40] is the IL12p40 subunit of IL23, [L] is a polypeptide linker, [IL23p19] is the IL23p19 subunit of IL23. In some embodiments, the signal peptide is an IL12p40 signal peptide. In other embodiments, e.g., when the order of the IL23 subunits is transposed in the IL23 construct, the signal peptide is an IL23p19 signal peptide.

[0638] In some embodiments, the IL36gamma polynucleotide comprises an ORF encoding an IL36gamma polypeptide. In some embodiments, the IL36gamma polypeptide further comprises a nucleic acid encoding a signal peptide. Accordingly, in some embodiments the IL36gamma polypeptide encoded by the ORF in the IL36gamma polynucleotide has the structure

[SP]-[IL36gamma]

wherein [SP] is signal peptide and [IL36gamma] is IL36gamma, e.g., mature IL36gamma. In some embodiments, the signal peptide is a heterologous signal peptide, e.g., an hIgKV4 signal peptide.

[0639] In some embodiments, the anti-CTLA-4 polynucleotide encodes an antibody an antibody or an antigen binding portion thereof which specifically binds to the same CTLA-4 epitope as:
[0640] (i) an antibody or antigen-binding portion thereof comprising a heavy chain variable region (VH) of SEQ ID NO: 9, 28, or 39, and a light chain variable region (VL) of SEQ ID NO: 11, 29 or 41; or,
[0641] (ii) an antibody or antigen-binding portion comprising a VH of SEQ ID NO: 183 and a VL of SEQ ID NO: 185.

[0642] In some embodiments, the anti-CTLA-4 polynucleotide encodes an antibody an antibody or an antigen binding portion thereof which specifically binds to CTLA-4 and competitively inhibits CTLA-4 binding by:
[0643] (i) an antibody or antigen-binding portion thereof comprising a VH of SEQ ID NO: 9, 28, or 39 and a VL of SEQ ID NO: 11, 29 or 41; or,
[0644] (ii) an antibody or antigen-binding portion thereof comprising a VH of SEQ ID NO: 183 and a VL of SEQ ID NO: 185.

[0645] In some embodiments, the anti-CTLA-4 polynucleotide comprises one or more mRNAs (e.g., two, three or more mRNAs) encoding:
[0646] (i) an antibody or an antigen binding portion thereof which specifically binds to CTLA-4 comprising a VH of SEQ ID NO: 9, 28, or 39 and a VL of SEQ ID NO: 11, 29 or 41; or,
[0647] (ii) an antibody or antigen-binding portion thereof which specifically binds to CTLA-4 comprising a VH of SEQ ID NO: 183 and a VL of SEQ ID NO: 185.

[0648] In some embodiments, the anti-CTLA-4 polynucleotide comprises a VH and a VL, wherein the VL is selected from the group consisting of:
[0649] (i) a VL complementarity determining region 1 (VL-CDR1) amino acid sequence identical to, or identical except for four, three, two or one amino acid substitutions to SEQ ID NO: 17, 33, or 47, or SEQ ID NO: 189;
[0650] (ii) a VL complementarity determining region 1 (VL-CDR2) amino acid sequence identical to, or identical except for four, three, two or one amino acid substitutions to SEQ ID NO: 18, 34 or 48, or SEQ ID NO: 190; and
[0651] (iii) a VL complementarity determining region 1 (VL-CDR3) amino acid sequence identical to, or identical except for four, three, two or one amino acid substitutions to SEQ ID NO: 19, 35 or 49, or SEQ ID NO: 191; and wherein the VH is selected from the group consisting of:
[0652] (iv) a VH complementarity determining region 1 (VH-CDR1) amino acid sequence identical to, or identical except for four, three, two or one amino acid substitutions to SEQ ID NO: 14, 30 or 44, or SEQ ID NO: 186;
[0653] (v) a VH complementarity determining region 1 (VH-CDR2) amino acid sequence identical to, or identical except for four, three, two or one amino acid substitutions to SEQ ID NO:15, 31 or 45, or SEQ ID NO: 187; and
[0654] (vi) a VH complementarity determining region 1 (VH-CDR3) amino acid sequence identical to, or identical except for four, three, two or one amino acid substitutions to SEQ ID NO:16, 32 or 46 or SEQ ID NO:188.

[0655] In some embodiments, one or more of the polynucleotides in a combination therapy disclosed herein has been sequence-optimized. In some embodiments, one or more of the polynucleotides in a combination therapy disclosed herein comprise at least one chemically modified nucleoside.

[0656] In certain embodiments, a polynucleotide (e.g., an RNA, such as an mRNA) comprising a sequence-optimized nucleotide sequence (e.g., an ORF) encoding an immune response primer polypeptide, an immune response co-stimulatory signal polypeptide, or a checkpoint inhibitor polypeptide, can be used in combination with one or more anti-cancer agents. In some embodiments, the combination therapies disclosed herein can comprise one or more standard therapies. In certain embodiments, the one or more anti-cancer agents are an mRNA encoding a tumor antigen. In other embodiments, the one or more anti-cancer agents are not a tumor antigen or an mRNA encoding a tumor antigen. In other embodiments, the one or more anti-cancer agents are a protein, e.g., an antibody.

[0657] In some embodiments, the one or more anti-cancer agents are approved by the United States Food and Drug Administration. In other embodiments, the one or more anti-cancer agents are pre-approved by the United States Food and Drug Administration.

[0658] In another embodiment, the subject has been treated with an anti-PD-1 antagonist prior to the administration of a combination therapy disclosed herein. In another embodiment, the subject has been treated with a monoclonal antibody that binds to PD-1 prior to the administration of a combination therapy disclosed herein. In another embodiment, the subject has been treated with an anti-PD-1 monoclonal antibody therapy prior to the administration of a combination therapy disclosed herein. In some embodiments, the anti-PD-1 monoclonal antibody therapy comprises Nivolumab, Pembrolizumab, Pidilizumab, or any combination thereof.

[0659] In another embodiment, the subject has been treated with a monoclonal antibody that binds to PD-L1 prior to the administration of a combination therapy disclosed herein. In another embodiment, the subject has been treated with an anti-PD-L1 monoclonal antibody therapy prior to the administration of a combination therapy disclosed herein. In other embodiments, the anti-PD-L1 monoclonal antibody therapy comprises Durvalumab, Avelumab, MEDI473, BMS-936559, Atezolizumab, or any combination thereof.

[0660] In some embodiments, the subject has been treated with a CTLA-4 antagonist prior to the administration of a combination therapy disclosed herein. In another embodiment, the subject has been previously treated with a monoclonal antibody that binds to CTLA-4 prior to the administration of a combination therapy disclosed herein. In another embodiment, the subject has been treated with an anti-CTLA-4 monoclonal antibody prior to the administration of a combination therapy disclosed herein. In other embodiments, the anti-CTLA-4 antibody therapy comprises Ipilimumab or Tremelimumab.

[0661] Thus, the administration of mRNA as referred to in the present disclosure is not in the form of a dendritic cell comprising an mRNA encoding an immune response primer polypeptide, an immune response co-stimulatory signal polypeptide, or a checkpoint inhibitor polypeptide disclosed herein (e.g., IL12, IL15, IL18, IL23, IL36gamma, TLR4, CD80, OX40L, anti-CTLA-4, or a combination thereof). Rather, the administration in the present disclosure is a direct administration of at least one mRNAs encoding an immune response primer polypeptide, an immune response co-stimulatory signal polypeptide, a checkpoint inhibitor polypeptide, or a combination thereof disclosed herein (e.g., IL12, IL15, IL18, IL23, IL36gamma, TLR4, CD80, OX40L, anti-CTLA-4, or a combination thereof), or compositions comprising the at least one mRNAs encoding an immune response primer polypeptide, an immune response co-stimulatory signal polypeptide, a checkpoint inhibitor polypeptide, or a combination thereof disclosed herein (e.g., IL12, IL15, IL18, IL23, IL36gamma, TLR4, CD80, OX40L, anti-CTLA-4, or a combination thereof) to the subject (e.g., to a tumor in a subject).

[0662] In some embodiments, the polynucleotides (e.g., RNA, e.g., mRNA) comprising an ORF encoding a CD80 polypeptide or an Fc polypeptide are administered together with a polynucleotide (e.g., RNA, e.g., mRNA) comprising an ORF encoding an antibody or an antigen binding portion thereof which specifically binds to CTLA-4. In one embodiment, the antibody or antigen binding portion thereof is tremelimumab. In another embodiment, the antibody or antigen binding portion thereof is ipilimumab. In some embodiments, the compositions disclosed herein comprise (i) a polynucleotide comprising an ORF encoding a CD80 polypeptide or an Fc polypeptide and (ii) a polynucleotide (e.g., RNA, e.g., mRNA) comprising an ORF encoding an antibody or an antigen binding portion thereof which specifically binds to CTLA-4 in a single formulation or separate formulations.

[0663] In other embodiments, a polynucleotide (e.g., RNA, e.g., mRNA) comprising an ORF encoding a TLR4 polypeptide, e.g., a caTLR4 (e.g., the wild-type sequence, functional fragment, or variant thereof), is administered together with a polynucleotide (e.g., RNA, e.g., mRNA) comprising an ORF encoding an OX40L polypeptide in a single formulation or separate formulations.

[0664] In other embodiments, a polynucleotide (e.g., RNA, e.g., mRNA) comprising an ORF encoding a TLR4 polypeptide, e.g., a caTLR4, (e.g., the wild-type sequence, functional fragment, or variant thereof) is administered in combination with a polynucleotide (e.g., RNA, e.g., mRNA) comprising an ORF encoding an IL18 polypeptide in a single formulation or separate formulations.

[0665] In other embodiments, a polynucleotide (e.g., RNA, e.g., mRNA) comprising an ORF encoding a TLR4 polypeptide, e.g., a caTLR4 (e.g., the wild-type sequence, functional fragment, or variant thereof), is administered in combination with a polynucleotide (e.g., RNA, e.g., mRNA) comprising an ORF encoding an antibody or an antigen binding portion thereof which specifically binds to CTLA-4 in a single formulation or separate formulations.

[0666] In other embodiments, a polynucleotide (e.g., RNA, e.g., mRNA) comprising an ORF encoding a TLR4 polypeptide, e.g., a caTLR4 (e.g., the wild-type sequence, functional fragment, or variant thereof), is administered in combination with a polynucleotide (e.g., RNA, e.g., mRNA) comprising an ORF encoding an antibody or an antigen-binding portion thereof that specifically binds to a PD-1 or PD-L1 receptor in a single formulation or separate formulations.

[0667] In other embodiments, a polynucleotide (e.g., RNA, e.g., mRNA) comprising an ORF encoding a TLR4 polypeptide, e.g., a caTLR4 (e.g., the wild-type sequence, functional fragment, or variant thereof), is administered in combination with a polynucleotide comprising an ORF encoding an OX40L polypeptide; a polynucleotide (e.g., RNA, e.g., mRNA) comprising an ORF encoding an IL18 polypeptide; a polynucleotide (e.g., RNA, e.g., mRNA) comprising an ORF encoding an antibody or an antigen binding portion thereof which specifically binds to CTLA-4, or any combination thereof in a single formulation or separate formulations.

[0668] In other embodiments, a polynucleotide (e.g., RNA, e.g., mRNA) comprising an ORF encoding a TLR4 polypeptide, e.g., a caTLR4 (e.g., the wild-type sequence, functional fragment, or variant thereof). is administered in combination with a polynucleotide (e.g., RNA, e.g., mRNA) comprising an ORF encoding an OX40L polypeptide; a polynucleotide (e.g., RNA, e.g., mRNA) comprising an ORF encoding an IL18 polypeptide; a polynucleotide (e.g., RNA, e.g., mRNA) comprising an ORF encoding an antibody or an antigen-binding portion thereof that specifically binds to a PD-1 or PD-L1 receptor, or any combination thereof, in a single formulation or separate formulations.

[0669] In other embodiments, a polynucleotide (e.g., RNA, e.g., mRNA) comprising an ORF encoding a TLR4 polypeptide, e.g., a caTLR4 (e.g., the wild-type sequence, functional fragment, or variant thereof), is administered in combination with a polynucleotide (e.g., RNA, e.g., mRNA) comprising an ORF encoding an OX40L polypeptide; a polynucleotide comprising an ORF encoding an IL18 polypeptide; and a polynucleotide (e.g., RNA, e.g., mRNA) comprising an ORF encoding an antibody or an antigen binding portion thereof which specifically binds to CTLA-4 in a single formulation or separate formulations.

[0670] In other embodiments, a polynucleotide (e.g., RNA, e.g., mRNA) comprising an ORF encoding a TLR4 polypeptide, e.g., a caTLR4 (e.g., the wild-type sequence, functional fragment, or variant thereof), is administered in combination with a polynucleotide (e.g., RNA, e.g., mRNA) comprising an ORF encoding an OX40L polypeptide; a polynucleotide (e.g., RNA, e.g., mRNA) comprising an ORF encoding an IL18 polypeptide; and a polynucleotide (e.g., RNA, e.g., mRNA) comprising an ORF encoding an antibody or an antigen-binding portion thereof that specifically binds to a PD-1 or PD-L1 receptor in a single formulation or separate formulations.

[0671] In some embodiments, a polynucleotide (e.g., RNA, e.g., mRNA) comprising an ORF encoding a TLR4 polypeptide, e.g., a caTLR4 (e.g., the wild-type sequence, functional fragment, or variant thereof), is administered in combination with a polynucleotide (e.g., RNA, e.g., mRNA) comprising an ORF encoding an OX40L polypeptide in a single formulation or separate formulations.

[0672] In some embodiments, a polynucleotide (e.g., RNA, e.g., mRNA) comprising an ORF encoding a TLR4 polypeptide, e.g., a caTLR4 (e.g., the wild-type sequence, functional fragment, or variant thereof) is administered in combination with a polynucleotide (e.g., RNA, e.g., mRNA), comprising an ORF encoding an IL18 polypeptide in a single formulation or separate formulations.

[0673] In some embodiments, a polynucleotide (e.g., RNA, e.g., mRNA) comprising an ORF encoding a TLR4 polypeptide, e.g., a caTLR4 (e.g., the wild-type sequence, functional fragment, or variant thereof) is administered in combination with a polynucleotide (e.g., RNA, e.g., mRNA), comprising am ORF encoding an antibody or an antigen binding portion thereof which specifically binds to CTLA-4 in a single formulation or separate formulations.

[0674] In some embodiments, a polynucleotide (e.g., RNA, e.g., mRNA) comprising an ORF encoding a TLR4 polypeptide, e.g., a caTLR4 (e.g., the wild-type sequence, functional fragment, or variant thereof), is administered in combination with a polynucleotide (e.g., RNA, e.g., mRNA) comprising an ORF encoding an antibody or an antigen-binding portion thereof that specifically binds to a PD-1 or PD-L1 receptor in a single formulation or separate formulations.

[0675] In some embodiments, a polynucleotide (e.g., RNA, e.g., mRNA) comprising an ORF encoding a TLR4 polypeptide, e.g., a caTLR4 (e.g., the wild-type sequence, functional fragment, or variant thereof) is administered in combination with a polynucleotide (e.g., RNA, e.g., mRNA) comprising an ORF encoding an OX40L polypeptide, a polynucleotide (e.g., RNA, e.g., mRNA) comprising an ORF encoding an IL18 polypeptide, a polynucleotide (e.g., RNA, e.g., mRNA) comprising an ORF encoding an antibody or an antigen binding portion thereof which specifically binds to CTLA-4, or any combination thereof in a single formulation or separate formulations.

[0676] In some embodiments, a polynucleotide (e.g., RNA, e.g., mRNA) comprising an ORF encoding TLR4 polypeptide, e.g., a caTLR4 (e.g., the wild-type sequence, functional fragment, or variant thereof), is administered in combination with a polynucleotide (e.g., RNA, e.g., mRNA) comprising an ORF encoding an OX40L polypeptide, a polynucleotide (e.g., RNA, e.g., mRNA) comprising an ORF encoding an IL18 polypeptide, a polynucleotide (e.g., RNA, e.g., mRNA) comprising an ORF encoding an antibody or an antigen-binding portion thereof that specifically binds to a PD-1 or PD-L1 receptor, or any combination thereof in a single formulation or separate formulations.

[0677] In some embodiments, a polynucleotide (e.g., RNA, e.g., mRNA) comprising an ORF encoding a TLR4 polypeptide, e.g., a caTLR4 (e.g., the wild-type sequence, functional fragment, or variant thereof), is administered in combination with a polynucleotide (e.g., RNA, e.g., mRNA) comprising an ORF encoding an OX40L polypeptide; a polynucleotide (e.g., RNA, e.g., mRNA) comprising an ORF encoding an IL18 polypeptide; and a polynucleotide (e.g., RNA, e.g., mRNA) comprising an ORF encoding an antibody or an antigen binding portion thereof which specifically binds to CTLA-4 in a single formulation or separate formulations.

[0678] In some embodiments, a polynucleotide (e.g., RNA, e.g., mRNA) comprising an ORF encoding a TLR4 polypeptide, e.g., a caTLR4 (e.g., the wild-type sequence, functional fragment, or variant thereof), is administered in combination with a polynucleotide comprising an ORF encoding an OX40L polypeptide; a polynucleotide (e.g., RNA, e.g., mRNA) comprising an ORF encoding a polynucleotide (e.g., RNA, e.g., mRNA) encoding an IL18 polypeptide; and a polynucleotide (e.g., RNA, e.g., mRNA) comprising an ORF encoding an antibody or an antigen-binding portion thereof that specifically binds to a PD-1 or PD-L1 receptor in a single formulation or separate formulations.

[0679] In other embodiments, a polynucleotide (e.g., RNA, e.g., mRNA) comprising an ORF encoding an OX40L polypeptide (e.g., the wild-type sequence, functional fragment, or variant thereof) is administered in combination with a polynucleotide (e.g., RNA, e.g., mRNA) comprising an ORF encoding an IL12 polypeptide, a polynucleotide (e.g., RNA, e.g., mRNA) comprising an ORF encoding an IL23 polypeptide, a polynucleotide (e.g., RNA, e.g., mRNA) comprising an ORF encoding a caTLR4 polypeptide, a polynucleotide (e.g., RNA, e.g., mRNA) comprising an ORF encoding an IL18 polypeptide, a polynucleotide (e.g., RNA, e.g., mRNA) comprising an ORF encoding an antibody or an antigen binding portion thereof which specifically binds to CTLA-4, a polynucleotide (e.g., RNA, e.g., mRNA) comprising an encoding an antibody or antigen-binding portion thereof which specifically binds to a PD-1 receptor, a polynucleotide (e.g., RNA, e.g., mRNA) comprising an ORF encoding an antibody or antigen-binding portion thereof which specifically binds to a PD-L1 receptor, or any combination thereof in a single formulation or separate formulations.

[0680] In some embodiments, a polynucleotide (e.g., RNA, e.g., mRNA) comprising an ORF encoding an OX40L polypeptide (e.g., the wild-type sequence, functional fragment, or variant thereof) is administered in combination with a polynucleotide (e.g., RNA, e.g., mRNA) comprising an ORF encoding an IL12 polypeptide, in a single formulation or separate formulations.

[0681] In one embodiment, a polynucleotide (e.g., RNA, e.g., mRNA) comprising an ORF encoding an OX40L polypeptide (e.g., the wild-type sequence, functional fragment, or variant thereof) is administered in combination with a polynucleotide (e.g., RNA, e.g., mRNA) comprising an ORF encoding an IL23 polypeptide in a single formulation or separate formulations.

[0682] In another embodiment, a polynucleotide (e.g., RNA, e.g., mRNA) comprising an ORF encoding an OX40L polypeptide (e.g., the wild-type sequence, functional fragment, or variant thereof) is administered in combination with a polynucleotide (e.g., RNA, e.g., mRNA) comprising an ORF encoding an IL12 polypeptide and a polynucleotide (e.g., RNA, e.g., mRNA) comprising an ORF encoding an IL23 polypeptide, in a single formulation or separate formulations.

[0683] In other embodiments, a polynucleotide (e.g., RNA, e.g., mRNA) comprising an ORF encoding an OX40L polypeptide (e.g., the wild-type sequence, functional fragment, or variant thereof) is administered in combination with a polynucleotide (e.g., RNA, e.g., mRNA) comprising an ORF encoding a caTLR4 polypeptide, in a single formulation or separate formulations.

[0684] In other embodiments, a polynucleotide (e.g., RNA, e.g., mRNA) comprising an ORF encoding an OX40L polypeptide (e.g., the wild-type sequence, functional fragment, or variant thereof) is administered in combination with a polynucleotide (e.g., RNA, e.g., mRNA) comprising an ORF encoding an IL18 polypeptide, in a single formulation or separate formulations.

[0685] In other embodiments, a polynucleotide (e.g., RNA, e.g., mRNA) comprising an ORF encoding an OX40L polypeptide (e.g., the wild-type sequence, functional fragment, or variant thereof) is administered in combination with a polynucleotide (e.g., RNA, e.g., mRNA) comprising an ORF encoding an IL18 polypeptide and a polynucleotide encoding a caTLR4 polypeptide, in a single formulation or separate formulations.

[0686] In other embodiments, a polynucleotide (e.g., RNA, e.g., mRNA) comprising an ORF encoding an OX40L polypeptide (e.g., the wild-type sequence, functional fragment, or variant thereof) is administered in combination with a polynucleotide (e.g., RNA, e.g., mRNA) comprising an ORF encoding an antibody or an antigen binding portion thereof which specifically binds to CTLA-4, in a single formulation or separate formulations.

[0687] In other embodiments, a polynucleotide (e.g., RNA, e.g., mRNA) comprising an ORF encoding an OX40L polypeptide (e.g., the wild-type sequence, functional fragment, or variant thereof) is administered in combination with a polynucleotide (e.g., RNA, e.g., mRNA) comprising an ORF encoding an antibody or an antigen-binding portion thereof that specifically binds to a PD-1 or PD-L1 receptor, in a single formulation or separate formulations.

[0688] In other embodiments, a polynucleotide (e.g., RNA, e.g., mRNA) comprising an ORF encoding an OX40L polypeptide (e.g., the wild-type sequence, functional fragment, or variant thereof) is administered in combination with a polynucleotide (e.g., RNA, e.g., mRNA) comprising an ORF encoding an IL12 polypeptide, a polynucleotide (e.g., RNA, e.g., mRNA) comprising an ORF encoding an IL23 polypeptide, a polynucleotide (e.g., RNA, e.g., mRNA) comprising an ORF encoding an antibody or an antigen-binding portion thereof that specifically binds to a PD-1 or PD-L1 receptor, or any combination thereof, in a single formulation or separate formulations.

[0689] In other embodiments, a polynucleotide (e.g., RNA, e.g., mRNA) comprising an ORF encoding an OX40L polypeptide (e.g., the wild-type sequence, functional fragment, or variant thereof) is administered in combination with a polynucleotide (e.g., RNA, e.g., mRNA) comprising an ORF encoding an IL12 polypeptide, a polynucleotide (e.g., RNA, e.g., mRNA) comprising an ORF encoding an IL23 polypeptide, a polynucleotide (e.g., RNA, e.g., mRNA) comprising an ORF encoding an antibody or an antigen-binding portion thereof that specifically binds to a CTLA-4, or any combination thereof, in a single formulation or separate formulations.

[0690] In other embodiments, a polynucleotide (e.g., RNA, e.g., mRNA) comprising an ORF encoding an OX40L polypeptide (e.g., the wild-type sequence, functional fragment, or variant thereof) is administered in combination with a polynucleotide (e.g., RNA, e.g., mRNA) comprising an ORF encoding a caTLR4 polypeptide, a polynucleotide (e.g., RNA, e.g., mRNA) comprising an ORF encoding an IL18 polypeptide, a polynucleotide (e.g., RNA, e.g., mRNA) comprising an ORF encoding an antibody or an antigen-binding portion thereof that specifically binds to a PD-1 or PD-L1 receptor, or any combination thereof, in a single formulation or separate formulations.

[0691] In other embodiments, a polynucleotide (e.g., RNA, e.g., mRNA) comprising an ORF encoding an OX40L polypeptide (e.g., the wild-type sequence, functional fragment, or variant thereof) is administered in combination with a polynucleotide (e.g., RNA, e.g., mRNA) comprising an ORF encoding a caTLR4 polypeptide, a polynucleotide (e.g., RNA, e.g., mRNA) comprising an ORF encoding an IL18 polypeptide, a polynucleotide (e.g., RNA, e.g., mRNA) comprising an ORF encoding an antibody or an antigen-binding portion thereof that specifically binds to CTLA-4, or any combination thereof, in a single formulation or separate formulations.

[0692] In some embodiments, a polynucleotide (e.g., RNA, e.g., mRNA) comprising an ORF encoding an OX40L polypeptide (e.g., the wild-type sequence, functional fragment, or variant thereof) is administered in combination with a polynucleotide (e.g., RNA, e.g., mRNA) comprising an ORF encoding an IL12 polypeptide, a polynucleotide (e.g., RNA, e.g., mRNA) comprising an ORF encoding an IL23 polypeptide, a polynucleotide (e.g., RNA, e.g., mRNA) comprising an ORF encoding a caTLR4 polypeptide, a polynucleotide encoding an IL18 polypeptide, a polynucleotide (e.g., RNA, e.g., mRNA) comprising an ORF encoding an antibody or an antigen binding portion thereof which specifically binds to CTLA-4, a polynucleotide (e.g., RNA, e.g., mRNA) comprising an ORF encoding an antibody or antigen-binding portion thereof which specifically binds to a PD-1 receptor, a polynucleotide (e.g., RNA, e.g., mRNA) comprising an ORF encoding an antibody or antigen-binding portion thereof which specifically binds to a PD-L1 receptor, or any combination thereof, in a single formulation or separate formulations.

[0693] In some embodiments, a polynucleotide (e.g., RNA, e.g., mRNA) comprising an ORF encoding an OX40L polypeptide (e.g., the wild-type sequence, functional fragment, or variant thereof), is administered in combination with a polynucleotide (e.g., RNA, e.g., mRNA) comprising an ORF encoding an IL12 polypeptide in a single formulation or separate formulations.

[0694] In some embodiments, a polynucleotide (e.g., RNA, e.g., mRNA) comprising an ORF encoding an OX40L polypeptide (e.g., the wild-type sequence, functional fragment, or variant thereof), is administered in combination with a polynucleotide (e.g., RNA, e.g., mRNA) comprising an ORF encoding an IL23 polypeptide in a single formulation or separate formulations.

[0695] In some embodiments, a polynucleotide (e.g., RNA, e.g., mRNA) comprising an ORF encoding a polynucleotide encoding an OX40L polypeptide (e.g., the wild-type sequence, functional fragment, or variant thereof), is administered in combination with a polynucleotide (e.g., RNA, e.g., mRNA) comprising an ORF encoding an IL12 polypeptide, a polynucleotide (e.g., RNA, e.g., mRNA) comprising an ORF encoding an IL23 polypeptide, or any combination thereof, in a single formulation or separate formulations.

[0696] In some embodiments, a polynucleotide (e.g., RNA, e.g., mRNA) comprising an ORF encoding an OX40L polypeptide (e.g., the wild-type sequence, functional fragment, or variant thereof), is administered in combination with a polynucleotide (e.g., RNA, e.g., mRNA) comprising an ORF encoding a caTLR4 polypeptide in a single formulation or separate formulations.

[0697] In some embodiments, a polynucleotide (e.g., RNA, e.g., mRNA) comprising an ORF encoding a polynucleotide encoding an OX40L polypeptide (e.g., the wild-type sequence, functional fragment, or variant thereof), is administered in combination with a polynucleotide (e.g., RNA, e.g., mRNA) comprising an ORF encoding an IL18 polypeptide, in a single formulation or separate formulations.

[0698] In some embodiments, a polynucleotide (e.g., RNA, e.g., mRNA) comprising an ORF encoding an OX40L polypeptide (e.g., the wild-type sequence, functional fragment, or variant thereof), is administered in combination with a polynucleotide (e.g., RNA, e.g., mRNA) comprising an ORF encoding a caTLR4 polypeptide, a polynucleotide (e.g., RNA, e.g., mRNA) comprising an ORF encoding an IL18 polypeptide, or any combination thereof, in a single formulation or separate formulations.

[0699] In some embodiments, a polynucleotide (e.g., RNA, e.g., mRNA) comprising an ORF encoding a polynucleotide encoding an OX40L polypeptide (e.g., the wild-type sequence, functional fragment, or variant thereof), is administered in combination with a polynucleotide (e.g., RNA, e.g., mRNA) comprising an ORF encoding an antibody or an antigen binding portion thereof which specifically binds to CTLA-4, in a single formulation or separate formulations.

[0700] In some embodiments, a polynucleotide (e.g., RNA, e.g., mRNA) comprising an ORF encoding a polynucleotide encoding an OX40L polypeptide (e.g., the wild-type sequence, functional fragment, or variant thereof), is administered in combination with a polynucleotide (e.g., RNA, e.g., mRNA) comprising an ORF encoding an antibody or an antigen-binding portion thereof that specifically binds to a PD-1 or PD-L1 receptor, in a single formulation or separate formulations.

[0701] In some embodiments, a polynucleotide (e.g., RNA, e.g., mRNA) comprising an ORF encoding a polynucleotide encoding an OX40L polypeptide (e.g., the wild-type sequence, functional fragment, or variant thereof), is administered in combination with (i) a polynucleotide (e.g., RNA, e.g., mRNA)′comprising an ORF encoding an IL12 polypeptide, (ii) a polynucleotide (e.g., RNA, e.g., mRNA) comprising an ORF encoding an IL23 polypeptide, (iii) a polynucleotide (e.g., RNA, e.g., mRNA) comprising an ORF encoding an antibody or an antigen binding portion thereof which specifically binds to CTLA-4, or (iv) any combination thereof, in a single formulation or separate formulations.

[0702] In some embodiments, a polynucleotide (e.g., RNA, e.g., mRNA) comprising an ORF encoding a polynucleotide encoding an OX40L polypeptide (e.g., the wild-type sequence, functional fragment, or variant thereof), is administered in combination with (i) a polynucleotide (e.g., RNA, e.g., mRNA) comprising an ORF encoding an IL12 polypeptide, (ii) a polynucleotide (e.g., RNA, e.g., mRNA) comprising an ORF encoding an IL23 polypeptide, (iii) a polynucleotide (e.g., RNA, e.g., mRNA) comprising an ORF encoding an antibody or an antigen binding portion thereof which specifically binds to a PD-1 or PD-L1 receptor, or (iv) any combination thereof, in a single formulation or separate formulations.

[0703] In some embodiments, a polynucleotide (e.g., RNA, e.g., mRNA) comprising an ORF encoding a polynucleotide encoding an OX40L polypeptide (e.g., the wild-type sequence, functional fragment, or variant thereof), is administered in combination with (i) a polynucleotide (e.g., RNA, e.g., mRNA) comprising an ORF encoding a caTLR4 polypeptide, (ii) a polynucleotide (e.g., RNA, e.g., mRNA) comprising an ORF encoding an IL18 polypeptide, (iii) a polynucleotide (e.g., RNA, e.g., mRNA) comprising an ORF encoding an antibody or an antigen binding portion thereof which specifically binds to CTLA-4, or (iv) any combination thereof, in a single formulation or separate formulations.

[0704] In some embodiments, a polynucleotide (e.g., RNA, e.g., mRNA) comprising an ORF encoding a polynucleotide encoding an OX40L polypeptide (e.g., the wild-type sequence, functional fragment, or variant thereof), is administered in combination with (i) a polynucleotide (e.g., RNA, e.g., mRNA) comprising an ORF encoding a caTLR4 polypeptide, (ii) a polynucleotide (e.g., RNA, e.g., mRNA) comprising an ORF encoding an IL18 polypeptide, (iii) a polynucleotide (e.g., RNA, e.g., mRNA) comprising an ORF encoding an antibody or an antigen binding portion thereof which specifically binds to a PD-1 or PD-L1 receptor, or (iv) any combination thereof, in a single formulation or separate formulations.

[0705] In other embodiments, a polynucleotide (e.g., RNA, e.g., mRNA) comprising an ORF encoding an IL18 polypeptide is administered in combination with a polynucleotide (e.g., RNA, e.g., mRNA) comprising an ORF encoding an IL12 polypeptide or an IL23 polypeptide, in a single formulation or separate formulations.

[0706] In other embodiments, a polynucleotide (e.g., RNA, e.g., mRNA) comprising an ORF encoding an IL18 polypeptide, is administered in combination with a polynucleotide (e.g., RNA, e.g., mRNA) comprising an ORF encoding an IL23 in a single formulation or separate formulations.

[0707] In some embodiments, a polynucleotide (e.g., RNA, e.g., mRNA) comprising an ORF encoding an IL18 polypeptide, can be administered in combination with a polynucleotide (e.g., RNA, e.g., mRNA) comprising an ORF encoding an IL23 polypeptide, a polynucleotide (e.g., RNA, e.g., mRNA) comprising an ORF encoding an IL12 protein in a single formulation or separate formulations.

[0708] In other embodiments, a polynucleotide (e.g., RNA, e.g., mRNA) comprising an ORF encoding an IL18 polypeptide is administered in combination with a polynucleotide (e.g., RNA, e.g., mRNA) comprising an ORF encoding a caTLR4 polypeptide (e.g., the wild-type sequence, functional fragment, or variant thereof), in a single formulation or separate formulations.

[0709] In other embodiments, a polynucleotide (e.g., RNA, e.g., mRNA) comprising an ORF encoding an IL18 polypeptide is administered in combination with a polynucleotide (e.g., RNA, e.g., mRNA) comprising an ORF encoding an OX40L polypeptide, in a single formulation or separate formulations.

[0710] In other embodiments, a polynucleotide (e.g., RNA, e.g., mRNA) comprising an ORF encoding an IL18 polypeptide is administered in combination with a polynucleotide (e.g., RNA, e.g., mRNA) comprising an ORF encoding an antibody or an antigen binding portion thereof which specifically binds to CTLA-4, in a single formulation or separate formulations.

[0711] In other embodiments, a polynucleotide (e.g., RNA, e.g., mRNA) comprising an ORF encoding an IL18 polypeptide is administered in combination with a polynucleotide (e.g., RNA, e.g., mRNA) comprising an ORF encoding an antibody or an antigen-binding portion thereof that specifically binds to a PD-1 or PD-L1 receptor in a single formulation or separate formulations.

[0712] In other embodiments, a polynucleotide (e.g., RNA, e.g., mRNA) comprising an ORF encoding an IL18 polypeptide is administered in combination with a polynucleotide (e.g., RNA, e.g., mRNA) comprising an ORF encoding an IL12 polypeptide or an IL23 polypeptide; a polynucleotide (e.g., RNA, e.g., mRNA) comprising an ORF encoding a caTLR4 polypeptide (e.g., the wild-type sequence, functional fragment, or variant thereof); a polynucleotide (e.g., RNA, e.g., mRNA) comprising an ORF encoding an OX40L polypeptide; a polynucleotide (e.g., RNA, e.g., mRNA) comprising an ORF encoding an antibody or an antigen binding portion thereof which specifically binds to CTLA-4; and a polynucleotide (e.g., RNA, e.g., mRNA) comprising an ORF encoding an antibody or an antigen-binding portion thereof that specifically binds to a PD-1 or PD-L1 receptor, or any combination thereof in a single formulation or separate formulations.

[0713] In some embodiments, a polynucleotide (e.g., RNA, e.g., mRNA) comprising an ORF encoding an IL18 polypeptide, is administered in combination with (i) a polynucleotide (e.g., RNA, e.g., mRNA) comprising an ORF encoding an IL12 polypeptide in a single formulation; (ii) a polynucleotide (e.g., RNA, e.g., mRNA) comprising an ORF encoding an IL18 polypeptide, and a polynucleotide (e.g., RNA, e.g., mRNA) comprising an ORF encoding an IL23 protein in a single formulation; or (iii) a polynucleotide (e.g., RNA, e.g., mRNA) comprising an ORF encoding an IL18 polypeptide, and both a polynucleotide (e.g., RNA, e.g., mRNA) comprising an ORF encoding an IL12 polypeptide and a polynucleotide (e.g., RNA, e.g., mRNA) comprising an ORF encoding an IL23 polypeptide in a single formulation or separate formulations.

[0714] In some embodiments, a polynucleotide (e.g., RNA, e.g., mRNA) comprising an ORF encoding an IL18 polypeptide, is administered in combination with a polynucleotide (e.g., RNA, e.g., mRNA) comprising an ORF encoding a caTLR4 polypeptide (e.g., the wild-type sequence, functional fragment, or variant thereof) in a single formulation or separate formulations.

[0715] In some embodiments, a polynucleotide (e.g., RNA, e.g., mRNA) comprising an ORF encoding an IL18 polypeptide, is administered in combination with a polynucleotide (e.g., RNA, e.g., mRNA) comprising an ORF encoding an OX40L polypeptide in a single formulation or separate formulations.

[0716] In some embodiments, a polynucleotide (e.g., RNA, e.g., mRNA) comprising an ORF encoding an IL18 polypeptide, is administered in combination with a polynucleotide (e.g., RNA, e.g., mRNA) comprising an ORF encoding an antibody or an antigen binding portion thereof which specifically binds to CTLA-4 in a single formulation or separate formulations.

[0717] In some embodiments, a polynucleotide (e.g., RNA, e.g., mRNA) comprising an ORF encoding an IL18 polypeptide, is administered in combination with a polynucleotide (e.g., RNA, e.g., mRNA) comprising an ORF encoding an antibody or an antigen-binding portion thereof that specifically binds to a PD-1 or PD-L1 receptor in a single formulation or separate formulations.

[0718] In some embodiments, a polynucleotide (e.g., RNA, e.g., mRNA) comprising an ORF encoding an IL18 polypeptide, is administered in combination with a polynucleotide (e.g., RNA, e.g., mRNA) comprising an ORF encoding an IL12 polypeptide or an IL23 polypeptide; a polynucleotide (e.g., RNA, e.g., mRNA) comprising an ORF encoding a caTLR4 polypeptide (e.g., the wild-type sequence, functional fragment, or variant thereof); a polynucleotide (e.g., RNA, e.g., mRNA) comprising an ORF encoding an OX40L polypeptide; a polynucleotide (e.g., RNA, e.g., mRNA) comprising an ORF encoding an antibody or an antigen binding portion thereof which specifically binds to CTLA-4; a polynucleotide encoding an antibody or an antigen-binding portion thereof that specifically binds to a PD-1 or PD-L1 receptor, or any combination thereof in a single formulation or separate formulations.

[0719] In other embodiments, a polynucleotides (e.g., RNA, e.g., mRNA) comprising an ORF encoding an IL12B and/or IL23A polypeptide (e.g., IL23) is administered in combination with a polynucleotide (e.g., RNA, e.g., mRNA) comprising an ORF encoding an IL12 polypeptide or with a polynucleotide (e.g., RNA, e.g., mRNA) comprising an ORF encoding an IL18 polypeptide, in a single formulation or separate formulations.

[0720] In other embodiments, a polynucleotide (e.g., RNA, e.g., mRNA) comprising an ORF encoding an IL18 polypeptide, is administered in combination with a polynucleotide (e.g., RNA, e.g., mRNA) comprising an ORF encoding an IL12B and/or IL23A protein (e.g., IL23), and another anti-cancer agent, in a single formulation or separate formulations.

[0721] In some embodiments, a polynucleotide (e.g., RNA, e.g., mRNA) comprising an ORF encoding an IL18 polypeptide, is administered in combination with a polynucleotide (e.g., RNA, e.g., mRNA) comprising an ORF encoding an IL23 protein, a polynucleotide (e.g., RNA, e.g., mRNA) comprising an ORF encoding an IL12 protein, and an anti-cancer agent, in a single formulation or separate formulations.

[0722] In other embodiments, a polynucleotides (e.g., RNA, e.g., mRNA) comprising an ORF encoding an IL12B and/or IL23A polypeptide (e.g., IL23) is administered in combination with a polynucleotide (e.g., RNA, e.g., mRNA) comprising an ORF encoding an OX40L polypeptide, in a single formulation or separate formulations.

[0723] In other embodiments, the polynucleotide (e.g., RNA, e.g., mRNA) encoding an IL12B and/or IL23A polypeptide (e.g., IL23) is administered in combination with a polynucleotide encoding an antibody or an antigen binding portion thereof which specifically binds to CTLA-4 in a single formulation or separate formulations.

[0724] In other embodiments, a polynucleotide (e.g., RNA, e.g., mRNA) comprising an ORF encoding an IL12B and/or IL23A polypeptide (e.g., IL23) is administered in combination with a polynucleotide (e.g., RNA, e.g., mRNA) comprising an ORF encoding an OX40L polypeptide; a polynucleotide (e.g., RNA, e.g., mRNA) comprising an ORF encoding an IL12 protein or an IL18 protein; a polynucleotide (e.g., RNA, e.g., mRNA) comprising an ORF encoding an antibody or an antigen binding portion thereof which specifically binds to CTLA-4, or any combination thereof in a single formulation or separate formulations.

[0725] In other embodiments, a polynucleotide (e.g., RNA, e.g., mRNA) comprising an ORF encoding an IL12B and/or IL23A polypeptide (e.g., IL23) is administered in combination with a polynucleotide (e.g., RNA, e.g., mRNA) comprising an ORF encoding an OX40L protein; a polynucleotide (e.g., RNA, e.g., mRNA) comprising an ORF encoding an IL12 protein or an IL18 protein; and a polynucleotide (e.g., RNA, e.g., mRNA) comprising an ORF encoding an antibody or an antigen binding portion thereof which specifically binds to CTLA-4 in a single formulation or separate formulations.

[0726] In some embodiments, a polynucleotide (e.g., RNA, e.g., mRNA) comprising an ORF encoding an IL12B and/or IL23A polypeptide (e.g., IL23) is administered in combination with a polynucleotide (e.g., RNA, e.g., mRNA) comprising an ORF encoding an OX40L polypeptide in a single formulation or separate formulations.

[0727] In some embodiments, a polynucleotide (e.g., RNA, e.g., mRNA) comprising an ORF encoding an IL12B and/or IL23A polypeptide (e.g., IL23) is administered in combination with a polynucleotide (e.g., RNA, e.g., mRNA) comprising an ORF encoding an IL18 polypeptide in a single formulation or separate formulations.

[0728] In some embodiments, a polynucleotide (e.g., RNA, e.g., mRNA) comprising an ORF encoding an IL12B and/or IL23A polypeptide (e.g., IL23) is administered in combination with a polynucleotide (e.g., RNA, e.g., mRNA) comprising an ORF encoding an IL12 in a single formulation or separate formulations.

[0729] In some embodiments, a polynucleotide (e.g., RNA, e.g., mRNA) comprising an ORF encoding an IL12B and/or IL23A polypeptide (e.g., IL23) is administered in combination with both a polynucleotide (e.g., RNA, e.g., mRNA) comprising an ORF encoding an IL18 polypeptide and an polynucleotide (e.g., RNA, e.g., mRNA) comprising an ORF encoding an IL12 polypeptide in a single formulation or separate formulations.

[0730] In some embodiments, a polynucleotide (e.g., RNA, e.g., mRNA) comprising an ORF encoding an IL12B and/or IL23A polypeptide (e.g., IL23), is administered in combination with a polynucleotide (e.g., RNA, e.g., mRNA) comprising an ORF encoding an antibody or an antigen binding portion thereof which specifically binds to CTLA-4 in a single formulation or separate formulations.

[0731] In some embodiments, a polynucleotide (e.g., RNA, e.g., mRNA) comprising an ORF encoding IL12B and/or IL23A polypeptide (e.g., IL23) is administered in combination with a polynucleotide (e.g., RNA, e.g., mRNA) comprising an ORF encoding an OX40L polypeptide; a polynucleotide (e.g., RNA, e.g., mRNA) comprising an ORF encoding an IL12 polypeptide, a polynucleotide (e.g., RNA, e.g., mRNA) comprising an ORF encoding an IL18 polypeptide, a polynucleotide (e.g., RNA, e.g., mRNA) comprising an ORF encoding a TLR4 (e.g., caTLR4) polypeptide, a polynucleotide (e.g., RNA, e.g., mRNA) comprising an ORF encoding an antibody or an antigen binding portion thereof which specifically binds to CTLA-4; or any combination thereof in a single formulation or separate formulations.

[0732] In some embodiments, a polynucleotide (e.g., RNA, e.g., mRNA) comprising an ORF encoding an IL12B and/or IL23A polypeptide; is administered in combination with a polynucleotide (e.g., RNA, e.g., mRNA) comprising an ORF encoding an OX40L polypeptide; a polynucleotide (e.g., RNA, e.g., mRNA) comprising an ORF encoding an IL12 polypeptide or a polynucleotide (e.g., RNA, e.g., mRNA) comprising an ORF encoding an IL18 protein; a polynucleotide (e.g., RNA, e.g., mRNA) comprising an ORF encoding an antibody or an antigen binding portion thereof which specifically binds to CTLA-4, or any combination thereof in a single formulation or separate formulations.

[0733] In some embodiments, a polynucleotide (e.g., RNA, e.g., mRNA) comprising an ORF encoding an IL12B and/or IL23A polypeptide (e.g., IL23); is administered in combination with a polynucleotide (e.g., RNA, e.g., mRNA) comprising an ORF encoding an OX40L polypeptide; a polynucleotide (e.g., RNA, e.g., mRNA) comprising an ORF encoding an IL12 polypeptide or a polynucleotide (e.g., RNA, e.g., mRNA) comprising an ORF encoding an IL18 polypeptide; and a polynucleotide (e.g., RNA, e.g., mRNA) comprising an ORF encoding an antibody or an antigen binding portion thereof which specifically binds to CTLA-4 in a single formulation or separate formulations.

[0734] In some embodiments, a polynucleotide (e.g., RNA, e.g., mRNA) comprising an ORF encoding an IL12 polypeptide, is administered in combination with an antibody or an antigen binding portion thereof that specifically binds to PD-1, e.g., an anti-PD-1 monoclonal antibody, e.g., an anti-PD-1 monoclonal antibody comprises Nivolumab, Pembrolizumab, Pidilizumab, or any combination thereof, in a single formulation or separate formulations.

[0735] In some embodiments, a polynucleotide (e.g., RNA, e.g., mRNA) comprising an ORF encoding an IL12 polypeptide, is administered in combination with a CTLA-4 antagonist, e.g., an antibody or antigen-binding portion thereof that specifically binds to CTLA-4, e.g., an anti-CTLA-4 monoclonal antibody, e.g., an anti-CTLA-4 monoclonal antibody comprises Ipilimumab or Tremelimumab, or any combination thereof in a single formulation or separate formulations.

[0736] In some embodiments, a polynucleotide (e.g., RNA, e.g., mRNA) comprising an ORF encoding a CD80 polypeptide, e.g., CD80Fc, is administered in combination with a polynucleotide (e.g., RNA, e.g., mRNA) comprising an ORF encoding an antibody or an antigen binding portion thereof which specifically binds to CTLA-4 in a single formulation or separate formulations.

[0737] In one embodiment, a first polynucleotide (e.g., RNA, e.g., mRNA) comprising an ORF encoding IL12 is administered in combination with a second polynucleotide (e.g., RNA, e.g., mRNA) comprising an ORF encoding an OX40L polypeptide, in a single formulation or separate formulations.

[0738] In one embodiment, a first polynucleotide (e.g., RNA, e.g., mRNA) comprising an ORF encoding an IL12 polypeptide and a second polynucleotide (e.g., RNA, e.g., mRNA) comprising an ORF encoding an OX40L polypeptide are administered in combination with an antibody or an antigen-binding portion thereof that specifically binds to a PD-1 or PD-L1 receptor or a polynucleotide encoding the same, in a single formulation or separate formulations.

[0739] In another embodiment, a first polynucleotide (e.g., RNA, e.g., mRNA) comprising an ORF encoding an IL12 polypeptide and a second polynucleotide (e.g., RNA, e.g., mRNA) comprising an ORF encoding an OX40L polypeptide are administered in combination with an antibody or an antigen-binding portion thereof that specifically binds to a CTLA-4 or a polynucleotide encoding the same, in a single formulation or separate formulations.

[0740] In yet another embodiment, a first polynucleotide (e.g., RNA, e.g., mRNA) comprising an ORF encoding an IL12 polypeptide and a second polynucleotide (e.g., RNA, e.g., mRNA) comprising an ORF encoding an OX40L polypeptide are administered in combination with an antibody or an antigen-binding portion thereof that specifically binds to a PD-1 or PD-L1 receptor and an antibody or an antigen-binding portion thereof that specifically binds to a CTLA-4 (or polynucleotides of the same), in a single formulation or separate formulations.

[0741] In some embodiments, a polynucleotide (e.g., RNA, e.g., mRNA) comprising an ORF encoding IL12 is administered in combination with a polynucleotide (e.g., RNA, e.g., mRNA) comprising an ORF encoding an antibody or an antigen binding portion thereof which specifically binds to CTLA-4 in a single formulation or separate formulations.

[0742] In some embodiments, a polynucleotide (e.g., RNA, e.g., mRNA) comprising an ORF encoding IL12 is administered in combination with a polynucleotide (e.g., RNA, e.g., mRNA) comprising an ORF encoding an OX40L protein in a single formulation or separate formulations.

[0743] In some embodiments, a polynucleotide (e.g., RNA, e.g., mRNA) comprising an ORF encoding an antibody or an antigen binding portion thereof which specifically binds to CTLA-4 is administered in combination with a polynucleotide (e.g., RNA, e.g., mRNA) comprising an ORF encoding an OX40L protein, in a single formulation or separate formulations.

[0744] In other embodiments, a polynucleotide (e.g., RNA, e.g., mRNA) comprising an ORF encoding an antibody or an antigen binding portion thereof which specifically binds to CTLA-4 is administered in combination with a polynucleotide (e.g., RNA, e.g., mRNA) comprising an ORF encoding an IL18 polypeptide, in a single formulation or separate formulations.

[0745] In other embodiments, a polynucleotide (e.g., RNA, e.g., mRNA) comprising an ORF encoding an antibody or an antigen binding portion thereof which specifically binds to CTLA-4 is administered in combination with a polynucleotide (e.g., RNA, e.g., mRNA) comprising an ORF encoding an IL12B polypeptide, IL12A polypeptide, or both IL12B and IL12A polypeptides, in a single formulation or separate formulations.

[0746] In other embodiments, a polynucleotide (e.g., RNA, e.g., mRNA) comprising an ORF encoding an antibody or an antigen binding portion thereof which specifically binds to CTLA-4 is administered in combination with a polynucleotide (e.g., RNA, e.g., mRNA) comprising an ORF encoding an IL12B and/or IL23A polypeptide, in a single formulation or separate formulations.

[0747] In other embodiments, a polynucleotide (e.g., RNA, e.g., mRNA) comprising an ORF encoding an antibody or an antigen binding portion thereof which specifically binds to CTLA-4 is administered in combination with a polynucleotide (e.g., RNA, e.g., mRNA) comprising an ORF encoding a caTLR4 polypeptide (e.g., the wild-type sequence, functional fragment, or variant thereof), in a single formulation or separate formulations.

[0748] In other embodiments, a polynucleotide (e.g., RNA, e.g., mRNA) comprising an ORF encoding an antibody or an antigen binding portion thereof which specifically binds to CTLA-4 is administered in combination with a polynucleotide (e.g., RNA, e.g., mRNA) comprising an ORF encoding an OX40L protein; a polynucleotide (e.g., RNA, e.g., mRNA) comprising an ORF encoding an IL18 polypeptide; a polynucleotide (e.g., RNA, e.g., mRNA) comprising an ORF encoding an IL12B polypeptide, IL12A polypeptide, or both IL12B and IL12A polypeptides; a polynucleotide (e.g., RNA, e.g., mRNA) comprising an ORF encoding an IL12B and/or IL23A polypeptide; a polynucleotide (e.g., RNA, e.g., mRNA) comprising an ORF encoding a caTLR4 polypeptide (e.g., the wild-type sequence, functional fragment, or variant thereof), or any combination thereof, in a single formulation or separate formulations.

[0749] In some embodiments, a polynucleotide (e.g., RNA, e.g., mRNA) comprising an ORF encoding an antibody or an antigen binding portion thereof which specifically binds to CTLA-4, is administered in combination with a polynucleotide (e.g., RNA, e.g., mRNA) comprising an ORF encoding an OX40L protein in a single formulation or separate formulations.

[0750] In some embodiments, a polynucleotide (e.g., RNA, e.g., mRNA) comprising an ORF encoding an antibody or an antigen binding portion thereof which specifically binds to CTLA-4, is administered in combination with a polynucleotide (e.g., RNA, e.g., mRNA) comprising an ORF encoding an IL18 polypeptide in a single formulation or separate formulations.

[0751] In some embodiments, a polynucleotide (e.g., RNA, e.g., mRNA) comprising an ORF encoding an antibody or an antigen binding portion thereof which specifically binds to CTLA-4, is administered in combination with a polynucleotide (e.g., RNA, e.g., mRNA) comprising an ORF encoding an IL12B polypeptide, IL12A polypeptide, or both IL12B and IL12A polypeptides in a single formulation or separate formulations.

[0752] In some embodiments, a polynucleotide (e.g., RNA, e.g., mRNA) comprising an ORF encoding an antibody or an antigen binding portion thereof which specifically binds to CTLA-4, is administered in combination with a polynucleotide (e.g., RNA, e.g., mRNA) comprising an ORF encoding an IL12B and/or IL23A polypeptide in a single formulation or separate formulations.

[0753] In some embodiments, a polynucleotide (e.g., RNA, e.g., mRNA) comprising an ORF encoding an antibody or an antigen binding portion thereof which specifically binds to CTLA-4, is administered in combination with encoding a polynucleotide (e.g., RNA, e.g., mRNA) comprising an ORF encoding a caTLR4 polypeptide (e.g., the wild-type sequence, functional fragment, or variant thereof) in a single formulation or separate formulations.

[0754] In some embodiments, a polynucleotide (e.g., RNA, e.g., mRNA) comprising an ORF encoding an antibody or an antigen binding portion thereof which specifically binds to CTLA-4; is administered in combination with a polynucleotide (e.g., RNA, e.g., mRNA) comprising an ORF encoding an OX40L protein; a polynucleotide (e.g., RNA, e.g., mRNA) comprising an ORF encoding an IL18 polypeptide; a polynucleotide (e.g., RNA, e.g., mRNA) comprising an ORF encoding an IL12B polypeptide, IL12A polypeptide, or both IL12B and IL12A polypeptides; a polynucleotide (e.g., RNA, e.g., mRNA) comprising an ORF encoding an IL12B and/or IL23A polypeptide (e.g., IL23); a polynucleotide (e.g., RNA, e.g., mRNA) comprising an ORF encoding a caTLR4 polypeptide (e.g., the wild-type sequence, functional fragment, or variant thereof), or any combination thereof in a single formulation or separate formulations.

[0755] In another embodiment, a first polynucleotide (e.g., RNA, e.g., mRNA) comprising an ORF encoding IL12 and a second polynucleotide (e.g., RNA, e.g., mRNA) comprising an ORF encoding an OX40L polypeptide are administered in combination with an antibody or an antigen-binding portion thereof which specifically binds to CTLA-4, an antibody or antigen-binding portion thereof which specifically binds to a PD-1 receptor, or an antibody or antigen-binding portion thereof which specifically binds to a PD-L1 receptor, in a single formulation or separate formulations.

[0756] In one embodiment, the anti-PD-1 antibody (or an antigen-binding portion thereof) useful for the disclosure is pembrolizumab. Pembrolizumab (also known as “KEYTRUDA®”, lambrolizumab, and MK-3475) is a humanized monoclonal IgG4 antibody directed against human cell surface receptor PD-1 (programmed death-1 or programmed cell death-1). Pembrolizumab is described, for example, in U.S. Pat. No. 8,900,587. Pembrolizumab has been approved by the FDA for the treatment of relapsed or refractory melanoma and advanced NSCLC.

[0757] In another embodiment, the anti-PD-1 antibody useful for the disclosure is nivolumab. Nivolumab (also known as “OPDIVO®”; formerly designated 5C4, BMS-936558, MDX-1106, or ONO-4538) is a fully human IgG4 (S228P) PD-1 immune checkpoint inhibitor antibody that selectively prevents interaction with PD-1 ligands (PD-L1 and PD-L2), thereby blocking the down-regulation of antitumor T-cell functions (U.S. Pat. No. 8,008,449; Wang et al., 2014 Cancer Immunol Res. 2(9):846-56). Nivolumab has shown activity in a variety of advanced solid tumors including renal cell carcinoma (renal adenocarcinoma, or hypernephroma), melanoma, and non-small cell lung cancer (NSCLC) (Topalian et al., 2012a; Topalian et al., 2014; Drake et al., 2013; WO 2013/173223.

[0758] In other embodiments, the anti-PD-1 antibody is MEDI0680 (formerly AMP-514), which is a monoclonal antibody against the PD-1 receptor. MED10680 is described, for example, in U.S. Pat. No. 8,609,089B2.

[0759] In certain embodiments, the anti-PD-1 antibody is BGB-A317, which is a humanized monoclonal antibody. BGB-A317 is described in U.S. Publ. No. 2015/0079109.

[0760] In certain embodiments, a PD-1 antagonist is AMP-224, which is a B7-DC Fc fusion protein. AMP-224 is discussed in U.S. Publ. No. 2013/0017199.

[0761] An exemplary clinical anti-CTLA-4 antibody is the human mAb 1ODI (now known as ipilimumab and marketed as YERVOY®) as disclosed in U.S. Pat. No. 6,984,720. Another anti-CTLA-4 antibody useful for the present methods is tremelimumab (also known as CP-675,206). Tremelimumab is human IgG2 monoclonal anti-CTLA-4 antibody. Tremelimumab is described in WO/2012/122444, U.S. Publ. No. 2012/263677, or WO Publ. No. 2007/113648 A2.

[0762] As disclosed above, the combination therapies disclosed herein (e.g., at least two polynucleotides, wherein each polynucleotide comprises an ORF encoding an immune response primer polypeptide, an immune response co-stimulatory signal polypeptide, or an a checkpoint inhibitor polypeptide) can be used to prevent and/or treat cancers, i.e., it can have prophylactic as well as therapeutic uses. Accordingly, the disclosure provides methods of reducing the size of a tumor or inhibiting the growth of a tumor in a subject in need thereof comprising administering to said subject a combination therapy disclosed herein (e.g., at least two polynucleotides, wherein each polynucleotide comprises an ORF encoding an immune response primer polypeptide, an immune response co-stimulatory signal polypeptide, or an a checkpoint inhibitor polypeptide).

[0763] The present disclosure also includes a method of inducing a memory T cells response in a subject in need thereof comprising administering, e.g., administering intratumorally, a combination therapy disclosed herein (e.g., at least two polynucleotides, wherein each polynucleotide comprises an ORF encoding an immune response primer polypeptide, an immune response co-stimulatory signal polypeptide, or an a checkpoint inhibitor polypeptide). In one embodiment, the increase in immunokine production in the subject is directed to an anti-tumor immune response in the subject. In another embodiment, the increase in immunokine production is at least about two-fold, at least about three-fold, at least about four-fold, at least about five-fold, or at least about six-fold higher than a control (e.g., PBS treated). In certain embodiments, the intratumoral administration of the combination therapy can increase the efficacy of the anti-tumor effect (e.g., memory T cell response) compared to other routes of administration.

[0764] The present disclosure also includes a method of inducing T cell proliferation in a subject in need thereof comprising administering, e.g., administering intratumorally, a combination therapy disclosed herein (e.g., at least two polynucleotides, wherein each polynucleotide comprises an ORF encoding an immune response primer polypeptide, an immune response co-stimulatory signal polypeptide, or an a checkpoint inhibitor polypeptide). In certain embodiments, the intratumoral administration of the combination therapy can increase the efficacy of the anti-tumor effect (e.g., T cell proliferation) compared to other routes of administration. In one embodiment, the T cell proliferation in the subject is directed to an anti-tumor immune response in the subject. In another embodiment, the T cell proliferation in the subject reduces or decreases the size of a tumor or inhibits the growth of a tumor in the subject. T cell proliferation can be measured using applications in the art such as cell counting, viability staining, optical density assays, or detection of cell-surface markers associated with T cell activation (e.g., CD69, CD40L, CD137, CD25, CD71, CD26, CD27, CD28, CD30, CD154, and CD134) with techniques such as flow cytometry.

[0765] The present disclosure also provides a method of activating T cells in a subject in need thereof comprising administering e.g., administering intratumorally, to the subject a combination therapy disclosed herein (e.g., at least two polynucleotides, wherein each polynucleotide comprises an ORF encoding an immune response primer polypeptide, an immune response co-stimulatory signal polypeptide, or an a checkpoint inhibitor polypeptide). In one aspect, the activation of T cells in the subject is directed to an anti-tumor immune response in the subject. In another aspect, the activated T cells in the subject reduce or decrease the size of a tumor or inhibit the growth of a tumor in the subject. Activation of T cells can be measured using applications in the art such as measuring T cell proliferation; measuring cytokine production with enzyme-linked immunosorbant assays (ELISA) or enzyme-linked immunospot assays (ELISPOT); or detection of cell-surface markers associated with T cell activation (e.g., CD69, CD40L, CD137, CD25, CD71, CD26, CD27, CD28, CD30, CD154, and CD134) with techniques such as flow cytometry. In certain embodiments, the intratumoral administration of the combination therapy can increase the efficacy of the anti-tumor effect (e.g., T cell activation) compared to other routes of administration.

[0766] In certain embodiments, the activated T cells by the present methods or compositions are CD4⁺ cells, CD8⁺ cells, CD62⁺ (L-selectin⁺) cells, CD69⁺ cells, CD40L⁺ cells, CD137⁺ cells, CD25⁺ cells, CD71⁺ cells, CD26⁺ cells, CD27⁺ cells, CD28⁺ cells, CD30 cells, CD45⁺ cells, CD45RA+ cells, CD45RO⁺ cells, CD11b⁺ cells, CD154⁺ cells, CD134⁺ cells, CXCR3⁺ cells, CCR4⁺ cells, CCR6⁺ cells, CCR7⁺ cells, CXCR5⁺ cells, Crth2⁺ cells, gamma delta T cells, or any combination thereof. In some embodiments, the activated T cells by the present methods or compositions are Th₁ cells. In other embodiments, the T cells activated by the present methods or compositions are Th₂ cells. In other embodiments, the T cells activated by the present disclosure are cytotoxic T cells.

[0767] In other embodiments, the present disclosure provides a method of inducing T cell infiltration in a tumor of a subject in need thereof comprising administering to the subject a combination therapy disclosed herein (e.g., at least two polynucleotides, wherein each polynucleotide comprises an ORF encoding an immune response primer polypeptide, an immune response co-stimulatory signal polypeptide, or an a checkpoint inhibitor polypeptide). In one embodiment, the T cell infiltration in a tumor of the subject is directed to an anti-tumor immune response in the subject. In another embodiment, the T cell infiltration in a tumor of the subject reduces or decreases the size of a tumor or inhibits the growth of a tumor in the subject. T cell infiltration in a tumor can be measured using applications in the art such as tissue sectioning and staining for cell markers, measuring local cytokine production at the tumor site, or detection of T cell-surface markers with techniques such as flow cytometry.

[0768] In some embodiments, the infiltrating T cells by the present methods or compositions are CD4⁺ cells, CD8⁺ cells, CD62⁺ (L-selectin⁺) cells, CD69⁺ cells, CD40L⁺ cells, CD137⁺ cells, CD25⁺ cells, CD71⁺ cells, CD26⁺ cells, CD27⁺ cells, CD28⁺ cells, CD30⁺ cells, CD45⁺ cells, CD45RA⁺ cells, CD45RO⁺ cells, CD11b⁺ cells, CD154⁺ cells, CD134⁺ cells, CXCR3⁺ cells, CCR4⁺ cells, CCR6⁺ cells, CCR7⁺ cells, CXCR5⁺ cells, Crth2⁺ cells, gamma delta T cells, or any combination thereof. In some embodiments, the infiltrating T cells by the present methods or compositions are Th₁ cells. In other embodiments, the infiltrating T cells by the present methods or compositions are Th₂ cells. In other embodiments, the infiltrating T cells by the present disclosure are cytotoxic T cells.

[0769] In other embodiments, the present disclosures provides a method of inducing a memory T cell response in a subject in need thereof comprising administering to the subject a combination therapy disclosed herein (e.g., at least two polynucleotides, wherein each polynucleotide comprises an ORF encoding an immune response primer polypeptide, an immune response co-stimulatory signal polypeptide, or an a checkpoint inhibitor polypeptide). In one embodiment, the memory T cell response in the subject is directed to an anti-tumor immune response in the subject. In another embodiment, the memory T cell response in the subject reduces or decreases the size of a tumor or inhibits the growth of a tumor in the subject. A memory T cell response can be measured using applications in the art such as measuring T cell markers associated with memory T cells, measuring local cytokine production related to memory immune response, or detecting memory T cell-surface markers with techniques such as flow cytometry.

[0770] In some embodiments, the memory T cells induced by the present methods or compositions are CD4⁺ cells, CD8⁺ cells, CD62⁺ (L-selectin⁺) cells, CD69⁺ cells, CD40L⁺ cells, CD137⁺ cells, CD25⁺ cells, CD71⁺ cells, CD26⁺ cells, CD27⁺ cells, CD28⁺ cells, CD30 cells, CD45⁺ cells, CD45RA⁺ cells, CD45RO⁺ cells, CD11b⁺ cells, CD154⁺ cells, CD134⁺ cells, CXCR3⁺ cells, CCR4⁺ cells, CCR6⁺ cells, CCR7⁺ cells, CXCR5⁺ cells, Crth2⁺ cells, gamma delta T cells, or any combination thereof. In some embodiments, the memory T cells by the present methods or compositions are Th₁ cells. In other embodiments, the memory T cells by the present methods or compositions are Th₂ cells. In other embodiments, the memory T cells by the present disclosure are cytotoxic T cells.

[0771] The present disclosure further provides a method of increasing the number of Natural Killer (NK) cells in a subject in need thereof comprising administering to the subject a combination therapy disclosed herein (e.g., at least two polynucleotides, wherein each polynucleotide comprises an ORF encoding an immune response primer polypeptide, an immune response co-stimulatory signal polypeptide, or an a checkpoint inhibitor polypeptide). In one embodiment, the increase in the number of NK cells in the subject is directed to an anti-tumor immune response in the subject. In another aspect, the increase in the number of NK cells in the subject reduces or decreases the size of a tumor or inhibits the growth of a tumor in the subject. Increases in the number of NK cells in a subject can be measured using applications in the art such as detection of NK cell-surface markers (e.g., CD335/NKp46; CD336/NKp44; CD337/NPp3O) or intracellular NK cell markers (e.g., perform; granzymes; granulysin).

[0772] In certain embodiments, administration of a combination therapy disclosed herein (e.g., at least two polynucleotides, wherein each polynucleotide comprises an ORF encoding an immune response primer polypeptide, an immune response co-stimulatory signal polypeptide, or an a checkpoint inhibitor polypeptide) increases the total number of NK cells in the subject compared to the number of NK cells in a subject who is not administered with a combination therapy disclosed herein (e.g., at least two polynucleotides, wherein each polynucleotide comprises an ORF encoding an immune response primer polypeptide, an immune response co-stimulatory signal polypeptide, or an a checkpoint inhibitor polypeptide).

[0773] In other embodiments, administration of a combination therapy disclosed herein (e.g., at least two polynucleotides, wherein each polynucleotide comprises an ORF encoding an immune response primer polypeptide, an immune response co-stimulatory signal polypeptide, or an a checkpoint inhibitor polypeptide) increases the total number of NK cells in the subject compared to a subject who is administered a dendritic cell transduced with one or more of the polynucleotide components (e.g., mRNAs) of the combination therapy.

[0774] In other embodiments, administration of a combination therapy disclosed herein (e.g., at least two polynucleotides, wherein each polynucleotide comprises an ORF encoding an immune response primer polypeptide, an immune response co-stimulatory signal polypeptide, or an a checkpoint inhibitor polypeptide) increases the number of NK cells in the subject within the tumor microenvironment compared to that of a subject who is not administered with the combination therapy.

[0775] In other embodiments, administration of a combination therapy disclosed herein (e.g., at least two polynucleotides, wherein each polynucleotide comprises an ORF encoding an immune response primer polypeptide, an immune response co-stimulatory signal polypeptide, or an a checkpoint inhibitor polypeptide) increases the number of NK cells in a subject within the tumor microenvironment compared to that of a subject who is administered a dendritic cell transduced with one or more of the polynucleotide components (e.g., mRNAs) of the combination therapy.

[0776] In other embodiments, the concentration of NK cells within the tumor microenvironment is increased while the total number of NK cells in the subject remains the same.

[0777] In certain embodiments, the number of NK cells is increased at least about two-fold, at least about three-fold, at least about four-fold, at least about five-fold, at least about six-fold, at least about seven-fold, at least about eight-fold, at least about nine-fold, or at least about ten-fold compared to a control (e.g., saline or a control mRNA). In a particular embodiment, the number of NK cells is increased after the administration of a combination therapy disclosed herein (e.g., at least two polynucleotides, wherein each polynucleotide comprises an ORF encoding an immune response primer polypeptide, an immune response co-stimulatory signal polypeptide, or an a checkpoint inhibitor polypeptide) at least about two-fold compared to a control (e.g., saline or a control mRNA).

[0778] The present disclosure further provides a method of increasing immunocytokine (e.g., interleukin-2) production in a subject in need thereof comprising administering to the subject a combination therapy disclosed herein (e.g., at least two polynucleotides, wherein each polynucleotide comprises an ORF encoding an immune response primer polypeptide, an immune response co-stimulatory signal polypeptide, or an a checkpoint inhibitor polypeptide). In one embodiment, the increase in immunokine production in the subject is directed to an anti-tumor immune response in the subject. In another embodiment, the increase in immunokine production is at least about two-fold, at least about three-fold, at least about four-fold, at least about five-fold, or at least about six-fold higher than a control (e.g., PBS treated).

[0779] The present disclosure further provides a method of increasing IL-2 in a subject in need thereof comprising administering a combination therapy disclosed herein (e.g., at least two polynucleotides, wherein each polynucleotide comprises an ORF encoding an immune response primer polypeptide, an immune response co-stimulatory signal polypeptide, or an a checkpoint inhibitor polypeptide) to increase IL-2 in the subject in need thereof.

[0780] In one embodiment, the increase in IL-2 in the subject is directed to an anti-tumor immune response in the subject. In another embodiment, the increase in IL-2 expression by the administration of the combination therapy is at least about two-fold, at least about three-fold, at least about four-fold, at least about five-fold, or at least about six-fold higher than a control (e.g., PBS treated). The IL-2 expression can be measured using any available techniques, such as ELISA or ELISPOT assays.

[0781] The present disclosure also provides a method of increasing IL-4 in a subject in need thereof comprising administering a combination therapy disclosed herein (e.g., at least two polynucleotides, wherein each polynucleotide comprises an ORF encoding an immune response primer polypeptide, an immune response co-stimulatory signal polypeptide, or an a checkpoint inhibitor polypeptide) to increase IL-4 in the subject in need thereof.

[0782] In some embodiments, the increase in IL-4 in the subject is directed to an anti-tumor immune response in the subject. In one embodiment, the increase in IL-4 expression by a combination therapy disclosed herein (e.g., at least two polynucleotides, wherein each polynucleotide comprises an ORF encoding an immune response primer polypeptide, an immune response co-stimulatory signal polypeptide, or an a checkpoint inhibitor polypeptide) is at least about two-fold, at least about three-fold, at least about four-fold, at least about five-fold, or at least about six-fold higher than a control (e.g., PBS treated). The IL-4 expression can be measured using any available techniques, such as ELISA or ELISPOT assays.

[0783] The present disclosure also provides a method of increasing IL-21 in a subject in need thereof comprising administering a combination therapy disclosed herein (e.g., at least two polynucleotides, wherein each polynucleotide comprises an ORF encoding an immune response primer polypeptide, an immune response co-stimulatory signal polypeptide, or an a checkpoint inhibitor polypeptide) to increase IL-21 in the subject in need thereof. In one aspect, the increase in IL-21 in the subject is directed to an anti-tumor immune response in the subject.

[0784] In certain embodiments, the disclosure includes a method of inducing an adaptive immune response, an innate immune response, or both adaptive and innate immune response against tumor comprising administering a combination therapy disclosed herein (e.g., at least two polynucleotides, wherein each polynucleotide comprises an ORF encoding an immune response primer polypeptide, an immune response co-stimulatory signal polypeptide, or an a checkpoint inhibitor polypeptide).

[0785] In certain embodiments, the present disclosure is also directed to a method of increasing IFNγ expression in a subject having tumor comprising administering a combination therapy disclosed herein (e.g., at least two polynucleotides, wherein each polynucleotide comprises an ORF encoding an immune response primer polypeptide, an immune response co-stimulatory signal polypeptide, or an a checkpoint inhibitor polypeptide).

[0786] In some embodiments of the methods disclosed herein, the size of a tumor can be reduced by about 5%, about 10%, about 15%, about 20%, about 25%, about 30%, about 35%, about 40%, about 45%, about 50%, about 55%, about 60%, about 65%, about 70%, about 75%, about 80%, about 85%, about 90%, about 95% or about 100%, with respect to the original size of the tumor prior to treatment with a combination therapy disclosed herein (e.g., at least two polynucleotides, wherein each polynucleotide comprises an ORF encoding an immune response primer polypeptide, an immune response co-stimulatory signal polypeptide, or a checkpoint inhibitor polypeptide).

[0787] In some embodiments of the methods disclosed herein, the growth of a tumor can be inhibited by about 5%, about 10%, about 15%, about 20%, about 25%, about 30%, about 35%, about 40%, about 45%, about 50%, about 55%, about 60%, about 65%, about 70%, about 75%, about 80%, about 85%, about 90%, about 95% or about 100%, with respect to the original growth rate of the tumor prior to treatment with a combination therapy disclosed herein (e.g., at least two polynucleotides, wherein each polynucleotide comprises an ORF encoding an immune response primer polypeptide, an immune response co-stimulatory signal polypeptide, or a checkpoint inhibitor polypeptide).

[0788] In some embodiments of the methods disclosed herein, the survival rate can be increased by at least about 5%, at least about 10%, at least about 15%, at least about 20%, at least about 25%, at least about 30%, at least about 35%, at least about 40%, at least about 45%, at least about 50%, at least about 55%, at least about 60%, at least about 65%, at least about 70%, at least about 75%, at least about 80%, at least about 85%, at least about 90%, at least about 95% or at least about 100%, with respect to the survival rate of a population of subjects which have not been treated with a combination therapy disclosed herein (e.g., at least two polynucleotides, wherein each polynucleotide comprises an ORF encoding an immune response primer polypeptide, an immune response co-stimulatory signal polypeptide, or a checkpoint inhibitor polypeptide).

[0789] In some embodiments of the methods disclosed herein, the survival rate in a subject treated with a combination therapy disclosed herein (e.g., at least two polynucleotides, wherein each polynucleotide comprises an ORF encoding an immune response primer polypeptide, an immune response co-stimulatory signal polypeptide, or a checkpoint inhibitor polypeptide) can be at least 2-fold, at least 3-fold, at least 4-fold, at least 5-fold, at least 6-fold, at least 7-fold, at least 8-fold, at least 9-fold or at least 10-fold higher than the survival rate of a population of subjects which have not been treated with a combination therapy disclosed herein (e.g., at least two polynucleotides, wherein each polynucleotide comprises an ORF encoding an immune response primer polypeptide, an immune response co-stimulatory signal polypeptide, or a checkpoint inhibitor polypeptide).

[0790] In some embodiments of the methods disclosed herein, the survival rate in a population of subjects in need of treatment which have been treated with a combination therapy disclosed herein (e.g., at least two polynucleotides, wherein each polynucleotide comprises an ORF encoding an immune response primer polypeptide, an immune response co-stimulatory signal polypeptide, or a checkpoint inhibitor polypeptide) can be at least about 5%, at least about 10%, at least about 15%, at least about 20%, at least about 25%, at least about 30%, at least about 35%, at least about 40%, at least about 45%, at least about 50%, at least about 55%, at least about 60%, at least about 65%, at least about 70%, at least about 75%, at least about 80%, at least about 85%, at least about 90%, at least about 95% or about 100%.

[0791] In some embodiments, response rate (e.g., partial response or complete response) in a population of subjects in need of treatment which have been treated with a combination therapy disclosed herein (e.g., at least two polynucleotides, wherein each polynucleotide comprises an ORF encoding an immune response primer polypeptide, an immune response co-stimulatory signal polypeptide, or a checkpoint inhibitor polypeptide) can be at least about 5%, at least about 10%, at least about 15%, at least about 20%, at least about 25%, at least about 30%, at least about 35%, at least about 40%, at least about 45%, at least about 50%, at least about 55%, at least about 60%, at least about 65%, at least about 70%, at least about 75%, at least about 80%, at least about 85%, at least about 90%, at least about 95% or about 100%.

[0792] In some embodiments, the complete response or complete remission rate in a population of subjects in need of treatment which have been treated with a combination therapy disclosed herein (e.g., at least two polynucleotides, wherein each polynucleotide comprises an ORF encoding an immune response primer polypeptide, an immune response co-stimulatory signal polypeptide, or a checkpoint inhibitor polypeptide) can be at least about 5%, at least about 10%, at least about 15%, at least about 20%, at least about 25%, at least about 30%, at least about 35%, at least about 40%, at least about 45%, at least about 50%, at least about 55%, at least about 60%, at least about 65%, at least about 70%, at least about 75%, at least about 80%, at least about 85%, at least about 90%, at least about 95% or about 100%.

[0793] In some specific embodiments, the complete remission rate for subjects treated with a combination therapy disclosed herein (e.g., at least two polynucleotides, wherein each polynucleotide comprises an ORF encoding an immune response primer polypeptide, an immune response co-stimulatory signal polypeptide, or a checkpoint inhibitor polypeptide) is about 100% when a combination therapy disclosed herein (e.g., at least two polynucleotides, wherein each polynucleotide comprises an ORF encoding an immune response primer polypeptide, an immune response co-stimulatory signal polypeptide, or a checkpoint inhibitor polypeptide) is administered in one, two, three, or more doses, wherein the doses are about 0.5 mg mRNA/kg.

[0794] In some embodiments, the inhibition of tumor growth following the administration of a combination therapy disclosed herein (e.g., at least two polynucleotides, wherein each polynucleotide comprises an ORF encoding an immune response primer polypeptide, an immune response co-stimulatory signal polypeptide, or a checkpoint inhibitor polypeptide) can result in complete remission (i.e., complete response), improvement in response or partial response (e.g., increase in time survival, size of tumors, etc.), lowering of tumor burden, or a combination thereof.

[0795] In one embodiment, the administration of a combination therapy disclosed herein (e.g., at least two polynucleotides, wherein each polynucleotide comprises an ORF encoding an immune response primer polypeptide, an immune response co-stimulatory signal polypeptide, or a checkpoint inhibitor polypeptide) results in complete remission.

[0796] In some embodiments, one or more of the polynucleotides in a combination therapy (e.g., at least two polynucleotides, wherein each polynucleotide comprises an ORF encoding an immune response primer polypeptide, an immune response co-stimulatory signal polypeptide, or a checkpoint inhibitor polypeptide) comprise at least one chemically modified nucleoside. In some embodiments, all the polynucleotides (e.g., mRNAs) in a combination therapy disclosed herein comprise at least one chemically modified nucleoside.

[0797] In some embodiments, the at least one chemically modified nucleoside is selected from the group consisting of pseudouridine, N1-methylpseudouridine, 5-methylcytosine, 5-methoxyuridine, and a combination thereof. In some embodiments, the nucleosides in one or more of the polynucleotides (e.g., mRNAs) in a combination therapy disclosed herein are chemically modified by at least 10%, at least 15%. at least 20%, at least 25%, at least at least 30%, at least 35%, at least 40%, at least 45%, at least 50%, at least 55%, at least 60%, at least 65%, at least 70%, at least 75%, at least 80%, at least 85%, at least 90%, at least 95%, at least 99%, or 100%. In some embodiments, the chemically modified nucleosides in one or more of the polynucleotides (e.g., mRNAs) in a combination therapy disclosed herein are selected from the group consisting of uridine, adenine, cytosine, guanine, and any combination thereof.

[0798] In some embodiments, the uridine nucleosides in one or more of the polynucleotides (e.g., mRNAs) in a combination therapy disclosed herein are chemically modified by at least 10%, at least 15%. at least 20%, at least 25%, at least at least 30%, at least 35%, at least 40%, at least 45%, at least 50%, at least 55%, at least 60%, at least 65%, at least 70%, at least 75%, at least 80%, at least 85%, at least 90%, at least 95%, at least 99%, or 100%.

[0799] In some embodiments, the adenosine nucleosides in one or more of the polynucleotides (e.g., mRNAs) in a combination therapy disclosed herein are chemically modified by at least 10%, at least 15%. at least 20%, at least 25%, at least at least 30%, at least 35%, at least 40%, at least 45%, at least 50%, at least 55%, at least 60%, at least 65%, at least 70%, at least 75%, at least 80%, at least 85%, at least 90%, at least 95%, at least 99%, or 100%.

[0800] In some embodiments, the cytidine nucleosides in one or more of the polynucleotides (e.g., mRNAs) in a combination therapy disclosed herein are chemically modified by at least 10%, at least 15%. at least 20%, at least 25%, at least at least 30%, at least 35%, at least 40%, at least 45%, at least 50%, at least 55%, at least 60%, at least 65%, at least 70%, at least 75%, at least 80%, at least 85%, at least 90%, at least 95%, at least 99%, or 100%.

[0801] In some embodiments, the guanosine nucleosides in one or more of the polynucleotides (e.g., mRNAs) in a combination therapy disclosed herein are chemically modified by at least 10%, at least 15%. at least 20%, at least 25%, at least at least 30%, at least 35%, at least 40%, at least 45%, at least 50%, at least 55%, at least 60%, at least 65%, at least 70%, at least 75%, at least 80%, at least 85%, at least 90%, at least 95%, at least 99%, or 100%.

[0802] In some embodiments, one or more of the polynucleotides (e.g., mRNAs) in a combination therapy disclosed herein comprises at least one miRNA binding site. In some embodiments, the miRNA binding site is a miR-122 binding site, e.g., a miR-122-3p and/or a miR-122-5p binding site. In some embodiments, the miRNA binding site comprises a nucleotide sequence at least 80%, at least 85%, at least 90%, at least 95%, or 100% identical to aacgccauuaucacacuaaaua (SEQ ID NO: 1212), wherein the miRNA binding site binds to miR-122. In some embodiments, the miRNA binding site comprises a nucleotide sequence at least 80%, at least 85%, at least 90%, at least 95%, or 100% identical to uggagugugacaaugguguuug (SEQ ID NO: 1214), wherein the miRNA binding site binds to miR-122. In some embodiments, the polynucleotides (e.g., mRNAs) in a combination therapy disclosed herein comprise different miRNA binding sites or the same miRNA binding site.

[0803] In some embodiments, one or more of the polynucleotides (e.g., mRNAs) in a combination therapy disclosed herein comprise a 5′ untranslated region (UTR). In some embodiments, the 5′ UTR comprises a nucleic acid sequence at least 90%, 95%, 96%, 97%, 98%, 99%, or 100% identical to a sequence listed in TABLE 20.

[0804] In some embodiments, one or more of the polynucleotides (e.g., mRNAs) in a combination therapy disclosed herein comprise a 3′ untranslated region (UTR). In some embodiments, the 3′ UTR comprises a nucleic acid sequence at least 90%, 95%, 96%, 97%, 98%, 99%, or 100% identical to a sequence listed in TABLE 21 or TABLE 22. In some embodiments, the miRNA binding site is inserted within the 3′ UTR.

[0805] In some embodiments, one or more of the polynucleotides (e.g., mRNAs) in a combination therapy disclosed herein comprise a spacer sequence fused to the miRNA binding site. In some embodiments, the spacer sequence comprises at least about 10 nucleotides, at least about 15 nucleotides, at least about 20 nucleotides, at least about 25 nucleotides, at least about 30 nucleotides, at least about 35 nucleotides, at least about 40 nucleotides, at least about 45 nucleotides, at least about 50 nucleotides, at least about 55 nucleotides, at least about 60 nucleotides, at least about 65 nucleotides, at least about 70 nucleotides, at least about 75 nucleotides, at least about 80 nucleotides, at least about 85 nucleotides, at least about 90 nucleotides, at least about 95 nucleotides, or at least about 100 nucleotides.

[0806] In some embodiments, one or more of the polynucleotides (e.g., mRNAs) in a combination therapy disclosed herein comprise a 5′ terminal cap structure. In some embodiments, the 5′ terminal cap is a Cap0, Cap1, ARCA, inosine, N1-methyl-guanosine, 2′fluoro-guanosine, 7-deaza-guanosine, 8-oxo-guanosine, 2-amino-guanosine, LNA-guanosine, 2-azidoguanosine, Cap2, Cap4, 5′ methylG cap, or an analog thereof.

[0807] In some embodiments, one or more of the polynucleotides (e.g., mRNAs) in a combination therapy disclosed herein comprise a 3′ polyA tail.

[0808] In some embodiments, one or more of the polynucleotides (e.g., mRNAs) in a combination therapy disclosed herein comprise at least two, at least three, at least four, at least five, at least six, at least seven, at least eight, at least nine, or at least ten miRNA binding sites.

[0809] In some embodiments, one or more of the polynucleotides (e.g., mRNAs) in a combination therapy disclosed herein are codon optimized. In some embodiments, one or more of the polynucleotides (e.g., mRNAs) in a combination therapy disclosed herein are in vitro transcribed (IVT). In some embodiments, one or more of the polynucleotides (e.g., mRNAs) in a combination therapy disclosed herein are chimeric. In some embodiments, one or more of the polynucleotides (e.g., mRNAs) in a combination therapy disclosed herein are circular.

[0810] In some embodiments, one or more of the polynucleotides (e.g., mRNAs) in a combination therapy disclosed herein is formulated with a delivery agent. In some embodiments, the delivery agent comprises a lipidoid, a liposome, a lipoplex, a lipid nanoparticle, a polymeric compound, a peptide, a protein, a cell, a nanoparticle mimic, a nanotube, or a conjugate. In some embodiments, the delivery agent is a lipid nanoparticle. In some embodiments, the lipid nanoparticle comprises a lipid selected from the group consisting of DLin-DMA, DLin-K-DMA, 98N12-5, C12-200, DLin-MC3-DMA, DLin-KC2-DMA, DODMA, PLGA, PEG, PEG-DMG, PEGylated lipids, amino alcohol lipids, KL22, and combinations thereof.

[0811] In some embodiments, the delivery agent comprises a compound having formula (I)

[chemical structure]

or a salt or stereoisomer thereof, wherein

[0812] R₁ is selected from the group consisting of C₅₋₂₀ alkyl, C₅₋₂₀ alkenyl, -R*YR″, -YR″, and -R″M′R′;

[0813] R₂ and R₃ are independently selected from the group consisting of H, C₁₋₁₄ alkyl, C₂₋₁₄ alkenyl, -R*YR″, -YR″, and -R*OR″, or R₂ and R₃, together with the atom to which they are attached, form a heterocycle or carbocycle;

[0814] R₄ is selected from the group consisting of a C₃₋₆ carbocycle, —(CH₂)ₙQ, —(CH₂)ₙCHQR, —CHQR, —CQ(R)₂, and unsubstituted C₁₋₆ alkyl, where Q is selected from a carbocycle, heterocycle, —OR, —O(CH₂)ₙN(R)₂, —C(O)OR, —OC(O)R, —CX₃, —CX₂H, —CXH₂, —CN, —N(R)₂, —C(O)N(R)₂, —N(R)C(O)R, —N(R)S(O)₂R, —N(R)C(O)N(R)₂, —N(R)C(S)N(R)₂, and —C(R)N(R)₂C(O)OR, and each n is independently selected from 1, 2, 3, 4, and 5;

[0815] each R₅ is independently selected from the group consisting of C₁₋₃ alkyl, C₂₋₃ alkenyl, and H;

[0816] each R₆ is independently selected from the group consisting of C₁₋₃ alkyl, C₂₋₃ alkenyl, and H;

[0817] M and M′ are independently selected from —C(O)O—, —OC(O)—, —C(O)N(R′)-,

[0818] —N(R′)C(O)—, —C(O)—, —C(S)—, —C(S)S—, —SC(S)—, —CH(OH)—, —P(O)(OR′)O—, —S(O)₂—, an aryl group, and a heteroaryl group;

[0819] R₇ is selected from the group consisting of C₁₋₃ alkyl, C₂₋₃ alkenyl, and H;

[0820] each R is independently selected from the group consisting of C₁₋₃ alkyl, C₂₋₃ alkenyl, and H;

[0821] each R′ is independently selected from the group consisting of C₁₋₁₈ alkyl, C2-1s alkenyl, -R*YR″, -YR″, and H;

[0822] each R″ is independently selected from the group consisting of C₃₋₁₄ alkyl and C₃₋₁₄ alkenyl;

[0823] each R* is independently selected from the group consisting of C₁₋₁₂ alkyl and C₂₋₁₂ alkenyl;

[0824] each Y is independently a C₃₋₆ carbocycle;

[0825] each X is independently selected from the group consisting of F, Cl, Br, and I; and

[0826] m is selected from 5, 6, 7, 8, 9, 10, 11, 12, and 13; and

[0827] provided when R₄ is —(CH₂)ₙQ, —(CH₂)ₙCHQR, —CHQR, or -CQ(R)₂, then (i) Q is not -N(R)₂ when n is 1, 2, 3, 4 or 5, or (ii) Q is not 5, 6, or 7-membered heterocycloalkyl when n is 1 or 2.

[0828] In some embodiments, the compound in the delivery agent is of Formula (IA):

[chemical structure]

or a salt or stereoisomer thereof, wherein

[0829] 1 is selected from 1, 2, 3, 4, and 5;

[0830] m is selected from 5, 6, 7, 8, and 9;

[0831] M₁ is a bond or M′;

[0832] R₄ is unsubstituted C₁₋₃ alkyl, or —(CH₂)ₙQ, in which n is 1, 2, 3, 4, or 5 and Q is OH, —NHC(S)N(R)₂, or —NHC(O)N(R)₂;

[0833] M and M′ are independently selected from —C(O)O—, —OC(O)—, —C(O)N(R′)-, —P(O)(OR′)O—, an aryl group, and a heteroaryl group; and

[0834] R₂ and R₃ are independently selected from the group consisting of H, C₁₋₁₄ alkyl, and C₂₋₁₄ alkenyl.

[0835] In some embodiments of formula (I) or formula (IA), m is 5, 7, or 9.

[0836] In some embodiments, the compound in the delivery agent is of Formula (II):

[chemical structure]

or a salt or stereoisomer thereof, wherein

[0837] 1 is selected from 1, 2, 3, 4, and 5;

[0838] M₁ is a bond or M′;

[0839] R₄ is unsubstituted C₁₋₃ alkyl, or —(CH₂)ₙQ, in which n is 2, 3, or 4 and Q is OH, —NHC(S)N(R)₂, or —NHC(O)N(R)₂;

[0840] M and M′ are independently selected from —C(O)O—, —OC(O)—, —C(O)N(R′)-, —P(O)(OR′)O—, an aryl group, and a heteroaryl group; and

[0841] R₂ and R₃ are independently selected from the group consisting of H, C₁₋₁₄ alkyl, and C₂₋₁₄ alkenyl.

[0842] In some embodiments, the compound in the delivery agent is selected from Compound 1 to Compound 147, and salts and stereoisomers thereof.

[0843] In some embodiments, the compound in the delivery agent is of the Formula (IIa),

[chemical structure]

or a salt or stereoisomer thereof.

[0844] In some embodiments, the compound in the delivery agent is of the Formula (IIb),

[chemical structure]

or a salt or stereoisomer thereof.

[0845] In some embodiments, the compound in the delivery agent is of the Formula (IIc) or (IIe),

[chemical structure]

or a salt or stereoisomer thereof.

[0846] In some embodiments of formula (IIa), formula (IIb) or formula (IIe), R₄ is selected from —(CH₂)ₙQ and —(CH₂)ₙCHQR, wherein Q, R and n are as defined above.

[0847] In some embodiments, the compound in the delivery agent is of the Formula (IId),

[chemical structure]

or a salt or stereoisomer thereof,

[0848] wherein R₂ and R₃ are independently selected from the group consisting of C₅₋₁₄ alkyl and C₅₋₁₄ alkenyl, n is selected from 2, 3, and 4, R′ is independently selected from the group consisting of C₁₋₁₈ alkyl, C₂₋₁₈ alkenyl, -R*YR″, -YR″, and H, R″ is independently selected from the group consisting of C₃₋₁₄ alkyl and C₃₋₁₄ alkenyl, R₅ is independently selected from the group consisting of C₁₋₃ alkyl, C₂₋₃ alkenyl, and H, R₆ is independently selected from the group consisting of C₁₋₃ alkyl, C₂₋₃ alkenyl, and H and m is 5, 7 or 9.

[0849] In some embodiments of formula (IId), R₂ is C₈ alkyl. In some embodiments of formula (IId), R₃ is C₅ alkyl, C₆ alkyl, C₇ alkyl, C₈ alkyl, or C₉ alkyl. In some embodiments of formula (IId), m is 5, 7, or 9. In some embodiments of formula (IId), each R₅ is H. In some embodiments of formula (IId), each R₆ is H.

[0850] In some embodiments, the delivery agent further comprises a phospholipid. In some embodiments, the phospholipid is selected from the group consisting of
[0851] 1,2-dilinoleoyl-sn-glycero-3-phosphocholine (DLPC),
[0852] 1,2-dimyristoyl-sn-glycero-phosphocholine (DMPC),
[0853] 1,2-dioleoyl-sn-glycero-3-phosphocholine (DOPC),
[0854] 1,2-dipalmitoyl-sn-glycero-3-phosphocholine (DPPC),
[0855] 1,2-distearoyl-sn-glycero-3-phosphocholine (DSPC),
[0856] 1,2-diundecanoyl-sn-glycero-phosphocholine (DUPC),
[0857] 1-palmitoyl-2-oleoyl-sn-glycero-3-phosphocholine (POPC),
[0858] 1,2-di-O-octadecenyl-sn-glycero-3-phosphocholine (18:0 Diether PC),
[0859] 1-oleoyl-2-cholesterylhemisuccinoyl-sn-glycero-3-phosphocholine (OChemsPC),
[0860] 1-hexadecyl-sn-glycero-3-phosphocholine (C16 Lyso PC),
[0861] 1,2-dilinolenoyl-sn-glycero-3-phosphocholine,
[0862] 1,2-diarachidonoyl-sn-glycero-3-phosphocholine,
[0863] 1,2-didocosahexaenoyl-sn-gly cero-3-phosphocholine,
[0864] 1,2-dioleoyl-sn-glycero-3-phosphoethanolamine (DOPE),
[0865] 1,2-diphytanoyl-sn-glycero-3-phosphoethanolamine (ME 16:0 PE),
[0866] 1,2-distearoyl-sn-glycero-3-phosphoethanolamine,
[0867] 1,2-dilinoleoyl-sn-gly cero-3-phosphoethanolamine,
[0868] 1,2-dilinolenoyl-sn-gly cero-3-phosphoethanolamine,
[0869] 1,2-diarachidonoyl-sn-glycero-3-phosphoethanolamine,
[0870] 1,2-didocosahexaenoyl-sn-gly cero-3-phosphoethanolamine,
[0871] 1,2-dioleoyl-sn-glycero-3-phospho-rac-(1-glycerol) sodium salt (DOPG), sphingomyelin,
[0872] and mixtures thereof.
[0873] In some embodiments, the phospholipid is selected from the group consisting of
[0874] 1-myristoyl-2-palmitoyl-sn-glycero-3-phosphocholine (14:0-16:0 PC, MPPC),
[0875] 1-myristoyl-2-stearoyl-sn-glycero-3-phosphocholine (14:0-18:0 PC, MSPC),
[0876] 1-palmitoyl-2-acetyl-sn-glycero-3-phosphocholine (16:0-02:0 PC),
[0877] 1-palmitoyl-2-myristoyl-sn-glycero-3-phosphocholine (16:0-14:0 PC, PMPC),
[0878] 1-palmitoyl-2-stearoyl-sn-glycero-3-phosphocholine (16:0-18:0 PC, PSPC),
[0879] 1-palmitoyl-2-oleoyl-sn-glycero-3-phosphocholine (16:0-18:1 PC, POPC),
[0880] 1-palmitoyl-2-linoleoyl-sn-glycero-3-phosphocholine (16:0-18:2 PC, PLPC),
[0881] 1-palmitoyl-2-arachidonoyl-sn-glycero-3-phosphocholine (16:0-20:4 PC),
[0882] 1-palmitoyl-2-docosahexaenoyl-sn-glycero-3-phosphocholine (14:0-22:6 PC),
[0883] 1-stearoyl-2-myristoyl-sn-glycero-3-phosphocholine (18:0-14:0 PC, SMPC),
[0884] 1-stearoyl-2-palmitoyl-sn-glycero-3-phosphocholine (18:0-16:0 PC, SPPC),
[0885] 1-stearoyl-2-oleoyl-sn-glycero-3-phosphocholine (18:0-18:1 PC, SOPC),
[0886] 1-stearoyl-2-linoleoyl-sn-glycero-3-phosphocholine (18:0-18:2 PC),
[0887] 1-stearoyl-2-arachidonoyl-sn-glycero-3-phosphocholine (18:0-20:4 PC),
[0888] 1-stearoyl-2-docosahexaenoyl-sn-glycero-3-phosphocholine (18:0-22:6 PC),
[0889] 1-oleoyl-2-myristoyl-sn-glycero-3-phosphocholine (18:1-14:0 PC, OMPC),
[0890] 1-oleoyl-2-palmitoyl-sn-glycero-3-phosphocholine (18:1-16:0 PC, OPPC),
[0891] 1-oleoyl-2-stearoyl-sn-glycero-3-phosphocholine (18:1-18:0 PC, OSPC),
[0892] 1-palmitoyl-2-oleoyl-sn-glycero-3-phosphoethanolamine (16:0-18:1 PE, POPE),
[0893] 1-palmitoyl-2-linoleoyl-sn-glycero-3-phosphoethanolamine (16:0-18:2 PE),
[0894] 1-palmitoyl-2-arachidonoyl-sn-glycero-3-phosphoethanolamine (16:0-20:4 PE),
[0895] 1-palmitoyl-2-docosahexaenoyl-sn-glycero-3-phosphoethanolamine (16:0-22:6 PE),
[0896] 1-stearoyl-2-oleoyl-sn-glycero-3-phosphoethanolamine (18:0-18:1 PE),
[0897] 1-stearoyl-2-linoleoyl-sn-glycero-3-phosphoethanolamine (18:0-18:2 PE),
[0898] 1-stearoyl-2-arachidonoyl-sn-glycero-3-phosphoethanolamine (18:0-20:4 PE),
[0899] 1-stearoyl-2-docosahexaenoyl-sn-glycero-3-phosphoethanolamine (18:0-22:6 PE),
[0900] 1-oleoyl-2-cholesterylhemisuccinoyl-sn-glycero-3-phosphocholine (OChemsPC), and
[0901] any combination thereof.

[0902] In some embodiments, the delivery agent further comprises a structural lipid. In some embodiments, the structural lipid is selected from the group consisting of cholesterol, fecosterol, sitosterol, ergosterol, campesterol, stigmasterol, brassicasterol, tomatidine, ursolic acid, alpha-tocopherol, and mixtures thereof.

[0903] In some embodiments, the delivery agent further comprises a PEG lipid. In some embodiments, the PEG lipid is selected from the group consisting of a PEG-modified phosphatidylethanolamine, a PEG-modified phosphatidic acid, a PEG-modified ceramide, a PEG-modified dialkylamine, a PEG-modified diacylglycerol, a PEG-modified dialkylglycerol, and mixtures thereof.

[0904] In some embodiments, the delivery agent further comprises an ionizable lipid selected from the group consisting of
[0905] 3-(didodecylamino)-N1,N1,4-tridodecyl-1-piperazineethanamine (KL10),
[0906] N1-[2-(didodecylamino)ethyl]-N1,N4,N4-tridodecyl-1,4-piperazinediethanamine (KL22),
[0907] 14,25-ditridecyl-15,18,21,24-tetraaza-octatriacontane (KL25),
[0908] 1,2-dilinoleyloxy-N,N-dimethylaminopropane (DLin-DMA),
[0909] 2,2-dilinoleyl-4-dimethylaminomethyl-[1,3]-dioxolane (DLin-K-DMA),
[0910] heptatriaconta-6,9,28,31-tetraen-19-yl 4-(dimethylamino)butanoate (DLin-MC3-DMA),
[0911] 2,2-dilinoleyl-4-(2-dimethylaminoethyl)-[1,3]-dioxolane (DLin-KC2-DMA),
[0912] 1,2-dioleyloxy-N,N-dimethylaminopropane (DODMA),
[0913] 2-({8-[(3 p)-cholest-5-en-3-yloxy]octyl}oxy)-N,N-dimethyl-3-[(9Z,12Z)-octadeca-9,12-dien-1-yloxy]propan-1-amine (Octyl-CLinDMA),
[0914] (2R)-2-({8-[(3p)-cholest-5-en-3-yloxy]octyl}oxy)-N,N-dimethyl-3-[(9Z,12Z)-octadeca-9,
[0915] 12-dien-1-yloxy]propan-1-amine (Octyl-CLinDMA (2R)), and
[0916] (2S)-2-({8-[(3p)-cholest-5-en-3-yloxy]octyl}oxy)-N,N-dimethyl-3-[(9Z,12Z)-octadeca-9,
[0917] 12-dien-1-yloxy]propan-1-amine (Octyl-CLinDMA (2S)).

[0918] In some embodiments, the delivery agent further comprises a quaternary amine compound. In some embodiments, the quaternary amine compound is selected from the group consisting of
[0919] 1,2-dioleoyl-3-trimethylammonium-propane (DOTAP),
[0920] N-[1-(2,3-dioleoyloxy)propyl]-N,N,N-trimethylammonium chloride (DOTMA),
[0921] 1-[2-(oleoyloxy)ethyl]-2-oleyl-3-(2-hydroxyethyl)imidazolinium chloride (DOTIM),
[0922] 2,3-dioleyloxy-N-[2(sperminecarboxamido)ethyl]-N,N-dimethyl-1-propanaminium trifluoroacetate (DOSPA),
[0923] N,N-distearyl-N,N-dimethylammonium bromide (DDAB),
[0924] N-(1,2-dimyristyloxyprop-3-yl)-N,N-dimethyl-N-hydroxyethyl ammonium bromide (DMRIE),
[0925] N-(1,2-dioleoyloxyprop-3-yl)-N,N-dimethyl-N-hy droxyethyl ammonium bromide (DORIE),
[0926] N,N-dioleyl-N,N-dimethylammonium chloride (DODAC),
[0927] 1,2-dilauroyl-sn-glycero-3-ethylphosphocholine (DLePC),
[0928] 1,2-distearoyl-3-trimethylammonium-propane (DSTAP),
[0929] 1,2-dipalmitoyl-3-trimethylammonium-propane (DPTAP),
[0930] 1,2-dilinoleoyl-3-trimethylammonium-propane (DLTAP),
[0931] 1,2-dimyristoyl-3-trimethylammonium-propane (DMTAP),
[0932] 1,2-distearoyl -sn-glycero-3-ethylphosphocholine (DSePC),
[0933] 1,2-dipalmitoyl-sn-glycero-3-ethylphosphocholine (DPePC),
[0934] 1,2-dimyristoyl -sn-glycero-3-ethylphosphocholine (DMePC),
[0935] 1,2-dioleoyl-sn-glycero-3-ethylphosphocholine (DOePC),
[0936] 1,2-di-(9Z-tetradecenoyl)-sn-glycero-3-ethylphosphocholine (14:1 EPC),
[0937] 1-palmitoyl-2-oleoyl-sn-glycero-3-ethylphosphocholine (16:0-18:1 EPC),
[0938] and any combination thereof.

[0939] The present disclosure provides a composition comprising (i) one or more of the polynucleotides (e.g., mRNAs) disclosed herein and a pharmaceutically acceptable carrier, or (ii) one or more of the polynucleotides (e.g., mRNAs) disclosed herein formulated in one of the delivery agents disclosed above. In some embodiments, the compositions disclosed herein are compositions for use in reducing or decreasing a size of a tumor or inhibiting a tumor growth in a subject in need thereof.

[0940] The present disclosures provides a pharmaceutical composition comprising at least two mRNAs, wherein the mRNAs are selected from:
[0941] (i) one or more mRNAs having an open reading frame encoding an immune response primer polypeptide;
[0942] (ii) one or more mRNAs having an open reading frame encoding an immune response costimulatory signal polypeptide; and
[0943] (iii) one or more mRNAs having an open reading frame encoding a checkpoint inhibitor polypeptide, and a pharmaceutically acceptable carrier.

[0944] In some embodiments, the pharmaceutical composition comprises (i) an mRNA having an open reading frame encoding an immune response primer polypeptide and (ii) an mRNA having an open reading frame encoding an immune response costimulatory signal polypeptide. In some embodiments, the pharmaceutical composition comprises two mRNAs each having an open reading frame encoding an immune response primer polypeptide. In some embodiments, the pharmaceutical composition comprises (i) an mRNA having an open reading frame encoding an immune response costimulatory signal polypeptide and (ii) an mRNA having an open reading frame encoding a checkpoint inhibitor polypeptide. In some embodiments, the pharmaceutical composition comprises (i) an mRNA having an open reading frame encoding an immune response costimulatory signal polypeptide, (ii) an mRNA having an open reading frame encoding an immune response costimulatory signal polypeptide, and (iii) an mRNA having an open reading frame encoding a checkpoint inhibitor polypeptide.

[0945] In some embodiments of the pharmaceuticals compositions disclosed herein, the immune response primer polypeptide comprises interleukin 12 (IL12), interleukin (IL23), Toll-like receptor 4 (TLR4), interleukin 36 gamma (IL36gamma), interleukin 18 (IL18), or a combination thereof. In some embodiments of the pharmaceuticals compositions disclosed herein, the immune response co-stimulatory signal polypeptide comprises tumor necrosis factor receptor superfamily member 4 ligand (OX40L), cluster of differentiation 80 (CD80), interleukin 15 (IL15), or a combination thereof. In some embodiments of the pharmaceuticals compositions disclosed herein, the checkpoint inhibitor polypeptide inhibits programmed cell death protein 1 (PD-1), programmed death-ligand 1 (PD-L1), or cytotoxic T-lymphocyte-associated protein 4 (CTLA-4).

[0946] In some specific embodiments, the pharmaceutical composition comprises:
[0947] (a) an mRNA that comprises
   [0948] (i) a 5′ untranslated region (5′-UTR) comprising a 5′ cap;
   [0949] (ii) an open reading frame (ORF) encoding at least one polypeptide disclosed herein (e.g., IL12, IL15, IL18, IL23, IL36gamma, TLR4, CD80, OX40L, anti-CTLA-4, anti-PD-1, or anti-PD-L1), wherein the ORF comprises at least one chemically modified nucleobase, sugar, backbone, or any combination thereof;
   [0950] (iii) at least one stop codon;
   [0951] (iv) a microRNA (miRNA) binding site;
   [0952] (v) a 3′ untranslated region (3′-UTR);
   [0953] (vi) a polyA tail; and,
[0954] (b) a lipid nanoparticle carrier.

[0955] In some embodiments, the pharmaceutical composition comprises 2, 3, 4, 5, 6 or more mRNAs, wherein each mRNA comprises at least one ORF encoding at least one polypeptide disclosed herein (e.g., IL12, IL15, IL18, IL23, IL36gamma, TLR4, CD80, OX40L, anti-CTLA-4, anti-PD-1, or anti-PD-L1). In some embodiments, the mRNA in the pharmaceutical composition comprises at least one chemically modified nucleobase, sugar, backbone, or any combination thereof. In some embodiments, each mRNA in the pharmaceutical composition is formulated in the same lipid nanoparticle carrier. In some embodiments, each mRNA in the pharmaceutical composition is formulated in a different lipid nanoparticle carrier.

[0956] In some embodiments, the compositions disclosed herein (e.g., polynucleotides used in combination therapies disclosed herein, or pharmaceutical compositions comprising those polynucleotides) are formulated for in vivo delivery. In some embodiments, such in vivo delivery can be, e.g., intramuscular, subcutaneous, intratumoral, or intradermal delivery. In some embodiments, the compositions disclosed herein are administered subcutaneously, intravenously, intramuscularly, intra-articularly, intra-synovially, intrasternally, intrathecally, intrahepatically, intralesionally, intracranially, intraventricularly, orally, by inhalation spray, topically, rectally, nasally, buccally, vaginally or via an implanted reservoir.

[0957] In some embodiments, the compositions disclosed herein (e.g., polynucleotides used in combination therapies disclosed herein, or pharmaceutical compositions comprising those polynucleotides) can be administered to a subject in need thereof to treat a cancer. In some embodiments, the cancer is selected from the group consisting of adrenal cortical cancer, advanced cancer, anal cancer, aplastic anemia, bileduct cancer, bladder cancer, bone cancer, bone metastasis, brain tumors, brain cancer, breast cancer, childhood cancer, cancer of unknown primary origin, Castleman disease, cervical cancer, colon/rectal cancer, endometrial cancer, esophagus cancer, Ewing family of tumors, eye cancer, gallbladder cancer, gastrointestinal carcinoid tumors, gastrointestinal stromal tumors, gestational trophoblastic disease, Hodgkin disease, Kaposi sarcoma, renal cell carcinoma, laryngeal and hypopharyngeal cancer, acute lymphocytic leukemia, acute myeloid leukemia, chronic lymphocytic leukemia, chronic myeloid leukemia, chronic myelomonocytic leukemia, liver cancer, hepatocellular carcinoma (HCC), non-small cell lung cancer, small cell lung cancer, lung carcinoid tumor, lymphoma of the skin, malignant mesothelioma, multiple myeloma, myelodysplastic syndrome, nasal cavity and paranasal sinus cancer, nasopharyngeal cancer, neuroblastoma, non-Hodgkin lymphoma, oral cavity and oropharyngeal cancer, osteosarcoma, ovarian cancer, pancreatic cancer, penile cancer, pituitary tumors, prostate cancer, retinoblastoma, rhabdomyosarcoma, salivary gland cancer, sarcoma in adult soft tissue, basal and squamous cell skin cancer, melanoma, small intestine cancer, stomach cancer, testicular cancer, throat cancer, thymus cancer, thyroid cancer, uterine sarcoma, vaginal cancer, vulvar cancer, Waldenstrom macroglobulinemia, Wilms tumor, secondary cancers caused by cancer treatment, and any combination thereof.

[0958] In some embodiments, the compositions disclosed herein (e.g., polynucleotides used in combination therapies disclosed herein, or pharmaceutical compositions comprising those polynucleotides) can be delivered by a device comprising a pump, patch, drug reservoir, short needle device, single needle device, multiple needle device, micro-needle device, jet injection device, ballistic powder/particle delivery device, catheter, lumen, cryoprobe, cannula, microcanular, or devices utilizing heat, RF energy, electric current, or any combination thereof.

[0959] In some embodiments, the effective amount of the compositions disclosed herein (e.g., polynucleotides used in combination therapies disclosed herein, or pharmaceutical compositions comprising those polynucleotides) is between about 0.10 mg/kg to about 1,000 mg/kg. In some embodiments, the compositions disclosed herein (e.g., polynucleotides used in combination therapies disclosed herein, or pharmaceutical compositions comprising those polynucleotides) are administered to a human subject.

[0960] In some embodiments, wherein the administration the compositions disclosed herein (e.g., polynucleotides used in combination therapies disclosed herein, or pharmaceutical compositions comprising those polynucleotides) reduces the size of a tumor or inhibits growth of a tumor at least 1.5 fold, at least 2 fold, at least 2.5 fold, at least 3 fold, at least 3.5 fold, at least 4 fold, at least 4.5 fold, or at least 5 fold better than a monotherapy consisting of administration of only one of the polynucleotides (e.g., mRNAs) of the composition.

[0961] In some embodiments, the efficacy of the combination therapies disclosed herein can be determined by measuring the reduction in the size of a tumor (e.g., tumor volume in mm³) derived from MC38(C), or the inhibition of the growth of a tumor derived from MC38(C) in a mouse when a dose of 5 μg of each polynucleotide (e.g., mRNA) in the combination is administered to the mouse.

[0962] In some embodiments, the efficacy of the combination therapies disclosed herein can be determined by measuring the reduction in the size of a tumor (e.g., tumor volume in mm³) derived from MC38(M), or the inhibits of the growth of a tumor derived from MC38(M) in a mouse when a dose of 5 μg of each polynucleotide (e.g., mRNA) is administered to the mouse.

[0963] In some embodiments, additional measures of efficacy can be used, such as survival or body weight. Reduction in the size of the tumor, inhibition of the growth of the tumor, increased survival, increase in body weight, are indicative of efficacy in the treatment of the tumor.

[0964] The present disclosure also provides a kit comprising any of the compositions disclosed herein and instructions to use according to the method (e.g., methods of treatment) disclosed herein.

### III. Exemplary Combination Therapy Components

[0965] In some aspects of the present disclosure, the combination therapies disclosed herein (e.g., at least two polynucleotides, wherein each polynucleotide comprises an ORF encoding an immune response primer polypeptide, an immune response co-stimulatory signal polypeptide, or a checkpoint inhibitor polypeptide) can comprise one or more of the components described below. The components detailed in the following section are not limiting, and (i) polynucleotides encoding other immune response primer polypeptides known in the art (e.g., IL36), (ii) polynucleotides encoding other immune response co-stimulatory signal polypeptides known in the art, (iii) polynucleotides encoding other checkpoint inhibitor polypeptides known in the art, or (iv) combinations thereof, can be used to prepare the combination therapies disclosed herein and to practice the methods, e.g., methods of treatment provided in the present disclosure.

### A. CYTOTOXIC T-LYMPHOCYTE-ASSOCIATED PROTEIN 4 (CTLA-4)

[0966] In some embodiments, the combination therapies disclosed herein comprise one or more anti-CTLA-4 polynucleotides (e.g., mRNAs), i.e., polynucleotides comprising one or more ORFs encoding an antibody or an antigen-binding portion thereof that specifically binds to CTLA-4.

[0967] CTLA-4 is a member of the CD28-B7 immunoglobulin superfamily of immune regulatory molecules. CTLA-4 is expressed on the surface of T cells, where it is able to suppress T cell activation downstream of T-cell receptor (TCR) signaling. (Schwartz, Cell 71:1065-1068 (1992); Krummel and Allison, J Exp. Med. 182:459-465 (1995)). CTLA-4 is also believed to outcompete the T cell costimulatory CD28 for the B7 ligands, CD80 and CD86, on the surface of antigen-presenting cells (APCs) by binding them with higher affinity and avidity (Linsley et al., J Exp Med. 174:561-569 (1991)). The physiologic role of CTLA-4 is not only to suppress effector T cells (Teffs), but also to increase the function of immunosuppressive, regulatory T cells (Tregs) (Wing et al., Science 322:271-5 (2008)).

[0968] The canonical sequence of human CTLA-4 (SEQ ID NO:1), isoform 1, is 223 amino acids long. It contains a signal peptide at positions 1-35. The mature form comprises residues 36 to 223 (SEQ ID NO:3), of which residues 36-161 are the extracellular domain (SEQ ID NO: 2), residues 162-182 are a transmembrane helix, and residues 183-223 are the intracellular domain. Four additional isoforms have been described in the literature.

[0969] Isoform 2 (SEQ ID NO:4), also known as ss-CTLA-4, is 56 amino acids long and lacks the region from residue 38 to residue 204. Isoform 3 (SEQ ID NO:5) is 58 amino acids long and also lacks the region from residue 38 to residue 204. In addition, isoform 3 has an alternative sequence between residues 205 and 223. Isoform 4 (SEQ ID NO:6) is 79 amino acids long, lacks the region from residue 59 to residue 204, has an alternative sequence from residue 205 to residue 223, and contains a C58S point mutation. Isoform 5 (SEQ ID NO:7) is 174 amino acids long, lacks the sequence from residue 175 to residue 223, and contains an alternative sequence from residue 153 to residue 174.

[0970] Polynucleotides Encoding Anti CTLA-4 Antibodies: The present disclosure provides anti-CTLA-4 polynucleotides. As used herein the term “anti-CTLA-4 polynucleotide” refers to one or more polynucleotides (e.g., one or more mRNAs) encoding an antibody or antigen binding portion thereof which specifically binds to CTLA-4 which can be used in the combination therapies disclosed herein.

[0971] In some embodiments, the anti-CTLA-4 polynucleotide comprises one or more mRNAs (e.g., two, three, four, or more mRNAs) encoding a protein sequence listed in TABLE 1 or a portion thereof that specifically binds to CTLA-4.

[0972] In some embodiments, the anti-CTLA-4 polynucleotide comprises one or more mRNAs corresponding to the full sequence or a subsequence of a DNA sequence listed in TABLE 1, wherein said subsequence encodes a polypeptide that specifically binds to CTLA-4.

TABLE 1
Anti-CTLA-4 Antibody Polypeptide and Polynucleotide Sequences

| SEQ | |
|---|---|
| ID NO | Description |
| 8 | VH DNA (CTLA-4-Ab_001) |
| 9 | VH protein (CTLA-4-Ab_001) |
| 10 | VL DNA (CTLA-4-Ab_001) |
| 11 | VL protein (CTLA-4-Ab_001) |
| 12 | VH protein (CTLA-4-Ab_001A) |
| 13 | VL protein (CTLA-4-Ab_001A) |
| 14 | VH-CDR1 protein (CTLA-4-Ab_001) |
| 15 | VH-CDR2 protein (CTLA-4-Ab_001) |
| 16 | VH-CDR3 protein (CTLA-4-Ab_001) |
| 17 | VL-CDR1 protein (CTLA-4-Ab_001) |
| 18 | VL-CDR2 protein (CTLA-4-Ab_001) |
| 19 | VL-CDR3 protein (CTLA-4-Ab_001) |
| 20 | HC DNA (CTLA-4-Ab_001, VH encoding portion differs from |
| | Sequence 8 by three nucleotides) |
| 21 | HC protein (CTLA-4-Ab_001, VH portion differs from |
| | Sequence 9 by two amino acids) |
| 22 | LC DNA (CTLA-4-Ab_001) |
| 23 | LC protein (CTLA-4-Ab_001) |
| 24 | HC DNA (CTLA-4-Ab_002) |
| 25 | HC protein (CTLA-4-Ab_002) |
| 26 | LC DNA (CTLA-4-Ab_002) |
| 27 | LC protein (CTLA-4-Ab_002) |
| 28 | VH protein (CTLA-4-Ab_002) |
| 29 | VL protein (CTLA-4-Ab_002) |
| 30 | VH-CDR1 protein (CTLA-4-Ab_002) |
| 31 | VH-CDR2 protein (CTLA-4-Ab_002) |
| 32 | VH-CDR3 protein (CTLA-4-Ab_002) |
| 33 | VL-CDR1 protein (CTLA-4-Ab_002) |
| 34 | VL-CDR2 protein (CTLA-4-Ab_002) |
| 35 | VL-CDR3 protein (CTLA-4-Ab_002) |
| 36 | HC DNA N294Q aglycosylated (CTLA-4-Ab_002) |
| 37 | HC protein N294Q aglycosylated (CTLA-4-Ab_002) |
| 38 | VH DNA (CTLA-4-Ab_003) |
| 39 | VH protein (CTLA-4-Ab_003) |
| 40 | VL DNA (CTLA-4-Ab_003) |
| 41 | VL protein (CTLA-4-Ab_003) |
| 42 | VH protein (CTLA-4-Ab_003A) |
| 43 | VL protein (CTLA-4-Ab_003A) |
| 44 | VH-CDR1 protein (CTLA-4-Ab_003) |
| 45 | VH-CDR2 protein (CTLA-4-Ab_003) |
| 46 | VH-CDR3 protein (CTLA-4-Ab_003) |
| 47 | VL-CDR1 protein (CTLA-4-Ab_003) |
| 48 | VL-CDR2 protein (CTLA-4-Ab_003) |
| 49 | VL-CDR3 protein (CTLA-4-Ab_003) |
| 50 | HC DNA (CTLA-4-Ab_004) |
| 51 | HC protein (CTLA-4-Ab_004) |
| 52 | LC DNA (CTLA-4-Ab_004) |
| 53 | LC protein (CTLA-4-Ab_004) |
| 54 | VH protein (CTLA-4-Ab_004) |
| 55 | VL protein (CTLA-4-Ab_004) |
| 56 | VH-CDR1 protein (CTLA-4-Ab_004) |
| 57 | VH-CDR2 protein (CTLA-4-Ab_004) |
| 58 | VH-CDR3 protein (CTLA-4-Ab_004) |
| 59 | VL-CDR1 protein (CTLA-4-Ab_004) |
| 60 | VL-CDR2 protein (CTLA-4-Ab_004) |
| 61 | VL-CDR3 protein (CTLA-4-Ab_004) |
| 62 | VH DNA (CTLA-4-Ab_005) |
| 63 | VH protein (CTLA-4-Ab_005) |
| 64 | VL DNA (CTLA-4-Ab_005) |
| 65 | VL protein (CTLA-4-Ab_005) |
| 66 | VH protein (CTLA-4-Ab_005A) |
| 67 | VL protein (CTLA-4-Ab_005A) |
| 68 | VH-CDR1 protein (CTLA-4-Ab_005) |
| 69 | VH-CDR2 protein (CTLA-4-Ab_005) |
| 70 | VH-CDR3 protein (CTLA-4-Ab_005) |
| 71 | VL-CDR1 protein (CTLA-4-Ab_005) |
| 72 | VL-CDR2 protein (CTLA-4-Ab_005) |
| 73 | VL-CDR3 protein (CTLA-4-Ab_005) |
| 74 | HC DNA (CTLA-4-Ab_006) |
| 75 | HC protein (CTLA-4-Ab_006) |
| 76 | LC DNA (CTLA-4-Ab_006) |
| 77 | LC protein (CTLA-4-Ab_006) |
| 78 | VH protein (CTLA-4-Ab_006) |
| 79 | VL protein (CTLA-4-Ab_006) |
| 80 | VH-CDR1 protein (CTLA-4-Ab_006) |
| 81 | VH-CDR2 protein (CTLA-4-Ab_006) |
| 82 | VH-CDR3 protein (CTLA-4-Ab_006) |
| 83 | VL-CDR1 protein (CTLA-4-Ab_006) |
| 84 | VL-CDR2 protein (CTLA-4-Ab_006) |
| 85 | VL-CDR3 protein (CTLA-4-Ab_006) |
| 86 | VH DNA (CTLA-4-Ab_007) |
| 87 | VH protein (CTLA-4-Ab_007) |
| 88 | VL DNA (CTLA-4-Ab_007) |
| 89 | VL protein (CTLA-4-Ab_007) |
| 90 | VH protein (CTLA-4-Ab_007A) |
| 91 | VL protein (CTLA-4-Ab_007A) |
| 92 | VH-CDR1 protein (CTLA-4-Ab_007) |
| 93 | VH-CDR2 protein (CTLA-4-Ab_007) |
| 94 | VH-CDR3 protein (CTLA-4-Ab_007) |
| 95 | VL-CDR1 protein (CTLA-4-Ab_007) |
| 96 | VL-CDR2 protein (CTLA-4-Ab_007) |
| 97 | VL-CDR3 protein (CTLA-4-Ab_007) |
| 98 | VH DNA (CTLA-4-Ab_008) |
| 99 | VH protein (CTLA-4-Ab_008) |
| 100 | VL DNA (CTLA-4-Ab_008) |
| 101 | VL protein (CTLA-4-Ab_008) |
| 102 | VH protein (CTLA-4-Ab_008A) |
| 103 | VL protein (CTLA-4-Ab_008A) |
| 104 | VH-CDR1 protein (CTLA-4-Ab_008) |
| 105 | VH-CDR2 protein (CTLA-4-Ab_008) |
| 106 | VH-CDR3 protein (CTLA-4-Ab_008) |
| 107 | VL-CDR1 protein (CTLA-4-Ab_008) |
| 108 | VL-CDR2 protein (CTLA-4-Ab_008) |
| 109 | VL-CDR3 protein (CTLA-4-Ab_008) |
| 110 | VH DNA (CTLA-4-Ab_009) |
| 111 | VH protein (CTLA-4-Ab_009) |
| 112 | VL DNA (CTLA-4-Ab_009) |
| 113 | VL protein (CTLA-4-Ab_009) |
| 114 | VH protein (CTLA-4-Ab_009) |
| 115 | VL protein (CTLA-4-Ab_009) |
| 116 | VH-CDR1 protein (CTLA-4-Ab_009) |
| 117 | VH-CDR2 protein (CTLA-4-Ab_009) |
| 118 | VH-CDR3 protein (CTLA-4-Ab_009) |
| 119 | VL-CDR1 protein (CTLA-4-Ab_009) |
| 120 | VL-CDR2 protein (CTLA-4-Ab_009) |
| 121 | VL-CDR3 protein (CTLA-4-Ab_009) |
| 122 | VH DNA (CTLA-4-Ab_010) |
| 123 | VH protein (CTLA-4-Ab_010) |
| 124 | VL DNA (CTLA-4-Ab_010) |
| 125 | VL protein (CTLA-4-Ab_010) |
| 126 | VH protein (CTLA-4-Ab_010) |
| 127 | VL protein (CTLA-4-Ab_010) |
| 128 | VH-CDR1 protein (CTLA-4-Ab_010) |
| 129 | VH-CDR2 protein (CTLA-4-Ab_010) |
| 130 | VH-CDR3 protein (CTLA-4-Ab_010) |
| 131 | VL-CDR1 protein (CTLA-4-Ab_010) |
| 132 | VL-CDR2 protein (CTLA-4-Ab_010) |
| 133 | VL-CDR3 protein (CTLA-4-Ab_010) |
| 134 | VH DNA (CTLA-4-Ab_011) |
| 135 | VH protein (CTLA-4-Ab_011) |
| 136 | VL DNA (CTLA-4-Ab_011) |
| 137 | VL protein (CTLA-4-Ab_011) |
| 138 | VH protein (CTLA-4-Ab_011) |
| 139 | VL protein (CTLA-4-Ab_011) |
| 140 | VH-CDR1 protein (CTLA-4-Ab_011) |
| 141 | VH-CDR2 protein (CTLA-4-Ab_011) |
| 142 | VH-CDR3 protein (CTLA-4-Ab_011) |
| 143 | VL-CDR1 protein (CTLA-4-Ab_011) |
| 144 | VL-CDR2 protein (CTLA-4-Ab_011) |
| 145 | VL-CDR3 protein (CTLA-4-Ab_011) |
| 146 | VH DNA (CTLA-4-Ab_012) |
| 147 | VH protein (CTLA-4-Ab_012) |
| 148 | VL DNA (CTLA-4-Ab_012) |
| 149 | VL protein (CTLA-4-Ab_012) |
| 150 | VH protein (CTLA-4-Ab_012) |
| 151 | VL protein (CTLA-4-Ab_0124) |
| 152 | VH-CDR1 protein (CTLA-4-Ab_012) |
| 153 | VH-CDR2 protein (CTLA-4-Ab_012) |
| 154 | VH-CDR3 protein (CTLA-4-Ab_012) |
| 155 | VL-CDR1 protein (CTLA-4-Ab_012) |
| 156 | VL-CDR2 protein (CTLA-4-Ab_012) |
| 157 | VL-CDR3 protein (CTLA-4-Ab_012) |
| 158 | VH DNA (CTLA-4-Ab_013) |
| 159 | VH protein (CTLA-4-Ab_013) |
| 160 | VL DNA (CTLA-4-Ab_013) |
| 161 | VL protein (CTLA-4-Ab_013) |
| 162 | VH protein (CTLA-4-Ab_013) |
| 163 | VL protein (CTLA-4-Ab_013) |
| 164 | VH-CDR1 protein (CTLA-4-Ab_013) |
| 165 | VH-CDR2 protein (CTLA-4-Ab_013) |
| 166 | VH-CDR3 protein (CTLA-4-Ab_013) |
| 167 | VL-CDR1 protein (CTLA-4-Ab_013) |
| 168 | VL-CDR2 protein (CTLA-4-Ab_013) |
| 169 | VL-CDR3 protein (CTLA-4-Ab_013) |
| 170 | 9D9 VH mIgG2Aa; Construct Sequence, RNA (5′ UTR, ORF, |
| | 3′ UTR) |
| 171 | 9D9 VH mIgG2Aa; ORF Sequence, protein |
| 172 | 9D9 VH mIgG2Aa; ORF Sequence, RNA |
| 173 | 9D9 VH mIgG2Aa; mRNA Sequence (assumes T100 tail) |
| 174 | 9D9 VH mIgG2B; Construct Sequence, RNA (5′ UTR, ORF, |
| | 3′ UTR) |
| 175 | 9D9 VH mIgG2B; ORF Sequence, protein |
| 176 | 9D9 VH mIgG2B; ORF Sequence, RNA |
| 177 | 9D9 VH mIgG2B; mRNA Sequence (assumes T100 tail) |
| 178 | 9D9 VL mIgK; Construct Sequence, RNA (5′ UTR, ORF, |
| | 3′ UTR) |
| 179 | 9D9 VL mIgKappa; ORF Sequence, protein |
| 180 | 9D9 VL mIgKappa; ORF Sequence, RNA |
| 181 | 9D9 VL mIgKappa; mRNA Sequence (assumes T100 tail) |
| 182 | VH DNA (CTLA-4-Ab_014) |
| 183 | VH protein (CTLA-4-Ab_014) |
| 184 | VL DNA (CTLA-4-Ab_014) |
| 185 | VL protein (CTLA-4-Ab_014) |
| 186 | VH-CDR1 protein (CTLA-4-Ab_014) |
| 187 | VH-CDR2 protein (CTLA-4-Ab_014) |
| 188 | VH-CDR3 protein (CTLA-4-Ab_014) |
| 189 | VL-CDR1 protein (CTLA-4-Ab_014) |
| 190 | VL-CDR2 protein (CTLA-4-Ab_014) |
| 191 | VL-CDR3 protein (CTLA-4-Ab_014) |
| 237 | VL DNA (CTLA-4-Ab_015) |
| 238 | VL protein (CTLA-4-Ab_015) |
| 239 | VH DNA (CTLA-4-Ab_015) |
| 240 | VH protein (CTLA-4-Ab_015) |
| 241 | VL DNA (CTLA-4-Ab_015A) |
| 242 | VL protein (CTLA-4-Ab_015A) |
| 243 | VH DNA (CTLA-4-Ab_015A) |
| 244 | VH protein (CTLA-4-Ab_015A) |
| 245 | VL-CDR1 (CTLA-4-Ab_015) |
| 246 | VL-CDR2 (CTLA-4-Ab_015) |
| 247 | VL-CDR3 (CTLA-4-Ab_015) |
| 248 | VH-CDR1 (CTLA-4-Ab_015) |
| 249 | VH-CDR2 (CTLA-4-Ab_015) |
| 250 | VH-CDR3 (CTLA-4-Ab_015) |

[0973] In addition to the anti-CTLA-4 polynucleotide sequences provided in TABLE 1, the methods disclosed herein can be practiced using any of the sequences of anti-CTLA-4 antibodies and antigen binding portions thereof disclosed in U.S. Pat. Nos. U.S. Pat. Nos. 8,017,114 and 6,984,720, International Publication Nos. WO2000037504 and WO2007113648, U.S. Patent Appl. Publ. No. US20140105914 (humanized anti CTLA-4), U.S. Pat. No. 8,697,845 (targeting soluble CTLA-4), U.S. Pat. No. 7,034,121, U.S. Pat. Nos. U.S. Pat. Nos. 8,883,984 and 7,824,679, 6,682,736, or International Publication No. WO 2014209804 (bispecific anti CTLA-4/PD-1), all of which are herein incorporated by reference in their entireties.

[0974] In some embodiments, a anti-CTLA-4 polynucleotide disclosed herein comprises one or more mRNAs (e.g., two, three, four, or more mRNAs) encoding an antibody or an antigen binding portion thereof which specifically binds to CTLA-4, e.g., a mammalian CTLA-4 polypeptide. In some embodiments, the mammalian CTLA-4 polypeptide is a human CTLA-4 polypeptide. In some embodiments, the CTLA-4 polypeptide comprises the amino acid sequence set forth in SEQ ID NO: 1. In another embodiment, the CTLA-4 polypeptide comprises an amino acid sequence set forth in SEQ ID NOS: 2-7.

[0975] In some embodiments, an mRNA encoding an antibody or an antigen binding portion thereof which specifically binds to CTLA-4 of the present disclosure comprises an amino acid sequence at least 50%, at least 55%, at least 60%, at least 65%, at least 70%, at least 75%, at least 80%, at least 85%, at least 90%, at least 95%, at least 96%, at least 97%, at least 98%, at least 99%, or 100% identical to an amino acid sequence listed in TABLE 1 or an amino acid sequence encoded by a nucleotide sequence listed in TABLE 1, wherein the protein encoded by said amino acid sequence is capable of specifically binding to CTLA-4.

[0976] In other embodiments, an antibody or an antigen binding portion thereof which specifically binds to CTLA-4 useful for the disclosure comprises an amino acid sequence listed in TABLE 1 with one or more conservative substitutions, wherein the conservative substitutions do not affect the binding of the antibody or an antigen binding portion thereof to CTLA-4, i.e., the antibody or an antigen binding portion thereof binds to CTLA-4 after the substitutions. In some embodiments, the amino acid sequences comprises at least one nonconservative substitution.

[0977] In other embodiments, a nucleotide sequence (i.e., an mRNA) encoding an antibody or an antigen binding portion thereof which specifically binds to CTLA-4 useful for the disclosure comprises a sequence at least 50%, at least 55%, at least 60%, at least 65%, at least 70%, at least 75%, at least 80%, at least 85%, at least 90%, at least 95%, at least 96%, at least 97%, at least 98%, at least 99%, or 100% identical to a nucleic acid sequence listed in TABLE 1 or a subsequence thereof.

[0978] In some embodiments, the mRNA comprises a codon optimized sequence encoding an antibody or an antigen binding portion thereof which specifically binds to CTLA-4 useful for the disclosure, e.g., a codon optimized nucleic acid sequence corresponding to a nucleic acid sequence or subsequence thereof from TABLE 1, or corresponding to a nucleic acid sequence encoding a anti-CTLA-4 polypeptide sequence from TABLE 1 or a combination thereof (e.g., a codon optimized sequence comprising several anti-CTLA-4 polynucleotide subsequences encoding a combination of CDRs disclosed in TABLE 1).

[0979] The present disclosure also provides an anti-CTLA-4 polynucleotide comprising one or more mRNAs (e.g., two, three or more mRNAs) which encode an antibody or an antigen binding portion thereof which specifically binds to CTLA-4 and which specifically binds to the same CTLA-4 epitope as: (i) an antibody or antigen-binding portion thereof comprising a heavy chain variable region (VH) of SEQ ID NO: 9, 28, or 39, and a light chain variable region (VL) of SEQ ID NO: 11, 29 or 41, or (ii) an antibody or antigen-binding portion comprising a VH of SEQ ID NO: 183 and a VL of SEQ ID NO: 185.

[0980] The present disclosure also provides anti-CTLA-4 polynucleotides comprising one or more mRNAs (e.g., two, three or more mRNAs) which encode an antibody or an antigen binding portion thereof which specifically binds to CTLA-4 and competitively inhibits CTLA-4 binding by: (i) an antibody or antigen-binding portion thereof comprising a VH of SEQ ID NO: 9, 28, or 39 and a VL of SEQ ID NO: 11, 29 or 41; or, (ii) an antibody or antigen-binding portion thereof comprising a VH of SEQ ID NO: 183 and a VL of SEQ ID NO: 185.

[0981] Also provided is an anti-CTLA-4 polynucleotide comprising one or more mRNAs (e.g., two, three or more mRNAs) which encode: (i) an antibody or an antigen binding portion thereof which specifically binds to CTLA-4 comprising a VH of SEQ ID NO: 9, 28, or 39 and a VL of SEQ ID NO: 11, 29 or 41; or, (ii) an antibody or antigen-binding portion thereof comprising a VH of SEQ ID NO: 183 and a VL of SEQ ID NO: 185.

[0982] The present disclosure also provides an anti-CTLA-4 polynucleotide comprising one or more mRNAs (e.g., two, three or more mRNAs) which encode an antibody or an antigen binding portion thereof which specifically binds to CTLA-4, wherein the antibody or an antigen binding portion thereof comprises: (i) a VL complementarity determining region 1 (VL-CDR1) amino acid sequence identical to, or identical except for four, three, two or one amino acid substitutions to SEQ ID NO: 17, 33, or 47 or SEQ ID NO: 189; (ii) a VL complementarity determining region 1 (VL-CDR2) amino acid sequence identical to, or identical except for four, three, two or one amino acid substitutions to SEQ ID NO: 18, 34 or 48 or SEQ ID NO: 190; (iii) a VL complementarity determining region 1 (VL-CDR3) amino acid sequence identical to, or identical except for four, three, two or one amino acid substitutions to SEQ ID NO: 19, 35 or 49 or SEQ ID NO: 191; (iv) a VH complementarity determining region 1 (VH-CDR1) amino acid sequence identical to, or identical except for four, three, two or one amino acid substitutions to SEQ ID NO: 14, 30 or 44 or SEQ ID NO: 186; (v) a VH complementarity determining region 1 (VH-CDR2) amino acid sequence identical to, or identical except for four, three, two or one amino acid substitutions to SEQ ID NO: 15, 31, or 45 or SEQ ID NO: 187; (vi) a VH complementarity determining region 1 (VH-CDR3) amino acid sequence identical to, or identical except for four, three, two or one amino acid substitutions to SEQ ID NO:16, 32, or 46 or SEQ ID NO:188; (vii) a combination thereof. In some aspects, the substitutions are conservative substitutions. In other aspects, the substitutions are non-conservative substitutions.

[0983] The present disclosure also provides an anti-CTLA-4 polynucleotide comprising one or more mRNAs (e.g., two, three or more mRNAs) which encode an antibody or an antigen binding portion thereof which specifically binds to CTLA-4, and which comprises (i) a VL, wherein the VL comprises VL-CDR1, VL-CDR2, and VL-CDR3 amino acid sequences identical to, or identical except for four, three, two, or one amino acid substitutions in one or more of the VL-CDRS to: SEQ ID NOs: 17, 18, and 19; SEQ ID NOs: 33, 34, and 35; SEQ ID NOs: 47, 48, and 49; or, SEQ ID NOs: 189, 190, and 191, respectively; (ii) a VH, wherein the VH comprises VH-CDR1, VH-CDR2, and VH-CDR3 amino acid sequences identical to, or identical except for four, three, two, or one amino acid substitutions in one or more of the VH-CDRS to: SEQ ID NOs:14,15, and 16; SEQ ID NOs: 30, 31, and 32; SEQ ID NOs: 44, 45, and 46; or, SEQ ID NOs: 186, 187, and 188, respectively; or, (iii) a combination thereof. In some aspects, the substitutions are conservative substitutions. In other aspects, the substitutions are non-conservative substitutions.

[0984] The present disclosure also provides an anti-CTLA-4 polynucleotide comprising one or more mRNAs (e.g., two, three, four, or more mRNAs) which encode an antibody or an antigen binding portion thereof which specifically binds to CTLA-4, and which comprises a VL and a VH comprising VL-CDR1, VL-CRD2, VL-CDR3, VH-CDR1, VH-CDR2, and VH-CDR3 amino acid sequences identical or identical except for four, three, two, or one amino acid substitutions in one or more CDRs to: SEQ ID NOs: 17, 18, 19, 14, 15, and 16; or SEQ ID NOs: 33, 34, 35, 30, 31, and 32; or SEQ ID NOs: 47, 48, 39, 44, 45, and 46; or, SEQ ID NOs: 189, 190, 191, 186, 187, and 188, respectively. In some aspects, the substitutions are conservative substitutions. In other embodiments, the substitutions are non-conservative substitutions.

[0985] Also provided is an anti-CTLA-4 polynucleotide comprising one or more mRNAs (e.g., two, three, four, or more mRNAs) which encode an antibody or an antigen binding portion thereof which specifically binds to CTLA-4, and which comprises a VL and a VH, wherein the VL comprises an amino acid sequence having at least 80%, at least 85%, at least 90%, at least 95%, at least 96%, at least 97%, at least 98%, at least 99%, or 100% sequence identity to SEQ ID NO: 11, SEQ ID NO: 29, SEQ ID NO:41, or SEQ ID NO: 185.

[0986] The present disclosure also provides an anti-CTLA-4 polynucleotide comprising one or more mRNAs (e.g., two, three, four, or more mRNAs) which encode an antibody or an antigen binding portion thereof which specifically binds to CTLA-4, and which comprises a VL and a VH, wherein the VH comprises an amino acid sequence having at least 80%, at least 85%, at least 90%, at least 95%, at least 96%, at least 97%, at least 98%, at least 99%, or 100% sequence identity to SEQ ID NO: 14, SEQ ID NO: 30, SEQ ID NO:44, or SEQ ID NO: 186, wherein at least one nucleoside in the polynucleotide is a chemically modified nucleoside.

[0987] Also provided is an anti-CTLA-4 polynucleotide comprising one or more mRNAs (e.g., two, three, four, or more mRNAs) which encode an antibody or an antigen binding portion thereof which specifically binds to CTLA-4, and which comprises a VL and a VH, wherein (i) the VL comprises an amino acid sequence having at least 80%, at least 85%, at least 90%, at least 95%, at least 96%, at least 97%, at least 98%, at least 99%, or 100% sequence identity to SEQ ID NO: 11, SEQ ID NO: 29, or SEQ ID NO:41, and the VH comprises an amino acid sequence having at least 80%, at least 85%, at least 90%, at least 95%, at least 96%, at least 97%, at least 98%, at least 99%, or 100% sequence identity to SEQ ID NO: 9, SEQ ID NO: 28, or SEQ ID NO:39; or, (ii) the VL comprises an amino acid sequence having at least 80%, at least 85%, at least 90%, at least 95%, at least 96%, at least 97%, at least 98%, at least 99% sequence identity to SEQ ID NO: 185, and the VH comprises an amino acid sequence having at least 80%, at least 85%, at least 90%, at least 95%, at least 96%, at least 97%, at least 98%, at least 99% sequence identity to SEQ ID NO: 183.

[0988] The present disclosure also provides an anti-CTLA-4 polynucleotide comprising one or more mRNAs (e.g., two, three, four or more mRNAs) which encode an antibody or an antigen binding portion thereof which specifically binds to CTLA-4, and which comprises a VL and a VH, wherein (i) the VL consists or consists essentially of the amino acid sequence of SEQ ID NO: 11, SEQ ID NO: 29, or SEQ ID NO:41, and the VH consists or consists essentially of the amino acid sequence of SEQ ID NO: 9, SEQ ID NO: 28, or SEQ ID NO:39; or, (ii) the VL consists or consists essentially of the amino acid sequence of SEQ ID NO: 185, wherein the VH consists or consists essentially of the amino acid sequence of SEQ ID NO: 183.

[0989] In some embodiments, at least one mRNA encoding an antibody or an antigen binding portion thereof which specifically binds to CTLA-4 further encodes a heavy chain constant region or fragment thereof. In some embodiments, the heavy chain constant region or fragment thereof is an IgG constant region. In some embodiments, the heavy chain IgG constant region is selected from an IgG1 constant region, an IgG2 constant region, an IgG3 constant region and an IgG4 constant region. In some embodiments, the IgG constant region comprises a CH1 domain, a CH2 domain, a CH3 domain, or a combination thereof.

[0990] In some embodiments, at least one mRNA encoding an antibody or an antigen binding portion thereof which specifically binds to CTLA-4 further encodes a light chain constant region or fragment thereof. In some embodiments, the light chain constant region is selected from the group consisting of a kappa constant region and a lambda constant region.

[0991] The present disclosure also provides an anti-CTLA-4 polynucleotide comprising one or more mRNAs (e.g., two, three, four or more) which encode an antibody or an antigen binding portion thereof which specifically binds to CTLA-4, and which comprises a heavy chain (HC) a light chain (LC), wherein the HC comprises, consists, or consists essentially of the amino acid sequence of SEQ ID NO: 20 or SEQ ID NO:24, and the LC comprises, consists, or consists essentially of the amino acid sequence of SEQ ID NO: 22 or SEQ ID NO: 26.

[0992] In some embodiments, the antibody or antigen binding portion thereof which specifically binds to CTLA-4 is a complete antibody, an antibody variant, an antibody fragment, or a combination thereof. In other embodiments, the antibody or antigen binding portion thereof which specifically binds to CTLA-4 comprises, consists, or consists essentially of the antibody fragment, and wherein the antibody fragment is an scFv, Fv, Fab, F(ab′)2, Fab′, dsFv, or sc(Fv)₂. In some embodiments, the antibody or antigen binding portion thereof which specifically binds to CTLA-4 is an intrabody, a bicistronic antibody, a pseudobicistronic antibody, a single domain antibody, or a bispecific antibody. In some aspects, the CTLA-4 is human CTLA-4.

[0993] In some embodiments, binding of the antibody or antigen binding portion thereof to CTLA-4: (i) reduces the size of the tumor; (ii) inhibits the growth of the tumor; (iii) reduces tumor cell proliferation in the subject; (iv) increases survival rate; or, (v) a combination thereof. In some embodiments, the tumor is selected from the group consisting of melanoma tumor, lung cancer tumor, bladder cancer tumor, colon cancer tumor, and prostate cancer tumor. In some embodiments, the tumor is a melanoma tumor and wherein the melanoma tumor is a metastatic melanoma tumor. In some embodiments, the tumor is lung cancer tumor and wherein the lung cancer tumor is a non-small cell lung carcinoma (NSCLC) tumor or a small cell lung cancer (SCLC) tumor. In some embodiments, the tumor is a prostate cancer tumor and wherein the prostate cancer tumor is a metastatic hormone-refractory prostate cancer tumor. In some embodiments, the subject is human.

[0994] In some embodiments, the antibody or antigen binding portion thereof which specifically binds to CTLA-4 is encoded by a polynucleotide sequence at least 60%, at least 65%, at least 70%, at least 75%, at least 80%, at least 85%, at least 90%, at least 95%, at least 96%, at least 97%, at least 98%, at least 99%, or 100% identical to SEQ ID NO: 20, SEQ ID NO:24, SEQ ID NO:22, or SEQ ID NO:26, a subsequence thereof, or a combination thereof. In some embodiments, the polynucleotide sequence at least 60%, at least 65%, at least 70%, at least 75%, at least 80%, at least 85%, at least 90%, at least 95%, at least 96%, at least 97%, at least 98%, at least 99%, or 100% identical to at least one of SEQ ID NO: 20, SEQ ID NO:22, SEQ ID NO:24, or SEQ ID NO:26, or to a subsequence thereof that encodes (i) one, two or three VH-CDRs; (ii) one, two or three VL-CDRs; (iii) a VH; (iv) a VL; (v) a HC; (vi) a LC; (vii) a fragment thereof; or, (ix) a combination thereof, wherein the antibody or antigen binding portion thereof which specifically binds to CTLA-4 encoded by said polynucleotide sequence binds to at least one CTLA-4 molecule.

[0995] In one embodiment, the anti-CTLA-4 polynucleotide (e.g., RNA, e.g., mRNA) encodes an ORF encoding a VH and/or an ORF encoding a VL, wherein the ORF encoding the VH has:
[0996] (i) at least 85%, at least 86%, at least 87%, at least 88%, at least 89%, at least 90%, at least 91%, at least 92%, at least 93%, at least 94%, at least 95%, at least 96%, at least 97%, at least 98%, at least 99%, or 100% sequence identity to Treme-HC-Var-IgG1-C014 or Treme-HC-Var-IgG1-CO22;
[0997] (ii) at least 86%, at least 87%, at least 88%, at least 89%, at least 90%, at least 91%, at least 92%, at least 93%, at least 94%, at least 95%, at least 96%, at least 97%, at least 98%, at least 99%, or 100% sequence identity to Treme-HC-Var-IgG1-CO15, Treme-HC-Var-IgG1-CO20, Treme-HC-Var-IgG1-CO23, or Treme-HC-Var-IgG1-C025;
[0998] (iii) at least 87%, at least 88%, at least 89%, at least 90%, at least 91%, at least 92%, at least 93%, at least 94%, at least 95%, at least 96%, at least 97%, at least 98%, at least 99%, or 100% sequence identity to Treme-HC-Var-IgG1-CO16, Treme-HC-Var-IgG1-CO17, or Treme-HC-Var-IgG1-CO19;
[0999] (iv) at least 88%, at least 89%, at least 90%, at least 91%, at least 92%, at least 93%, at least 94%, at least 95%, at least 96%, at least 97%, at least 98%, at least 99%, or 100% sequence identity to Treme-HC-Var-IgG1-CO1, Treme-HC-Var-IgG1-CO3, Treme-HC-Var-IgG1-CO4, Treme-HC-Var-IgG1-CO6, or Treme-HC-Var-IgG1-CO21;
[1000] (v) at least 89%, at least 90%, at least 91%, at least 92%, at least 93%, at least 94%, at least 95%, at least 96%, at least 97%, at least 98%, at least 99%, or 100% sequence identity to Treme-HC-Var-IgG1-CO2, Treme-HC-Var-IgG1-CO7, Treme-HC-Var-IgG1-CO9, Treme-HC-Var-IgG1-CO13, or Treme-HC-Var-IgG1-C024; or
[1001] (vi) at least 90%, at least 91%, at least 92%, at least 93%, at least 94%, at least 95%, at least 96%, at least 97%, at least 98%, at least 99%, or 100% identical to Treme-HC-Var-IgG1-CO5, Treme-HC-Var-IgG1-CO8, Treme-HC-Var-IgG1-CO10, Treme-HC-Var-IgG1-CO11, Treme-HC-Var-IgG1-CO12, or Treme-HC-Var-IgG1-CO18;
[1002] (vii) at least 85%, at least 86%, at least 87%, at least 88%, at least 89%, at least 90%, at least 91%, at least 92%, at least 93%, at least 94%, at least 95%, at least 96%, at least 97%, at least 98%, at least 99%, or 100% identical to Treme-HC-Var-IgG2-CO 11;
[1003] (vii) at least 86%, at least 87%, at least 88%, at least 89%, at least 90%, at least 91%, at least 92%, at least 93%, at least 94%, at least 95%, at least 96%, at least 97%, at least 98%, at least 99%, or 100% identical to Treme-HC-Var-IgG2-CO21 or Treme-HC-Var-IgG2-CO23;
[1004] (viii) at least 87%, at least 88%, at least 89%, at least 90%, at least 91%, at least 92%, at least 93%, at least 94%, at least 95%, at least 96%, at least 97%, at least 98%, at least 99%, or 100% identical to Treme-HC-Var-IgG2-CO3, Treme-HC-Var-IgG2-CO4, Treme-HC-Var-IgG2-CO7, Treme-HC-Var-IgG2-CO15, or Treme-HC-Var-IgG2-CO16;
[1005] (ix) at least 88%, at least 89%, at least 90%, at least 91%, at least 92%, at least 93%, at least 94%, at least 95%, at least 96%, at least 97%, at least 98%, at least 99%, or 100% identical to Treme-HC-Var-IgG2-CO5, Treme-HC-Var-IgG2-CO9, or Treme-HC-Var-IgG2-CO14;
[1006] (x) at least 89%, at least 90%, at least 91%, at least 92%, at least 93%, at least 94%, at least 95%, at least 96%, at least 97%, at least 98%, at least 99%, or 100% identical to Treme-HC-Var-IgG2-CO1, Treme-HC-Var-IgG2-CO6, Treme-HC-Var-IgG2-CO10, Treme-HC-Var-IgG2-CO13, Treme-HC-Var-IgG2-CO17, or Treme-HC-Var-IgG2-CO18;
[1007] (xi) at least 90%, at least 91%, at least 92%, at least 93%, at least 94%, at least 95%, at least 96%, at least 97%, at least 98%, at least 99%, or 100% identical to Treme-HC-Var-IgG2-CO2, Treme-HC-Var-IgG2-CO8, Treme-HC-Var-IgG2-CO12, or Treme-HC-Var-IgG2-CO19;
[1008] (xii) at least 91%, at least 92%, at least 93%, at least 94%, at least 95%, at least 96%, at least 97%, at least 98%, at least 99%, or 100% identical to Treme-HC-Var-IgG2-C020, Treme-HC-Var-IgG2-CO22, or Treme-HC-Var-IgG2-CO24; or
[1009] (xiii) at least 92%, at least 93%, at least 94%, at least 95%, at least 96%, at least 97%, at least 98%, at least 99%, or 100% identical to Treme-HC-Var-IgG2-CO25; and/or wherein the ORF encoding the VL is:
   [1010] (i) at least 83%, at least 84%, at least 85%, at least 86%, at least 87%, at least 88%, at least 89%, at least 90%, at least 91%, at least 92%, at least 93%, at least 94%, at least 95%, at least 96%, at least 97%, at least 98%, at least 99%, or 100% identical to Treme-LC-Var-CO16;
   [1011] (ii) at least 84%, at least 85%, at least 86%, at least 87%, at least 88%, at least 89%, at least 90%, at least 91%, at least 92%, at least 93%, at least 94%, at least 95%, at least 96%, at least 97%, at least 98%, at least 99%, or 100% identical to Treme-LC-Var-C03, Treme-LC-Var-C07, Treme-LC-Var-CO10, Treme-LC-Var-CO12, Treme-LC-Var-C013, Treme-LC-Var-CO19, Treme-LC-Var-C024, or Treme-LC-Var-C025;
   [1012] (iii) at least 85%, at least 86%, at least 87%, at least 88%, at least 89%, at least 90%, at least 91%, at least 92%, at least 93%, at least 94%, at least 95%, at least 96%, at least 97%, at least 98%, at least 99%, or 100% identical to Treme-LC-Var-C05, Treme-LC-Var-C020, or Treme-LC-Var-C022;
   [1013] (iv) at least 86%, at least 87%, at least 88%, at least 89%, at least 90%, at least 91%, at least 92%, at least 93%, at least 94%, at least 95%, at least 96%, at least 97%, at least 98%, at least 99%, or 100% identical to Treme-LC-Var-CO1, Treme-LC-Var-C02, Treme-LC-Var-C04, Treme-LC-Var-C05, Treme-LC-Var-C09, Treme-LC-Var-CO1 1, Treme-LC-Var-CO14, Treme-LC-Var-CO15, Treme-LC-Var-CO17, Treme-LC-Var-C021, or Treme-LC-Var-C023; or
   [1014] (v) at least 87%, at least 88%, at least 89%, at least 90%, at least 91%, at least 92%, at least 93%, at least 94%, at least 95%, at least 96%, at least 97%, at least 98%, at least 99%, or 100% identical to Treme-LC-Var-CO8 or Treme-LC-Var-CO18, and wherein the VH and VL form an antibody or antigen-binding portion thereof which specifically binds to an antigen, e.g., CTLA-4.

[1015] In another embodiment, the anti-CTLA-4 polynucleotide (e.g., RNA, e.g., mRNA) comprises an ORF encoding a VH and an ORF encoding a VL, wherein the ORF encoding the VH has:
[1016] (i) at least 84%, at least 85%, at least 86%, at least 87%, at least 88%, at least 89%, at least 90%, at least 91%, at least 92%, at least 93%, at least 94%, at least 95%, at least 96%, at least 97%, at least 98%, at least 99%, or 100% sequence identity to IPI-HC-Var-C05, IPI-HC-Var-CO 1l, or IPI-HC-Var-CO23;
[1017] (ii) at least 85%, at least 86%, at least 87%, at least 88%, at least 89%, at least 90%, at least 91%, at least 92%, at least 93%, at least 94%, at least 95%, at least 96%, at least 97%, at least 98%, at least 99%, or 100% sequence identity to IPI-HC-Var-CO1, IPI-HC-Var-CO4, IPI-HC-Var-CO7, IPI-HC-Var-CO10, IPI-HC-Var-CO14, or IPI-HC-Var-C020;
[1018] (iii) at least 87%, at least 88%, at least 89%, at least 90%, at least 91%, at least 92%, at least 93%, at least 94%, at least 95%, at least 96%, at least 97%, at least 98%, at least 99%, or 100% sequence identity to IPI-HC-Var-CO3, IPI-HC-Var-CO78, IPI-HC-Var-CO12, or IPI-LC-Var-CO17;
[1019] (iv) at least 88%, at least 89%, at least 90%, at least 91%, at least 92%, at least 93%, at least 94%, at least 95%, at least 96%, at least 97%, at least 98%, at least 99%, or 100% sequence identity to IPI-HC-Var-CO18, IPI-HC-Var-CO19, IPI-HC-Var-CO22, or IPI-HC-Var-CO24;
[1020] (v) at least 89%, at least 90%, at least 91%, at least 92%, at least 93%, at least 94%, at least 95%, at least 96%, at least 97%, at least 98%, at least 99%, or 100% sequence identity to IPI-HC-Var-CO9, IPI-HC-Var-CO16, or IPI-HC-Var-CO25;
[1021] (vi) at least 90%, at least 91%, at least 92%, at least 93%, at least 94%, at least 95%, at least 96%, at least 97%, at least 98%, at least 99%, or 100% identical to IPI-HC-Var-C02, IPI-HC-Var-CO13, or IPI-HC-Var-CO21; (vii) at least 91%, at least 92%, at least 93%, at least 94%, at least 95%, at least 96%, at least 97%, at least 98%, at least 99%, or 100% sequence identity to IPI-HC-Var-CO6; or
[1022] (viii) at least 92%, at least 93%, at least 94%, at least 95%, at least 96%, at least 97%, at least 98%, at least 99%, or 100% sequence identity to IPI-HC-Var-CO15; and/or wherein the ORF encoding the VL has:
[1023] (i) at least 81%, at least 82%, at least 83%, at least 84%, at least 85%, at least 86%, at least 87%, at least 88%, at least 89%, at least 90%, at least 91%, at least 92%, at least 93%, at least 94%, at least 95%, at least 96%, at least 97%, at least 98%, at least 99%, or 100% sequence identity to IPI-LC-Var-CO3;
[1024] (ii) at least 82%, at least 83%, at least 84%, at least 85%, at least 86%, at least 87%, at least 88%, at least 89%, at least 90%, at least 91%, at least 92%, at least 93%, at least 94%, at least 95%, at least 96%, at least 97%, at least 98%, at least 99%, or 100% sequence identity to IPI-LC-Var-CO9 or IPI-LC-Var-CO22;
[1025] (iii) at least 83%, at least 84%, at least 85%, at least 86%, at least 87%, at least 88%, at least 89%, at least 90%, at least 91%, at least 92%, at least 93%, at least 94%, at least 95%, at least 96%, at least 97%, at least 98%, at least 99%, or 100% sequence identity to IPI-LC-Var-CO7 or IPI-LC-Var-CO18;
[1026] (iv) at least 84%, at least 85%, at least 86%, at least 87%, at least 88%, at least 89%, at least 90%, at least 91%, at least 92%, at least 93%, at least 94%, at least 95%, at least 96%, at least 97%, at least 98%, at least 99%, or 100% sequence identity to IPI-LC-Var-CO1, IPI-LC-Var-CO6, IPI-LC-Var-CO10, or IPI-LC-Var-CO25;
[1027] (v) at least 85%, at least 86%, at least 87%, at least 88%, at least 89%, at least 90%, at least 91%, at least 92%, at least 93%, at least 94%, at least 95%, at least 96%, at least 97%, at least 98%, at least 99%, or 100% sequence identity to IPI-LC-Var-CO2, IPI-LC-Var-C04, IPI-LC-Var-CO13, IPI-LC-Var-CO14, IPI-LC-Var-CO15, IPI-LC-Var-C016, IPI-LC-Var-CO23, or IPI-LC-Var-CO24;
[1028] (vi) at least 86%, at least 87%, at least 88%, at least 89%, at least 90%, at least 91%, at least 92%, at least 93%, at least 94%, at least 95%, at least 96%, at least 97%, at least 98%, at least 99%, or 100% sequence identity to IPI-LC-Var-CO5, IPI-LC-Var-C08, IPI-LC-Var-CO11, IPI-LC-Var-CO12, IPI-LC-Var-CO19, or IPI-LC-Var-CO21;
[1029] (vii) at least 87%, at least 88%, at least 89%, at least 90%, at least 91%, at least 92%, at least 93%, at least 94%, at least 95%, at least 96%, at least 97%, at least 98%, at least 99%, or 100% sequence identity to IPI-LC-Var-CO20; or
[1030] (viii) at least 88%, at least 89%, at least 90%, at least 91%, at least 92%, at least 93%, at least 94%, at least 95%, at least 96%, at least 97%, at least 98%, at least 99%, or 100% sequence identity to IPI-LC-Var-CO17.

[1031] In some embodiments, the anti-CTLA-4 polynucleotide is sequence optimized. In certain embodiments, the anti-CTLA-4 polynucleotides are optimized by a known technique in the art.

[1032] In other embodiments, the sequence-optimized anti-CTLA-4 polynucleotide sequences disclosed herein are distinct from the corresponding wild type nucleotide acid sequences and from other known sequence-optimized nucleotide sequences, e.g., these sequence-optimized nucleic acids have unique compositional characteristics. See FIG. 80A to 88B

[1033] In some embodiments, the percentage of uracil or thymine nucleobases in a sequence-optimized nucleotide sequence (e.g., encoding an antibody or antigen-binding portion thereof that specifically binds to CTLA-4, e.g., tremelimumab or ipilimumab, a functional fragment, or a variant thereof) is modified (e.g., reduced) with respect to the percentage of uracil or thymine nucleobases in the reference wild-type nucleotide sequence. Such a sequence is referred to as a uracil-modified or thymine-modified sequence. The percentage of uracil or thymine content in a nucleotide sequence can be determined by dividing the number of uracils or thymines in a sequence by the total number of nucleotides and multiplying by 100. In some embodiments, the sequence-optimized nucleotide sequence has a lower uracil or thymine content than the uracil or thymine content in the reference wild-type sequence. In some embodiments, the uracil or thymine content in a sequence-optimized nucleotide sequence disclosed herein is greater than the uracil or thymine content in the reference wild-type sequence and still maintain beneficial effects, e.g., increased expression and/or reduced Toll-Like Receptor (TLR) response when compared to the reference wild-type sequence.

[1034] The uracil or thymine content of wild-type tremelimumab VH is about 17%. In some embodiments, the uracil or thymine content of a uracil- or thymine-modified sequence encoding a tremelimumab VH of the disclosure is less than 17%. In some embodiments, the uracil or thymine content of a uracil- or thymine-modified sequence encoding a tremelimumab VH of the disclosure is less than 16%, less than 15%, less than 14%, less than 12%, less than 110, less than 10%, less than 9%, less that 8%, less than 7%, or less than 6%. In some embodiments, the uracil or thymine content is not less than 1%, 2%, or 3%. The uracil or thymine content of a sequence disclosed herein, i.e., its total uracil or thymine content is abbreviated herein as % U_{TL} or % T_{TL}.

[1035] In some embodiments, the uracil or thymine content (% U_{TL} or % T_{TL}) of a uracil-or thymine-modified sequence encoding a tremelimumab VH disclosed herein is between 14% and 18%, between 14% and 19%, between 14% and 20%, between 13% and 18%, between 13% and 19%, between 13% and 20%, between 12% and 18%, between 12% and 19%, between 12% and 20%, between 14% and 16%, or between 15% and 16%.

[1036] A uracil- or thymine-modified sequence encoding tremelimumab VH disclosed herein can also be described according to its uracil or thymine content relative to the uracil or thymine content in the corresponding wild-type nucleic acid sequence (% U_{WT} or % T_{WT}), or according to its uracil or thymine content relative to the theoretical minimum uracil or thymine content of a nucleic acid encoding the wild-type protein sequence (% U_{TM} or (% T_{TM}).

[1037] The phrases “uracil or thymine content relative to the uracil or thymine content in the wild type nucleic acid sequence,” refers to a parameter determined by dividing the number of uracils or thymines in a sequence-optimized nucleic acid by the total number of uracils or thymines in the corresponding wild-type nucleic acid sequence and multiplying by 100. This parameter is abbreviated herein as % U_{WT} or % T_{WT}.

[1038] In some embodiments, the % U_{WT} or % T_{WT} of a uracil- or thymine-modified sequence encoding tremelimumab VH of the disclosure is above 60%, above 65%, above 70%, above 75%, above 80%, above 85%, above 90%, or above 95%.

[1039] In some embodiments, the % U_{WT} or % T_{WT} of a uracil- or thymine modified sequence encoding tremelimumab VH of the disclosure is between 85% and 110%, between 80% and 110%, between 75% and 110%, between 85% and 105%, between 80% and 95%, between 70% and 85%, between 65% and 90%, between 65% and 95%, or between 70% and 90%.

[1040] In a particular embodiment, the % U_{WT} or % T_{WT} of a uracil- or thymine-modified sequence encoding tremelimumab VH of the disclosure is between about 80% and about 95%.

[1041] Uracil- or thymine-content relative to the uracil or thymine theoretical minimum, refers to a parameter determined by dividing the number of uracils or thymines in a sequence-optimized nucleotide sequence by the total number of uracils or thymines in a hypothetical nucleotide sequence in which all the codons in the hypothetical sequence are replaced with synonymous codons having the lowest possible uracil or thymine content and multiplying by 100. This parameter is abbreviated herein as % U_{TM} or % T_{TM}

[1042] For DNA it is recognized that thymine is present instead of uracil, and one would substitute T where U appears. Thus, all the disclosures related to, e.g., % U_{TM}, % U_{WT}, or % U_{TL}, with respect to RNA are equally applicable to % T_{TM}, % T_{WT}, or % T_{TL} with respect to DNA.

[1043] In some embodiments, the % U_{TM} of a uracil-modified sequence encoding tremelimumab VH disclosed herein is below 300%, below 295%, below 290%, below 285%, below 280%, below 275%, below 270%, below 265%, below 260%, below 255%, below 250%, below 245%, below 240%, below 235%, below 230%, below 225%, below 220%, below 215%, below 200%, below 195%, below 190%, below 185%, below 180%, below 175%, below 170%, below 165%, below 160%, below 155%, below 150%, below 145%, below 140%, below 139%, below 138%, below 137%, below 136%, below 135%, below 134%, below 133%, below 132%, below 131%, below 130%, below 129%, below 128%, below 127%, below 126%, below 125%, below 124%, below 123%, below 122%, below 121%, below 120%, below 119%, below 118%, below 117%, below 116%, or below 115%.

[1044] In some embodiments, the % U_{TM} of a uracil-modified sequence encoding tremelimumab VH disclosed herein is above 100%, above 1010%, above 102%, above 103%, above 104%, above 105%, above 106%, above 107%, above 108%, above 109%, above 110%, above 111%, above 112%, above 113%, above 114%, above 115%, above 116%, above 117%, above 118%, above 119%, above 120%, above 121%, above 122%, above 123%, above 124%, above 125%, or above 126%, above 127%, above 128%, above 129%, or above 130%.

[1045] In some embodiments, the % U_{TM} of a uracil-modified sequence encoding tremelimumab VH is between 120% and 150%, between 121% and 155%, between 120% and 160%, between 119% and 165%, between 118% and 170%, between 117% and 155%, between 116% and 160%, or between 110% and 160%.

[1046] In some embodiments, the % U_{TM} of a uracil-modified sequence encoding tremelimumab VH of the disclosure is between about 118% and about 151%.

[1047] In some embodiments, a uracil-modified sequence encoding tremelimumab VH disclosed herein has a reduced number of consecutive uracils with respect to the corresponding wild-type nucleic acid sequence. For example, two consecutive leucines can be encoded by the sequence CUUUUG, which includes a four uracil cluster. Such a subsequence can be substituted, e.g., with CUGCUC, which removes the uracil cluster.

[1048] Phenylalanine can be encoded by UUC or UUU. Thus, even if phenylalanines encoded by UUU are replaced by UUC, the synonymous codon still contains a uracil pair (UU). Accordingly, the number of phenylalanines in a sequence establishes a minimum number of uracil pairs (UU) that cannot be eliminated without altering the number of phenylalanines in the encoded polypeptide. For example, if the polypeptide, e.g., wild type tremelimumab VH, has, e.g., 3 phenylalanines, the absolute minimum number of uracil pairs (UU) that a uracil-modified sequence encoding the polypeptide, e.g., wild type tremelimumab VH, may contain is 3.

[1049] Wild type tremelimumab VH contains 4 uracil pairs (UU), and 1 uracil triplets (UUU). In some embodiments, a uracil-modified sequence encoding tremelimumab VH disclosed herein has a reduced number of uracil triplets (UUU) with respect to the wild-type nucleic acid sequence. In some embodiments, a uracil-modified sequence encoding a tremelimumab VH of the disclosure contains 3, 2, 1 or no uracil triplets (UUU).

[1050] In some embodiments, a uracil-modified sequence encoding tremelimumab VH has a reduced number of uracil pairs (UU) with respect to the number of uracil pairs (UU) in the wild-type nucleic acid sequence. In some embodiments, a uracil-modified sequence encoding tremelimumab VH disclosed herein has a number of uracil pairs (UU) corresponding to the minimum possible number of uracil pairs (UU) in the wild-type nucleic acid sequence, e.g., 4 uracil pairs in the case of wild type tremelimumab VH.

[1051] In some embodiments, a uracil-modified sequence encoding tremelimumab VH disclosed herein has at least 1, 2, 3, 4, 5, 6, 7, 8, 9, 10, 11, or 12 uracil pairs (UU) less than the number of uracil pairs (UU) in the wild-type nucleic acid sequence. In some embodiments, a uracil-modified sequence encoding tremelimumab VH of the disclosure has between 1 and 3 uracil pairs (UU).

[1052] The phrase “uracil pairs (UU) relative to the uracil pairs (UU) in the wild type nucleic acid sequence,” refers to a parameter determined by dividing the number of uracil pairs (UU) in a sequence-optimized nucleotide sequence by the total number of uracil pairs (UU) in the corresponding wild-type nucleotide sequence and multiplying by 100. This parameter is abbreviated herein as % UU_{wt}.

[1053] In some embodiments, a uracil-modified sequence encoding tremelimumab VH disclosed herein has a % UU_{wt} less than 275%, less than 250%, less than 200%, less than 150%, less than 140%, less than 130%, less than 120%, less than 110%, less than 100%, less than 95%, less than 90%, less than 85%, less than 80%, less than 75%, less than 70%, less than 65%, less than 60%, less than 65%, less than 60%, less than 55%, or less than 50%.

[1054] In some embodiments, a uracil-modified sequence encoding tremelimumab VH has a % UU_{wt} between 50% and 275%.

[1055] In some embodiments, the anti-CTLA-4 polynucleotide comprises a uracil-modified sequence encoding tremelimumab VH disclosed herein. In some embodiments, the uracil-modified sequence encoding tremelimumab VH comprises at least one chemically modified nucleobase, e.g., 5-methoxyuracil. In some embodiments, at least 95% of a nucleobase (e.g., uracil) in a uracil-modified sequence encoding tremelimumab VH of the disclosure are modified nucleobases. In some embodiments, at least 95% of uracil in a uracil-modified sequence encoding tremelimumab VH is 5-methoxyuracil. In some embodiments, the anti-CTLA-4 polynucleotide comprising a uracil-modified sequence further comprises a miRNA binding site, e.g., a miRNA binding site that binds to miR-122. In some embodiments, the anti-CTLA-4 polynucleotide comprising a uracil-modified sequence is formulated with a delivery agent, e.g., a compound having Formula (I), e.g., any of Compounds 1-147.

[1056] In some embodiments, the “guanine content of” the sequence optimized ORF encoding tremelimumab VH with respect to the theoretical maximum guanine content of a nucleotide sequence encoding tremelimumab VH abbreviated as % G_{TMX} is at least 60%, at least 61%, at least 62%, at least about 63%, at least about 64%, at least about 65%, at least about 66%, about 67%, about 68%, about 69%, about 70%, or about 71%. In some embodiments, the % G_{TMX} is between about 60% and about 80%, between about 65% and about 75%, between about 61% and about 78%, or between about 61% and about 77%.

[1057] In some embodiments, the “cytosine content of” the ORF relative to the theoretical maximum cytosine content of a nucleotide sequence encoding tremelimumab VH abbreviated as % C_{TMX}, is at least 50%, at least 51%, at least about 52%, at least about 53%, at least about 54%, at least about 55%, at least about 56%, at least about 57%, at least about 58%, about 59%, about 60%, about 61%, about 62%, about 63%, about 64%, about 65%, or about 66%. In some embodiments, the % C_{TMX} is between about 60% and about 80%, between about 62% and about 80%, between about 63% and about 79%, or between about 68% and about 76%.

[1058] In some embodiments, the “guanine and cytosine content (G/C) of the ORF relative to the theoretical maximum G/C content in a nucleotide sequence encoding tremelimumab VH abbreviated as % G/C_{TMX} is at least about 81%, at least about 85%, at least about 90%, at least about 95%, or about 100%. The % G/C_{TMX} is between about 80% and about 100%, between about 85% and about 99%, between about 90% and about 97%, or between about 91% and about 96%.

[1059] In some embodiments, the “G/C content in the ORF relative to the G/C content in the corresponding wild-type ORF,” abbreviated as % G/C_{WT} is at least 95%, at least 96%, at least 97%, at least 98%, at least 99%, at least 100%, at least 101%, at least 102%, at least 103%, at least 104%, at least 105%, or at least 106%.

[1060] In some embodiments, the anti-CTLA-4 polynucleotide comprises an open reading frame (ORF) encoding tremelimumab VH, wherein the ORF has been sequence optimized, and wherein each of % U_{TL}, % U_{WT},% U_{TM}, % G_{TL}, % G_{WT}, % G_{TMX}, % C_{TL}, % C_{WT}, % C_{TMX}, % G/C_{TL}, % G/C_{WT}, or % G/C_{TMX}, alone or in a combination thereof is in a range between (i) a maximum corresponding to the parameter's maximum value (MAX) plus about 0.5, 1, 1.5, 2, 2.5, 3, 3.5, 4, 4.5, 5, 5.5, 6, 6.5, 7, 7.5, 8, 8.5, 9, 9.5, or 10 standard deviations (STD DEV), and (ii) a minimum corresponding to the parameter's minimum value (MIN) less 0.5, 1, 1.5, 2, 2.5, 3, 3.5, 4, 4.5, 5, 5.5, 6, 6.5, 7, 7.5, 8, 8.5, 9, 9.5, or 10 standard deviations (STD DEV).

[1061] The uracil or thymine content of wild-type tremelimumab VL is about 24%. In some embodiments, the uracil or thymine content of a uracil- or thymine-modified sequence encoding tremelimumab VL is less than 24%. In some embodiments, the uracil or thymine content of a uracil- or thymine-modified sequence encoding tremelimumab VL of the disclosure is less than 23%, less than 22%, less than 21%, less than 20%, less than 19%, less than 18%, less than 17%, less that 16%, less than 15%, or less than 14%. In some embodiments, the uracil or thymine content is not less than 8%, 9%, or 10%. The uracil or thymine content of a sequence disclosed herein, i.e., its total uracil or thymine content is abbreviated herein as % U_{TL} or % T_{TL}.

[1062] In some embodiments, the uracil or thymine content (% U_{TL} or % T_{TL}) of a uracil-or thymine-modified sequence encoding tremelimumab VL of the disclosure is between 14% and 18%, between 14% and 19%, between 14% and 20%, between 13% and 18%, between 13% and 19%, between 13% and 20%, between 12% and 18%, between 12% and 19%, between 12% and 20%, between 14% and 16%, or between 15% and 16%.

[1063] A uracil- or thymine-modified sequence encoding tremelimumab VL of the disclosure can also be described according to its uracil or thymine content relative to the uracil or thymine content in the corresponding wild-type nucleic acid sequence (% U_{WT} or % T_{WT}), or according to its uracil or thymine content relative to the theoretical minimum uracil or thymine content of a nucleic acid encoding the wild-type protein sequence (% Um or (% T_{TM}).

[1064] The phrases “uracil or thymine content relative to the uracil or thymine content in the wild type nucleic acid sequence,” refers to a parameter determined by dividing the number of uracils or thymines in a sequence-optimized nucleic acid by the total number of uracils or thymines in the corresponding wild-type nucleic acid sequence and multiplying by 100. This parameter is abbreviated herein as % U_{WT} or % T_{WT}.

[1065] In some embodiments, the % U_{WT} or % T_{WT} of a uracil- or thymine-modified sequence encoding tremelimumab VL of the disclosure is above 50%, above 52%, above 54%, above 56%, above 58%, above 60%, above 62%, or above 64%.

[1066] In some embodiments, the % U_{WT} or % T_{WT} of a uracil- or thymine modified sequence encoding tremelimumab VL of the disclosure is between 50% and 80%, between 55% and 80%, between 60% and 80%, between 50% and 90%, between 50% and 70%, between 60% and 85%, between 60% and 90%, between 60% and 95%, or between 70% and 90%.

[1067] In a particular embodiment, the % U_{WT} or % T_{WT} of a uracil- or thymine-modified sequence encoding tremelimumab VL of the disclosure is between about 55% and about 75%.

[1068] In some embodiments, the % U_{TM} of a uracil-modified sequence encoding tremelimumab VL of the disclosure is below 215%, below 210%, below 205%, below 200%, below 195%, below 190%, below 185%, below 180%, below 175%, below 170%, below 165%, below 160%, below 155%, below 150%, below 145%, below 140%, below 135%, below 130%, below 129%, below 128%, below 127%, below 126%, below 125%, below 124%, below 123%, below 122%, below 121%, below 120%, below 119%, below 118%, below 117%, below 116%, or below 115%.

[1069] In some embodiments, the % U_{TM} of a uracil-modified sequence encoding tremelimumab VL of the disclosure is above 100%, above 101%, above 102%, above 103%, above 104%, above 105%, above 106%, above 107%, above 108%, above 109%, above 110%, above 111%, above 112%, above 113%, above 114%, above 115%, above 116%, above 117%, above 118%, above 119%, above 120%, above 121%, above 122%, above 123%, above 124%, above 125%, or above 126%, above 127%, above 128%, above 129%, or above 130%.

[1070] In some embodiments, the % U_{TM} of a uracil-modified sequence encoding tremelimumab VL of the disclosure is between 120% and 170%, between 121% and 165%, between 120% and 160%, between 119% and 165%, between 118% and 170%, between 117% and 155%, between 116% and 160%, or between 110% and 160%.

[1071] In some embodiments, the % U_{TM} of a uracil-modified sequence encoding tremelimumab VL of the disclosure is between about 127% and about 163%.

[1072] In some embodiments, a uracil-modified sequence encoding tremelimumab VL of the disclosure has a reduced number of consecutive uracils with respect to the corresponding wild-type nucleic acid sequence. For example, two consecutive leucines can be encoded by the sequence CUUUUG, which includes a four uracil cluster. Such a subsequence can be substituted, e.g., with CUGCUC, which removes the uracil cluster.

[1073] As discussed above, the number of phenylalanines in a sequence establishes a minimum number of uracil pairs (UU) that cannot be eliminated without altering the number of phenylalanines in the encoded polypeptide. Wild type tremelimumab VL has 5 phenylalanines, thus, the absolute minimum number of uracil pairs (UU) that a uracil-modified sequence encoding the polypeptide, e.g., wild type tremelimumab VL, may contain is 2, 3, 4, 5, 6, 7, 8, 9, 10, or 11 respectively.

[1074] Wild type tremelimumab VL contains 7 uracil pairs (UU), and 4 uracil triplets (UUU). In some embodiments, a uracil-modified sequence encoding tremelimumab VL of the disclosure has a reduced number of uracil triplets (UUU) with respect to the wild-type nucleic acid sequence. In some embodiments, a uracil-modified sequence encoding a tremelimumab VH of the disclosure contains 2, 1 or no uracil triplets (UUU).

[1075] In some embodiments, a uracil-modified sequence encoding tremelimumab VL has a reduced number of uracil pairs (UU) with respect to the number of uracil pairs (UU) in the wild-type nucleic acid sequence. In some embodiments, a uracil-modified sequence encoding tremelimumab VH of the disclosure has a number of uracil pairs (UU) corresponding to the minimum possible number of uracil pairs (UU) in the wild-type nucleic acid sequence, e.g., 4 uracil pairs in the case of wild type tremelimumab VL.

[1076] In some embodiments, a uracil-modified sequence encoding tremelimumab VL of the disclosure has at least 1, 2, 3, or 4 uracil pairs (UU) less than the number of uracil pairs (UU) in the wild-type nucleic acid sequence. In some embodiments, a uracil-modified sequence encoding tremelimumab VH of the disclosure has between 1 and 3 uracil pairs (UU).

[1077] In some embodiments, a uracil-modified sequence encoding tremelimumab VL of the disclosure has a % UU_{wt} less than 150%, less than 145%, less than 140%, less than 135%, less than 130%, less than 125%, less than 120%, less than 110%, less than 100%, less than 95%, less than 90%, less than 85%, less than 80%, less than 75%, less than 70%, less than 65%, less than 60%, less than 65%, less than 60%, less than 55%, or less than 50%.

[1078] In some embodiments, a uracil-modified sequence encoding tremelimumab VL has a % UU_{wt} between 12% and 145%.

[1079] In some embodiments, the polynucleotide of the disclosure comprises a uracil-modified sequence encoding tremelimumab VL disclosed herein. In some embodiments, the uracil-modified sequence encoding tremelimumab VL comprises at least one chemically modified nucleobase, e.g., 5-methoxyuracil. In some embodiments, at least 95% of a nucleobase (e.g., uracil) in a uracil-modified sequence encoding tremelimumab VL of the disclosure are modified nucleobases. In some embodiments, at least 95% of uracil in a uracil-modified sequence encoding tremelimumab VL is 5-methoxyuracil. In some embodiments, the polynucleotide comprising a uracil-modified sequence further comprises a miRNA binding site, e.g., a miRNA binding site that binds to miR-122. In some embodiments, the polynucleotide comprising a uracil-modified sequence is formulated with a delivery agent, e.g., a compound having Formula (I), e.g., any of Compounds 1-147.

[1080] In some embodiments, the “guanine content of” the sequence optimized ORF encoding tremelimumab VL with respect to the theoretical maximum guanine content of a nucleotide sequence encoding tremelimumab VL abbreviated as % G_{TMX} is at least 60%, at least 61%, at least 62%, at least about 63%, at least about 64%, at least about 65%, at least about 66%, about 67%, about 68%, about 69%, about 70%, or about 71%. In some embodiments, the % G_{TMX} is between about 60% and about 80%, between about 65% and about 75%, between about 61% and about 78%, or between about 60% and about 70%.

[1081] In some embodiments, the “cytosine content of” the ORF relative to the theoretical maximum cytosine content of a nucleotide sequence encoding tremelimumab VL abbreviated as % C_{TMX}, is about 60%, about 61%, about 62%, about 63%, about 64%, about 65%, about 66%, at least 70%, at least 72%, at least about 74%, at least about 76%, or at least about 78%. In some embodiments, the % C_{TMX} is between about 60% and about 80%, between about 62% and about 80%, between about 63% and about 79%, or between about 68% and about 76%.

[1082] In some embodiments, the “guanine and cytosine content (G/C) of the ORF relative to the theoretical maximum G/C content in a nucleotide sequence encoding tremelimumab VH abbreviated as % G/C_{TMX} is at least about 81%, at least about 82%, at least about 83%, at least about 84%, at least about 85%, at least about 90%, at least about 95%, at least about 99%, or 100%. The % G/C_{TMX} is between about 80% and about 100%, between about 85% and about 99%, between about 90% and about 97%, or between about 91% and about 96%.

[1083] In some embodiments, the “G/C content in the ORF relative to the G/C content in the corresponding wild-type ORF,” abbreviated as % G/C_{WT} is at least 100%, at least 105%, at least 110%, at least 115%, at least 120%, at least 125%, at least 130%, at least 135%, at least 140%, at least 145%, at least 150%, or at least 155%.

[1084] In some embodiments, the anti-CTLA-4 polynucleotide of the disclosure comprises an open reading frame (ORF) encoding tremelimumab VL, wherein the ORF has been sequence optimized, and wherein each of % U_{TL}, % U_{WT}, % UM, % G_{TL}, % G_{WT}, % G_{TMX}, % C_{TL}, % C_{WT}, % C_{TMX}, % G/C_{TL}, % G/C_{WT}, or % G/C_{TMX}, alone or in a combination thereof is in a range between (i) a maximum corresponding to the parameter's maximum value (MAX) plus about 0.5, 1, 1.5, 2, 2.5, 3, 3.5, 4, 4.5, 5, 5.5, 6, 6.5, 7, 7.5, 8, 8.5, 9, 9.5, or 10 standard deviations (STD DEV), and (ii) a minimum corresponding to the parameter's minimum value (MIN) less 0.5, 1, 1.5, 2, 2.5, 3, 3.5, 4, 4.5, 5, 5.5, 6, 6.5, 7, 7.5, 8, 8.5, 9, 9.5, or 10 standard deviations (STD DEV).

[1085] The uracil or thymine content of wild-type tremelimumab VH is about 17%. In some embodiments, the uracil or thymine content of a uracil- or thymine-modified sequence encoding tremelimumab VH is less than 17%. In some embodiments, the uracil or thymine content of a uracil- or thymine-modified sequence encoding a tremelimumab VH of the disclosure is less than 19%, is less than 18%, is less than 17%, is less than 16%, less than 15%, less than 14%, less than 12%, less than 11%, less than 10%, less than 9%, less that 8%, less than 7%, or less than 6%. In some embodiments, the uracil or thymine content is not less than 1%, 2%, or 3%. The uracil or thymine content of a sequence disclosed herein, i.e., its total uracil or thymine content is abbreviated herein as % U_{TL} or % T_{TL}.

[1086] In some embodiments, the uracil or thymine content (% U_{TL} or % T_{TL}) of a uracil-or thymine-modified sequence encoding tremelimumab VH of the disclosure is between 12% and 21%, between 12% and 20%, between 12% and 19%, between 13% and 18%, between 13% and 17%, between 13% and 19%, between 14% and 21%, between 14% and 20%, and between 14% and 19%.

[1087] A uracil- or thymine-modified sequence encoding tremelimumab VH of the disclosure can also be described according to its uracil or thymine content relative to the uracil or thymine content in the corresponding wild-type nucleic acid sequence (% U_{WT} or % T_{WT}), or according to its uracil or thymine content relative to the theoretical minimum uracil or thymine content of a nucleic acid encoding the wild-type protein sequence (% U_{TM} or (% T_{TM}).

[1088] In some embodiments, the % U_{WT} or % T_{WT} of a uracil- or thymine-modified sequence encoding tremelimumab VH of the disclosure is above 60%, above 65%, above 70%, above 75%, above 80%, above 85%, above 90%, above 95%, above 100%, or above 105%.

[1089] In some embodiments, the % U_{WT} or % T_{WT} of a uracil- or thymine modified sequence encoding tremelimumab VH of the disclosure is between 90% and 125%, between 85% and 125%, between 80% and 125%, between 90% and 120%, between 85% and 110%, between 75% and 100%, between 70% and 105%, between 70% and 110%, or between 75% and 105%.

[1090] In a particular embodiment, the % U_{WT} or % T_{WT} of a uracil- or thymine-modified sequence encoding tremelimumab VH of the disclosure is between about 86% and about 110%.

[1091] In some embodiments, the % U_{TM} of a uracil-modified sequence encoding tremelimumab VH of the disclosure is below 300%, below 295%, below 290%, below 285%, below 280%, below 275%, below 270%, below 265%, below 260%, below 255%, below 250%, below 245%, below 240%, below 235%, below 230%, below 225%, below 220%, below 215%, below 200%, below 195%, below 190%, below 185%, below 180%, below 175%, below 170%, below 165%, below 160%, below 155%, below 153%, below 152%, below 151%, below 150%, below 149%, below 148%, below 147%, below 146%, below 145%, below 140%, below 139%, below 138%, below 137%, below 136%, below 135%, below 134%, below 133%, below 132%, below 131%, below 130%, below 129%, below 128%, below 127%, below 126%, below 125%, below 124%, below 123%, below 122%, below 121%, below or 120%.

[1092] In some embodiments, the % U_{TM} of a uracil-modified sequence encoding tremelimumab VH of the disclosure is above 100%, above 101%, above 102%, above 103%, above 104%, above 105%, above 106%, above 107%, above 108%, above 109%, above 110%, above 111%, above 112%, above 113%, above 114%, above 115%, above 116%, above 117%, above 118%, above 119%, above 120%, above 121%, above 122%, above 123%, above 124%, above 125%, or above 126%, above 127%, above 128%, above 129%, above 130%, above 131%, above 132%, above 133%, above 134%, above 135%, above 136%, above 137%, above 138%, above 139%, above 140%, above 141%, above 142%, above 143%, above 144%, above 145%, above 146%, above 147%, above 148%, above 149%, or above 150%.

[1093] In some embodiments, the % U_{TM} of a uracil-modified sequence encoding a caTLR4 polypeptide of the disclosure is between 120% and 150%, between 121% and 155%, between 120% and 160%, between 119% and 165%, between 118% and 170%, between 117% and 155%, between 116% and 160%, or between 110% and 160%.

[1094] In some embodiments, the % U_{TM} of a uracil-modified sequence encoding tremelimumab VH of the disclosure is between about 119% and about 152%.

[1095] In some embodiments, a uracil-modified sequence encoding tremelimumab VH of the disclosure has a reduced number of consecutive uracils with respect to the corresponding wild-type nucleic acid sequence. For example, two consecutive leucines can be encoded by the sequence CUUUUG, which includes a four uracil cluster. Such a subsequence can be substituted, e.g., with CUGCUC, which removes the uracil cluster.

[1096] Wild type tremelimumab VH contains 4 uracil pairs (UU), and 1 uracil triplets (UUU). In some embodiments, a uracil-modified sequence encoding tremelimumab VH of the disclosure has a reduced number of uracil triplets (UUU) with respect to the wild-type nucleic acid sequence. In some embodiments, a uracil-modified sequence encoding a tremelimumab VH of the disclosure contains 3, 2, 1 or no uracil triplets (UUU).

[1097] In some embodiments, a uracil-modified sequence encoding tremelimumab VH has a reduced number of uracil pairs (UU) with respect to the number of uracil pairs (UU) in the wild-type nucleic acid sequence. In some embodiments, a uracil-modified sequence encoding tremelimumab VH of the disclosure has a number of uracil pairs (UU) corresponding to the minimum possible number of uracil pairs (UU) in the wild-type nucleic acid sequence, e.g., 4 uracil pairs in the case of wild type tremelimumab VH.

[1098] In some embodiments, a uracil-modified sequence encoding tremelimumab VH of the disclosure has at least 1, 2, 3, 4, 5, 6, 7, 8, 9, 10, 11, or 12 uracil pairs (UU) less than the number of uracil pairs (UU) in the wild-type nucleic acid sequence. In some embodiments, a uracil-modified sequence encoding tremelimumab VH of the disclosure has between 1 and 3 uracil pairs (UU).

[1099] In some embodiments, a uracil-modified sequence encoding tremelimumab VH of the disclosure has a % UU_{wt} less than 275%, less than 250%, less than 200%, less than 150%, less than 140%, less than 130%, less than 120%, less than 110%, less than 100%, less than 95%, less than 90%, less than 85%, less than 80%, less than 75%, less than 70%, less than 65%, less than 60%, less than 65%, less than 60%, less than 55%, or less than 50%.

[1100] In some embodiments, a uracil-modified sequence encoding tremelimumab VH has a % UU_{wt} between 50% and 275%.

[1101] In some embodiments, the anti-CTLA-4 polynucleotide of the disclosure comprises a uracil-modified sequence encoding tremelimumab VH disclosed herein. In some embodiments, the uracil-modified sequence encoding tremelimumab VH comprises at least one chemically modified nucleobase, e.g., 5-methoxyuracil. In some embodiments, at least 95% of a nucleobase (e.g., uracil) in a uracil-modified sequence encoding tremelimumab VH of the disclosure are modified nucleobases. In some embodiments, at least 95% of uracil in a uracil-modified sequence encoding tremelimumab VH is 5-methoxyuracil. In some embodiments, the anti-CTLA-4 polynucleotide comprising a uracil-modified sequence further comprises a miRNA binding site, e.g., a miRNA binding site that binds to miR-122. In some embodiments, the anti-CTLA-4 polynucleotide comprising a uracil-modified sequence is formulated with a delivery agent, e.g., a compound having Formula (I), e.g., any of Compounds 1-147.

[1102] In some embodiments, the “guanine content of” the sequence optimized ORF encoding tremelimumab VH with respect to the theoretical maximum guanine content of a nucleotide sequence encoding tremelimumab VH abbreviated as % G_{TMX} is above 60%, at least 61%, at least 62%, at least 63%, at least 64%, at least 65%, at least 66%, at least 67%, at least 68%, at least 69%, at least 70%, or at least 71%. In some embodiments, the % G_{TMX} is between about 60% and about 85%, between about 65% and about 80%, between about 65% and about 78%, or between about 67% and about 76%.

[1103] In some embodiments, the “cytosine content of” the ORF relative to the theoretical maximum cytosine content of a nucleotide sequence encoding tremelimumab VH abbreviated as % C_{TMX}, is at least 50%, at least 51%, at least 52%, at least 53%, at least 54%, at least 55%, at least 56%, at least 57%, at least 58%, at least 59%, at least 60%, at least 61%, at least 62%, at least 63%, at least 64%, at least 65%, or at least 66%. In some embodiments, the % C_{TMX} is between about 60% and about 85%, between about 62% and about 83%, between about 63% and about 81%, or between about 66% and about 80%.

[1104] In some embodiments, the “guanine and cytosine content (G/C) of the ORF relative to the theoretical maximum G/C content in a nucleotide sequence encoding tremelimumab VH abbreviated as % G/C_{TMX} is at least about 80%, at least about 85%, at least about 89%, at least about 90%, at least about 95%, or about 100%. The % G/C_{TMX} is between about 80% and about 100%, between about 85% and about 99%, between about 87% and about 97%, or between about 89% and about 96%.

[1105] In some embodiments, the “G/C content in the ORF relative to the G/C content in the corresponding wild-type ORF,” abbreviated as % G/C_{WT} is at least 95%, at least 96%, at least 97%, at least 98%, at least 99%, at least 100%, at least 101%, at least 102%, at least 103%, at least 104%, at least 105%, or at least 106%.

[1106] In some embodiments, the anti-CTLA-4 polynucleotide of the disclosure comprises an open reading frame (ORF) encoding tremelimumab VH, wherein the ORF has been sequence optimized, and wherein each of % U_{TL}, % U_{WT}, % U_{TM}, % G_{TL}, % G_{WT}, % G_{TMX}, % C_{TL}, % C_{WT}, % C_{TMX}, % G/C_{TL}, % G/C_{WT}, or % G/C_{TMX}, alone or in a combination thereof is in a range between (i) a maximum corresponding to the parameter's maximum value (MAX) plus about 0.5, 1, 1.5, 2, 2.5, 3, 3.5, 4, 4.5, 5, 5.5, 6, 6.5, 7, 7.5, 8, 8.5, 9, 9.5, or 10 standard deviations (STD DEV), and (ii) a minimum corresponding to the parameter's minimum value (MIN) less 0.5, 1, 1.5, 2, 2.5, 3, 3.5, 4, 4.5, 5, 5.5, 6, 6.5, 7, 7.5, 8, 8.5, 9, 9.5, or 10 standard deviations (STD DEV).

[1107] The uracil or thymine content of wild-type tremelimumab VL is about 25%. In some embodiments, the uracil or thymine content of a uracil- or thymine-modified sequence encoding tremelimumab VL is less than 25%. In some embodiments, the uracil or thymine content of a uracil- or thymine-modified sequence encoding a tremelimumab VL of the disclosure is less than 19%, less than 18%, less than 17%, less than 16%, less than 15%, less than 14%, less than 12%, less than 11%, less than 10%, less than 9%, less that 8%, less than 7%, or less than 6%. In some embodiments, the uracil or thymine content is not less than 1%, 2%, or 3%. The uracil or thymine content of a sequence disclosed herein, i.e., its total uracil or thymine content is abbreviated herein as % U_{TL} or % T_{TL}.

[1108] In some embodiments, the uracil or thymine content (% U_{TL} or % T_{TL}) of a uracil-or thymine-modified sequence encoding tremelimumab VL of the disclosure is between 12% and 21%, between 12% and 20%, between 12% and 19%, between 13% and 21%, between 13% and 20%, between 13% and 19%, between 14% and 21%, between 14% and 20%, and between 14% and 19%.

[1109] A uracil- or thymine-modified sequence encoding tremelimumab VL of the disclosure can also be described according to its uracil or thymine content relative to the uracil or thymine content in the corresponding wild-type nucleic acid sequence (% U_{WT} or % T_{WT}), or according to its uracil or thymine content relative to the theoretical minimum uracil or thymine content of a nucleic acid encoding the wild-type protein sequence (% U_{TM} or (% T_{TM}).

[1110] In some embodiments, the % U_{WT} or % T_{WT} of a uracil- or thymine-modified sequence encoding tremelimumab VL of the disclosure is above 58%, above 60%, above 65%, above 70%, above 75%, above 80%, above 85%, above 90%, or above 95%.

[1111] In some embodiments, the % U_{WT} or % T_{WT} of a uracil- or thymine modified sequence encoding tremelimumab VL of the disclosure is between 65% and 90%, between 60% and 90%, between 55% and 90%, between 65% and 85%, between 60% and 75%, between 50% and 65%, between 45% and 70%, between 45% and 75%, or between 50% and 70%.

[1112] In a particular embodiment, the % U_{WT} or % T_{WT} of a uracil- or thymine-modified sequence encoding tremelimumab VL of the disclosure is between about 58% and about 76%.

[1113] In some embodiments, the % U_{TM} of a uracil-modified sequence encoding tremelimumab VL of the disclosure is below 300%, below 295%, below 290%, below 285%, below 280%, below 275%, below 270%, below 265%, below 260%, below 255%, below 250%, below 245%, below 240%, below 235%, below 230%, below 225%, below 220%, below 215%, below 200%, below 195%, below 190%, below 185%, below 180%, below 175%, below 170%, below 165%, below 160%, below 155%, below 150%, below 145%, below 140%, below 139%, below 138%, below 137%, below 136%, below 135%, below 134%, below 133%, below 132%, below 131%, below 130%, below 129%, below 128%, below 127%, below 126%, below 125%, below 124%, below 123%, below 122%, below 121%, below 120%, below 119%, below 118%, below 117%, below 116%, or below 115%.

[1114] In some embodiments, the % U_{TM} of a uracil-modified sequence encoding tremelimumab VL of the disclosure is above 100%, above 101%, above 102%, above 103%, above 104%, above 105%, above 106%, above 107%, above 108%, above 109%, above 110%, above 111%, above 112%, above 113%, above 114%, above 115%, above 116%, above 117%, above 118%, above 119%, above 120%, above 121%, above 122%, above 123%, above 124%, above 125%, or above 126%, above 127%, above 128%, above 129%, above 130%, above 131%, above 132%, above 133%, above 134%, above 135%, above 136%, above 137%, above 138%, above 139%, above 140%, above 141%, above 142%, above 143%, above 144%, above 145%, above 146%, above 147%, above 148%, above 149%, above 150%, above 151%, above 152%, above 153%, above 154%, above 155%, above 156%, above 157%, above 158%, above 159%, or above 160%.

[1115] In some embodiments, the % U_{TM} of a uracil-modified sequence encoding a caTLR4 polypeptide of the disclosure is between 125% and 165%, between 127% and 170%, between 125% and 175%, between 124% and 180%, between 123% and 185%, between 122% and 170%, between 121% and 175%, or between 115% and 175%.

[1116] In some embodiments, the % U_{TM} of a uracil-modified sequence encoding tremelimumab VL of the disclosure is between about 127% and about 164%.

[1117] In some embodiments, a uracil-modified sequence encoding tremelimumab VL of the disclosure has a reduced number of consecutive uracils with respect to the corresponding wild-type nucleic acid sequence. For example, two consecutive leucines can be encoded by the sequence CUUUUG, which includes a four uracil cluster. Such a subsequence can be substituted, e.g., with CUGCUC, which removes the uracil cluster.

[1118] As discussed above, the number of phenylalanines in a sequence establishes a minimum number of uracil pairs (UU) that cannot be eliminated without altering the number of phenylalanines in the encoded polypeptide.

[1119] Wild type tremelimumab VL contains 7 uracil pairs (UU), and 4 uracil triplets (UUU). In some embodiments, a uracil-modified sequence encoding tremelimumab VL of the disclosure has a reduced number of uracil triplets (UUU) with respect to the wild-type nucleic acid sequence. In some embodiments, a uracil-modified sequence encoding a tremelimumab VL of the disclosure contains 3, 2, 1 or no uracil triplets (UUU).

[1120] In some embodiments, a uracil-modified sequence encoding tremelimumab VL has a reduced number of uracil pairs (UU) with respect to the number of uracil pairs (UU) in the wild-type nucleic acid sequence. In some embodiments, a uracil-modified sequence encoding tremelimumab VL of the disclosure has a number of uracil pairs (UU) corresponding to the minimum possible number of uracil pairs (UU) in the wild-type nucleic acid sequence, e.g., 4 uracil pairs in the case of wild type tremelimumab VL.

[1121] In some embodiments, a uracil-modified sequence encoding tremelimumab VL of the disclosure has at least 1, 2, 3, 4, 5, 6, 7, 8, 9, 10, 11, or 12 uracil pairs (UU) less than the number of uracil pairs (UU) in the wild-type nucleic acid sequence. In some embodiments, a uracil-modified sequence encoding tremelimumab VL of the disclosure has between 1 and 3 uracil pairs (UU).

[1122] The phrase “uracil pairs (UU) relative to the uracil pairs (UU) in the wild type nucleic acid sequence,” refers to a parameter determined by dividing the number of uracil pairs (UU) in a sequence-optimized nucleotide sequence by the total number of uracil pairs (UU) in the corresponding wild-type nucleotide sequence and multiplying by 100. This parameter is abbreviated herein as % UU_{wt}.

[1123] In some embodiments, a uracil-modified sequence encoding tremelimumab VL of the disclosure has a % UU_{wt} less than 275%, less than 250%, less than 200%, less than 150%, less than 140%, less than 130%, less than 120%, less than 110%, less than 100%, less than 95%, less than 90%, less than 85%, less than 80%, less than 75%, less than 70%, less than 65%, less than 60%, less than 65%, less than 60%, less than 55%, or less than 50%.

[1124] In some embodiments, a uracil-modified sequence encoding tremelimumab VL has a % UU_{wt} between 12% and 143%.

[1125] In some embodiments, the polynucleotide of the disclosure comprises a uracil-modified sequence encoding tremelimumab VL disclosed herein. In some embodiments, the uracil-modified sequence encoding tremelimumab VL comprises at least one chemically modified nucleobase, e.g., 5-methoxyuracil. In some embodiments, at least 95% of a nucleobase (e.g., uracil) in a uracil-modified sequence encoding tremelimumab VL of the disclosure are modified nucleobases. In some embodiments, at least 95% of uracil in a uracil-modified sequence encoding tremelimumab VL is 5-methoxyuracil. In some embodiments, the polynucleotide comprising a uracil-modified sequence further comprises a miRNA binding site, e.g., a miRNA binding site that binds to miR-122. In some embodiments, the polynucleotide comprising a uracil-modified sequence is formulated with a delivery agent, e.g., a compound having Formula (I), e.g., any of Compounds 1-147.

[1126] In some embodiments, the “guanine content of” the sequence optimized ORF encoding tremelimumab VL with respect to the theoretical maximum guanine content of a nucleotide sequence encoding tremelimumab VL abbreviated as % G_{TMX} is at least 60%, at least 61%, at least 62%, at least 63%, at least 64%, at least 65%, at least 66%, at least 67%, at least 68%, at least 69%, at least 70%, or at least 71%. In some embodiments, the % G_{TMX} is between about 50% and about 80%, between about 55% and about 75%, between about 57% and about 73%, or between about 60% and about 71%.

[1127] In some embodiments, the “cytosine content of” the ORF relative to the theoretical maximum cytosine content of a nucleotide sequence encoding tremelimumab VL abbreviated as % C_{TMX}, is at least 50%, at least 55%, at least 60%, at least 65%, at least 70%, at least 71%, at least 72%, or at least 73%. In some embodiments, the % C_{TMX} is between about 65% and about 90%, between about 70% and about 85%, between about 72% and about 83%, or between about 73% and about 82%.

[1128] In some embodiments, the “guanine and cytosine content (G/C) of the ORF relative to the theoretical maximum G/C content in a nucleotide sequence encoding tremelimumab VL abbreviated as % G/C_{TMX} is at least about 80%, at least about 85%, at least about 89%, at least about 90%, at least about 95%, or about 100%. The % G/C_{TMX} is between about 80% and about 100%, between about 85% and about 99%, between about 87% and about 98%, or between about 89% and about 97%.

[1129] In some embodiments, the “G/C content in the ORF relative to the G/C content in the corresponding wild-type ORF,” abbreviated as % G/C_{WT} is at least 95%, at least 96%, at least 97%, at least 98%, at least 99%, at least 100%, at least 101%, at least 102%, at least 103%, at least 104%, at least 105%, at least 106%, at least 110%, at least 115%, at least 120%, at least 121%, at least 122%, at least 123%, or at least 124%.

[1130] In some embodiments, the polynucleotide of the disclosure comprises an open reading frame (ORF) encoding tremelimumab VL, wherein the ORF has been sequence optimized, and wherein each of % U_{TL}, % U_{WT}, % U_{TM}, % G_{TL}, % G_{WT}, % G_{TMX}, % C_{TL}, % C_{WT}, % C_{TMX}, % G/C_{TL}, % G/C_{WT}, or % G/C_{TMX}, alone or in a combination thereof is in a range between (i) a maximum corresponding to the parameter's maximum value (MAX) plus about 0.5, 1, 1.5, 2, 2.5, 3, 3.5, 4, 4.5, 5, 5.5, 6, 6.5, 7, 7.5, 8, 8.5, 9, 9.5, or 10 standard deviations (STD DEV), and (ii) a minimum corresponding to the parameter's minimum value (MIN) less 0.5, 1, 1.5, 2, 2.5, 3, 3.5, 4, 4.5, 5, 5.5, 6, 6.5, 7, 7.5, 8, 8.5, 9, 9.5, or 10 standard deviations (STD DEV).

[1131] The uracil or thymine content of wild-type tremelimumab-IPI CL is about 180.38%. In some embodiments, the uracil or thymine content of a uracil- or thymine-modified sequence encoding tremelimumab-IPI CL is less than 180.38%. In some embodiments, the uracil or thymine content of a uracil- or thymine-modified sequence encoding a tremelimumab-IPI CL of the disclosure is less than 16%, less than 18%, less than 17%, less than 16%, less than 15%, less than 15%, less than 14%, less that 13%, less than 12%, less than 11%, less than 10%, or less than 9%. In some embodiments, the uracil or thymine content is not less than 17%, 16%, 15%, 14%, 13%, 12%, 11%, or 10%. The uracil or thymine content of a sequence disclosed herein, i.e., its total uracil or thymine content is abbreviated herein as % U_{TL} or % T_{TL}.

[1132] In some embodiments, the uracil or thymine content (% U_{TL} or % T_{TL}) of a uracil-or thymine-modified sequence encoding tremelimumab-IPI CL of the disclosure is between 10% and 18%, between 10.5% and 17.5%, between 11% and 17%, between 11.5% and 17%, between 12% and 17%, between 12.5% and 17%, or between 13% and 17%.

[1133] A uracil- or thymine-modified sequence encoding tremelimumab-IPI CL of the disclosure can also be described according to its uracil or thymine content relative to the uracil or thymine content in the corresponding wild-type nucleic acid sequence (% U_{WT} or % T_{WT}), or according to its uracil or thymine content relative to the theoretical minimum uracil or thymine content of a nucleic acid encoding the wild-type protein sequence (% U_{TM} or (% T_{TM}).

[1134] In some embodiments, the % U_{WT} or % T_{WT} of a uracil- or thymine-modified sequence encoding tremelimumab-IPI CL of the disclosure is above 60%, above 65%, above 70%, above 75%, above 80%, above 85%, above 90%, or above 95%.

[1135] In some embodiments, the % U_{WT} or % T_{WT} of a uracil- or thymine modified sequence encoding tremelimumab-IPI CL of the disclosure is between 61% and 103%, between 61% and 102%, between 62% and 101%, between 63% and 100%, between 64% and 99%, between 65% and 98%, between 66% and 97%, between 67% and 96%, between 68% and 95%, between 69% and 94%, between 70% and 83%, or between 71% and 93%.

[1136] In a particular embodiment, the % U_{WT} or % T_{WT} of a uracil- or thymine-modified sequence encoding tremelimumab-IPI CL of the disclosure is between about 70% and about 94%.

[1137] In some embodiments, the % U_{TM} of a uracil-modified sequence encoding tremelimumab-IPI CL of the disclosure is below 300%, below 295%, below 290%, below 285%, below 280%, below 275%, below 270%, below 265%, below 260%, below 255%, below 250%, below 245%, below 240%, below 235%, below 230%, below 225%, below 220%, below 215%, below 200%, below 195%, below 190%, below 185%, below 180%, below 175%, below 170%, below 165%, below 160%, below 155%, below 150%, below 145%, below 140%, below 139%, below 138%, below 137%, below 136%, below 135%, below 134%, below 133%, below 132%, below 131%, below 130%, below 129%, below 128%, below 127%, below 126%, below 125%, below 124%, below 123%, below 122%, below 121%, below 120%, below 119%, below 118%, below 117%, below 116%, or below 115%.

[1138] In some embodiments, the % U_{TM} of a uracil-modified sequence encoding tremelimumab-IPI CL of the disclosure is above 100%, above 101%, above 102%, above 103%, above 104%, above 105%, above 106%, above 107%, above 108%, above 109%, above 110%, above 111%, above 112%, above 113%, above 114%, above 115%, above 116%, above 117%, above 118%, above 119%, above 120%, above 121%, above 122%, above 123%, above 124%, above 125%, or above 126%, above 127%, above 128%, above 129%, above 130%, above 131%, about 132%, above 133%, above 134%, above 135%, above 136%, above 137%, above 138%, above 139%, above 140%, above 141%, above 142%, above 143%, above 144%, above 145%, above 146%, above 147%, above 148%, above 149%, above 150%, above 151%, above 152%, above 153%, above 154%, above 155%, above 156%, above 157%, above 158%, above 159%, above 160%, above 161%, above 162%, above 163%, above 164%, above 165%, above 166%, above 167%, above 168%, above 169%, above 170%, or above 171%.

[1139] In some embodiments, the % U_{TM} of a uracil-modified sequence encoding a caTLR4 polypeptide of the disclosure is between 145% and 147%, between 144% and 148%, between 143% and 149%, between 142% and 150%, between 141% and 151%, between 140% and 152%, between 139% and 153%, or between 138% and 154%.

[1140] In some embodiments, the % U_{TM} of a uracil-modified sequence encoding tremelimumab-IPI CL of the disclosure is between about 131% and about 172%.

[1141] In some embodiments, a uracil-modified sequence encoding tremelimumab-IPI CL of the disclosure has a reduced number of consecutive uracils with respect to the corresponding wild-type nucleic acid sequence. For example, two consecutive leucines can be encoded by the sequence CUUUUG, which includes a four uracil cluster. Such a subsequence can be substituted, e.g., with CUGCUC, which removes the uracil cluster.

[1142] As discussed above, the number of phenylalanines in a sequence establishes a minimum number of uracil pairs (UU) that cannot be eliminated without altering the number of phenylalanines in the encoded polypeptide. For example, wild-type tremelimumab-IPI CL has 4 phenylalanines. Thus, the absolute minimum number of uracil pairs (UU) that a uracil-modified sequence encoding the tremelimumab-IPI CL of the disclosure would be 4.

[1143] Wild type tremelimumab-IPI CL contains 6 uracil pairs (UU), and 0 uracil triplets (UUU). In some embodiments, a uracil-modified sequence encoding tremelimumab-IPI CL of the disclosure has no uracil triplets (UUU).

[1144] In some embodiments, a uracil-modified sequence encoding tremelimumab-IPI CL has a reduced number of uracil pairs (UU) with respect to the number of uracil pairs (UU) in the wild-type nucleic acid sequence. In some embodiments, a uracil-modified sequence encoding tremelimumab-IPI CL of the disclosure has a number of uracil pairs (UU) corresponding to the minimum possible number of uracil pairs (UU) in the wild-type nucleic acid sequence, e.g., 4 uracil pairs in the case of wild type tremelimumab-IPI CL.

[1145] In some embodiments, a uracil-modified sequence encoding tremelimumab-IPI CL of the disclosure has at least 1, 2, 3, 4, or 5 uracil pairs (UU) less than the number of uracil pairs (UU) in the wild-type nucleic acid sequence. In some embodiments, a uracil-modified sequence encoding tremelimumab-IPI CL of the disclosure has between 1 and 6 uracil pairs (UU).

[1146] In some embodiments, a uracil-modified sequence encoding tremelimumab-IPI CL of the disclosure has a % UU_{wt} less than 275%, less than 250%, less than 200%, less than 150%, less than 140%, less than 130%, less than 120%, less than 110%, less than 100%, less than 95%, less than 90%, less than 85%, less than 80%, less than 75%, less than 70%, less than 65%, less than 60%, less than 65%, less than 60%, less than 55%, less than 50%, less than 40%, less than 30%, less than 20%, or less than 10%.

[1147] In some embodiments, a uracil-modified sequence encoding tremelimumab-IPI CL has a % UU_{wt} between 110% and 105%.

[1148] In some embodiments, the polynucleotide of the disclosure comprises a uracil-modified sequence encoding tremelimumab-IPI CL disclosed herein. In some embodiments, the uracil-modified sequence encoding tremelimumab-IPI CL comprises at least one chemically modified nucleobase, e.g., 5-methoxyuracil. In some embodiments, at least 95% of a nucleobase (e.g., uracil) in a uracil-modified sequence encoding tremelimumab-IPI CL of the disclosure are modified nucleobases. In some embodiments, at least 95% of uracil in a uracil-modified sequence encoding tremelimumab-IPI CL is 5-methoxyuracil. In some embodiments, the polynucleotide comprising a uracil-modified sequence further comprises a miRNA binding site, e.g., a miRNA binding site that binds to miR-122. In some embodiments, the polynucleotide comprising a uracil-modified sequence is formulated with a delivery agent, e.g., a compound having Formula (I), e.g., any of Compounds 1-147.

[1149] In some embodiments, the “guanine content of the sequence optimized ORF encoding tremelimumab-IPI CL with respect to the theoretical maximum guanine content of a nucleotide sequence encoding tremelimumab-IPI CL,” abbreviated as % G_{TMX} is at least 66%, at least 67%, at least 68%, at least about 69%, at least about 70%, at least about 75%, at least about 80%, at least about 85%, at least about 90%, at least about 95%, at least about 100%. In some embodiments, the % G_{TMX} is between about 65% and about 85%, between about 66% and about 84%, between about 67% and about 83%, between about 68% and about 82%, or between about 68% and about 82%.

[1150] In some embodiments, the “cytosine content of the ORF relative to the theoretical maximum cytosine content of a nucleotide sequence encoding tremelimumab-IPI CL,” abbreviated as % C_{TMX}, is at least about 62%, at least about 63%, at least about 64%, at least about 65%, at least about 70%, at least about 75%, at least about 80%, at least about 85%, at least about 90%, at least about 95%, or at least about 100%. In some embodiments, the % C_{TMX} is between about 60% and about 100%, between about 61% and about 99%, between about 62% and about 98%, between about 63% and about 97%, or between about 64% and about 96%.

[1151] In some embodiments, the “guanine and cytosine content (G/C) of the ORF relative to the theoretical maximum G/C content in a nucleotide sequence encoding tremelimumab-IPI CL,” abbreviated as % G/C_{TMX}, is at least about 90%, at least about 91%, at least about 92%, at least about 93%, at least about 94%, at least about 95%, at least about 96%, at least about 97%, at least about 98%, at least about 99, or about 100%. The % G/C_{TMX} is between about 90% and about 130%, between about 91% and about 129%, or between about 92% and about 128%. or between about 92% and about 127%.

[1152] In some embodiments, the “G/C content in the ORF relative to the G/C content in the corresponding wild-type ORF,” abbreviated as % G/C_{WT} is at least 95%, at least 96%, at least 97%, at least 98%, at least 99%, at least 100%, at least 101%, at least 102%, at least 103%, at least 104%, at least 105%, or at least 106%. In some embodiments, the polynucleotide of the disclosure comprises an open reading frame (ORF) encoding tremelimumab-IPI CL, wherein the ORF has been sequence optimized, and wherein each of % U_{TL}, % U_{WT}, % U_{TM}, % G_{TL}, % G_{WT}, % G_{TMX}, % C_{TL}, % C_{WT}, % C_{TMX}, % G/C_{TL}, % G/C_{WT}, or % G/C_{TMX}, alone or in a combination thereof is in a range between (i) a maximum corresponding to the parameter's maximum value (MAX) plus about 0.5, 1, 1.5, 2, 2.5, 3, 3.5, 4, 4.5, 5, 5.5, 6, 6.5, 7, 7.5, 8, 8.5, 9, 9.5, or 10 standard deviations (STD DEV), and (ii) a minimum corresponding to the parameter's minimum value (MIN) less 0.5, 1, 1.5, 2, 2.5, 3, 3.5, 4, 4.5, 5, 5.5, 6, 6.5, 7, 7.5, 8, 8.5, 9, 9.5, or 10 standard deviations (STD DEV).

[1153] The uracil or thymine content of wild-type tremelimumab IgG2 CH is about 16.05%. In some embodiments, the uracil or thymine content of a uracil- or thymine-modified sequence encoding tremelimumab IgG2 CH is less than 16.05%. In some embodiments, the uracil or thymine content of a uracil- or thymine-modified sequence encoding a tremelimumab IgG2 CH of the disclosure is less than 16%, less than 15%, less than 15%, less than 14%, less that 13%, less than 12%, less than 11%, less than 10%, or less than 9%. In some embodiments, the uracil or thymine content is not less than 15%, 14%, 13%, 12%, 11%, or 10%. The uracil or thymine content of a sequence disclosed herein, i.e., its total uracil or thymine content is abbreviated herein as % U_{TL} or % T_{TL}.

[1154] In some embodiments, the uracil or thymine content (% U_{TL} or % T_{TL}) of a uracil-or thymine-modified sequence encoding tremelimumab IgG2 CH of the disclosure is between 10% and 16%, between 10.5% and 16%, between 11% and 16%, between 11.5% and 16%, between 12% and 16%, between 120.5% and 16%, between 13% and 16%, between 130.5% and 16%, or between 14% and 16%.

[1155] A uracil- or thymine-modified sequence encoding tremelimumab IgG2 CH of the disclosure can also be described according to its uracil or thymine content relative to the uracil or thymine content in the corresponding wild-type nucleic acid sequence (% U_{WT} or % T_{WT}), or according to its uracil or thymine content relative to the theoretical minimum uracil or thymine content of a nucleic acid encoding the wild-type protein sequence (% U_{TM} or (% T_{TM}).

[1156] In some embodiments, the % U_{WT} or % T_{WT} of a uracil- or thymine-modified sequence encoding tremelimumab IgG2 CH of the disclosure is above 60%, above 65%, above 70%, above 75%, above 80%, above 85%, above 90%, above 95%, or above 100%.

[1157] In some embodiments, the % U_{WT} or % T_{WT} of a uracil- or thymine modified sequence encoding tremelimumab IgG2 CH of the disclosure is between 79% and 112%, between 80% and 111%, between 81% and 110%, between 82% and 109%, between 83% and 108%, between 84% and 107%, between 85% and 106%, between 86% and 105%, between 87% and 104%, between 88% and 103%, or between 89% and 102%.

[1158] In a particular embodiment, the % U_{WT} or % T_{WT} of a uracil- or thymine-modified sequence encoding tremelimumab IgG2 CH of the disclosure is between about 85% and about 105%.

[1159] In some embodiments, the % U_{TM} of a uracil-modified sequence encoding tremelimumab IgG2 CH of the disclosure is below 300%, below 295%, below 290%, below 285%, below 280%, below 275%, below 270%, below 265%, below 260%, below 255%, below 250%, below 245%, below 240%, below 235%, below 230%, below 225%, below 220%, below 215%, below 200%, below 195%, below 190%, below 185%, below 180%, below 175%, below 170%, below 165%, below 160%, below 155%, below 150%, below 145%, below 140%, below 139%, below 138%, below 137%, below 136%, below 135%, below 134%, below 133%, below 132%, below 131%, or below 130%.

[1160] In some embodiments, the % U_{TM} of a uracil-modified sequence encoding tremelimumab IgG2 CH of the disclosure is above 100%, above 101%, above 102%, above 103%, above 104%, above 105%, above 106%, above 107%, above 108%, above 109%, above 110%, above 111%, above 112%, above 113%, above 114%, above 115%, above 116%, above 117%, above 118%, above 119%, above 120%, above 121%, above 122%, above 123%, above 124%, above 125%, or above 126%, above 127%, above 128%, above 129%, above 130%, above 131%, about 132%, above 133%, above 134%, above 135%, above 136%, above 137%, above 138%, above 139%, above 140%, above 141%, above 142%, above 143%, above 144%, above 145%, above 146%, above 147%, above 148%, above 149%, or above 150%.

[1161] In some embodiments, the % U_{TM} of a uracil-modified sequence encoding a caTLR4 polypeptide of the disclosure is between 138% and 140%, between 137% and 141%, between 136% and 142%, between 135% and 143%, between 134% and 144%, between 133% and 145%, between 132% and 146%,between 131% and 147%, between about 130% and 148%, between about 129% and 149%, between about 128% and 150%, or between about 127% and 151%.

[1162] In some embodiments, the % U_{TM} of a uracil-modified sequence encoding tremelimumab IgG2 CH of the disclosure is between about 131% and about 150%.

[1163] In some embodiments, a uracil-modified sequence encoding tremelimumab IgG2 CH of the disclosure has a reduced number of consecutive uracils with respect to the corresponding wild-type nucleic acid sequence. For example, two consecutive leucines can be encoded by the sequence CUUUUG, which includes a four uracil cluster. Such a subsequence can be substituted, e.g., with CUGCUC, which removes the uracil cluster.

[1164] As discussed above, the number of phenylalanines in a sequence establishes a minimum number of uracil pairs (UU) that cannot be eliminated without altering the number of phenylalanines in the encoded polypeptide. For example, the wild-type tremelimumab IgG2 CH has 13 phenylalanines. Thus, the absolute minimum number of uracil pairs (UU) that a uracil-modified sequence encoding the tremelimumab IgG2 CH of the disclosure would be 13.

[1165] Wild type tremelimumab IgG2 CH contains 15 uracil pairs (UU), and no uracil triplets (UUU). In some embodiments, a uracil-modified sequence encoding tremelimumab IgG2 CH of the disclosure has tremelimumab IgG2 CH 6, 5, 4, 3, 2, or 1 uracil triplets (UUU).

[1166] In some embodiments, a uracil-modified sequence encoding tremelimumab IgG2 CH has a reduced number of uracil pairs (UU) with respect to the number of uracil pairs (UU) in the wild-type nucleic acid sequence. In some embodiments, a uracil-modified sequence encoding tremelimumab IgG2 CH of the disclosure has a number of uracil pairs (UU) corresponding to the minimum possible number of uracil pairs (UU) in the wild-type nucleic acid sequence, e.g., 4 uracil pairs in the case of wild type tremelimumab IgG2 CH.

[1167] In some embodiments, a uracil-modified sequence encoding tremelimumab IgG2 CH of the disclosure has at least 1, 2, 3, 4, 5, 6 or 7 uracil pairs (UU) less than the number of uracil pairs (UU) in the wild-type nucleic acid sequence. In some embodiments, a uracil-modified sequence encoding tremelimumab IgG2 CH of the disclosure has between 8 and 14 uracil pairs (UU).

[1168] In some embodiments, a uracil-modified sequence encoding tremelimumab IgG2 CH of the disclosure has a % UU_{wt} less than 275%, less than 250%, less than 200%, less than 150%, less than 140%, less than 130%, less than 120%, less than 110%, less than 100%, less than 95%, less than 90%, less than 85%, less than 80%, less than 75%, less than 70%, less than 65%, less than 60%, less than 65%, less than 60%, less than 55%, less than 50%, or less than 40%.

[1169] In some embodiments, a uracil-modified sequence encoding tremelimumab IgG2 CH has a % UU_{wt} between 50% and 100%.

[1170] In some embodiments, the polynucleotide of the disclosure comprises a uracil-modified sequence encoding tremelimumab IgG2 CH disclosed herein. In some embodiments, the uracil-modified sequence encoding tremelimumab IgG2 CH comprises at least one chemically modified nucleobase, e.g., 5-methoxyuracil. In some embodiments, at least 95% of a nucleobase (e.g., uracil) in a uracil-modified sequence encoding tremelimumab IgG2 CH of the disclosure are modified nucleobases. In some embodiments, at least 95% of uracil in a uracil-modified sequence encoding tremelimumab IgG2 CH is 5-methoxyuracil. In some embodiments, the polynucleotide comprising a uracil-modified sequence further comprises a miRNA binding site, e.g., a miRNA binding site that binds to miR-122. In some embodiments, the polynucleotide comprising a uracil-modified sequence is formulated with a delivery agent, e.g., a compound having Formula (I), e.g., any of Compounds 1-147.

[1171] In some embodiments, the “guanine content of the sequence optimized ORF encoding tremelimumab IgG2 CH with respect to the theoretical maximum guanine content of a nucleotide sequence encoding tremelimumab IgG2 CH,” abbreviated as % G_{TMX} is at least 67%, at least 68%, at least about 69%, at least about 70%, at least about 75%, at least about 80%, at least about 85%, at least about 90%, at least about 95%, at least about 100%. In some embodiments, the % C_{TMX} is between about 100% and about 118%, between about 101% and about 117%, between about 102% and about 116%, between about 103% and about 116%, between about 104% and about 116%, or between about 105% and about 116%.

[1172] In some embodiments, the “cytosine content of the ORF relative to the theoretical maximum cytosine content of a nucleotide sequence encoding tremelimumab IgG2 CH,” abbreviated as % C_{TMX}, is at least about 67%, at least about 68%, at least about 69%, at least about 70%, at least about 75%, at least about 80%, at least about 85%, at least about 90%, at least about 95%, or at least about 100%. In some embodiments, the % C_{TMX} is between about 65% and about 80%, between about 66% and about 79%, between about 67% and about 78%, between about 68% and about 77%, or between about 69% and about 6%.

[1173] In some embodiments, the “guanine and cytosine content (G/C) of the ORF relative to the theoretical maximum G/C content in a nucleotide sequence encoding tremelimumab IgG2 CH,” abbreviated as % G/C_{TMX} is at least about 90%, at least about 91%, at least about 92%, at least about 93%, at least about 94%, at least about 95%, at least about 96%, at least about 97%, at least about 98%, at least about 99, or about 100%. The % G/C_{TMX} is between about 90% and about 100%, between about 91% and about 99%, between about 92% and about 98%, between about 92% and about 97%, or between about 92% and about 96%. In some embodiments, the “G/C content in the ORF relative to the G/C content in the corresponding wild-type ORF,” abbreviated as % G/C_{WT} is at least 95%, at least 96%, at least 97%, at least 98%, at least 99%, at least 100%, at least 101%, at least 102%, at least 103%, at least 104%, at least 105%, or at least 106%.

[1174] In some embodiments, the polynucleotide of the disclosure comprises an open reading frame (ORF) encoding tremelimumab IgG2 CH, wherein the ORF has been sequence optimized, and wherein each of % U_{TL}, % U_{WT}, % U_{TM}, % G_{TL}, % G_{WT}, % G_{TMX}, % C_{TL}, % C_{WT}, % C_{TMX}, % G/C_{TL}, % G/C_{WT}, or % G/C_{TMX}, alone or in a combination thereof is in a range between (i) a maximum corresponding to the parameter's maximum value (MAX) plus about 0.5, 1, 1.5, 2, 2.5, 3, 3.5, 4, 4.5, 5, 5.5, 6, 6.5, 7, 7.5, 8, 8.5, 9, 9.5, or 10 standard deviations (STD DEV), and (ii) a minimum corresponding to the parameter's minimum value (MIN) less 0.5, 1, 1.5, 2, 2.5, 3, 3.5, 4, 4.5, 5, 5.5, 6, 6.5, 7, 7.5, 8, 8.5, 9, 9.5, or 10 standard deviations (STD DEV).

[1175] The uracil or thymine content of the IgG1 constant region used in the (tremelimumab and ipilimumab antibody heavy chains disclosed herein (referred to as the “IgG1 constant region of the disclosure” in the present disclosure) is about 16%. In some embodiments, the uracil or thymine content of a uracil- or thymine-modified sequence encoding the IgG1 constant region of the disclosure is less than 16%. In some embodiments, the uracil or thymine content of a uracil- or thymine-modified sequence encoding the IgG1 constant region of the disclosure is less than 16%, less than 15%, less than 14%, less than 12%, or less than 11%. The uracil or thymine content of a sequence disclosed herein, i.e., its total uracil or thymine content is abbreviated herein as % U_{TL} or % T_{TL}.

[1176] In some embodiments, the uracil or thymine content (% U_{TL} or % T_{TL}) of a uracil-or thymine-modified sequence encoding the IgG1 constant region of the disclosure is between 14% and 18%, between 14% and 19%, between 14% and 20%, between 13% and 18%, between 13% and 19%, between 13% and 20%, between 12% and 18%, between 12% and 19%, between 12% and 20%, between 14% and 16%, or between 15% and 16%.

[1177] A uracil- or thymine-modified sequence encoding the IgG1 constant region of the disclosure can also be described according to its uracil or thymine content relative to the uracil or thymine content in the corresponding wild-type nucleic acid sequence (% U_{WT} or % T_{WT}), or according to its uracil or thymine content relative to the theoretical minimum uracil or thymine content of a nucleic acid encoding the wild-type protein sequence (% U_{TM} or % T_{TM}).

[1178] In some embodiments, the % U_{WT} or % T_{WT} of a uracil- or thymine-modified sequence encoding the IgG1 constant region of the disclosure is above 60%, above 65%, above 70%, above 75%, above 80%, above 85%, above 90%, or above 95%.

[1179] In some embodiments, the % U_{WT} or % T_{WT} of a uracil- or thymine modified sequence encoding the IgG1 constant region of the disclosure is between 75% and 105%, between 80% and 110%, between 75% and 110%, between 80% and 105%, between 80% and 100%, between 70% and 100%, between 65% and 100%, between 65% and 110%, or between 70% and 110%.

[1180] In a particular embodiment, the % U_{WT} or % T_{WT} of a uracil- or thymine-modified sequence encoding the IgG1 constant region of the disclosure is between about 80% and about 100%.

[1181] For DNA it is recognized that thymine is present instead of uracil, and one would substitute T where U appears. Thus, all the disclosures related to, e.g., % U_{TM}, % U_{WT}, or % U_{TL}, with respect to RNA are equally applicable to % T_{TM}, % T_{WT}, or % T_{TL} with respect to DNA.

[1182] In some embodiments, the % U_{TM} of a uracil-modified sequence encoding the IgG1 constant region of the disclosure is below 300%, below 295%, below 290%, below 285%, below 280%, below 275%, below 270%, below 265%, below 260%, below 255%, below 250%, below 245%, below 240%, below 235%, below 230%, below 225%, below 220%, below 215%, below 200%, below 195%, below 190%, below 185%, below 180%, below 175%, below 170%, below 165%, below 160%, below 155%, below 150%, below 145%, below 140%, below 139%, below 138%, below 137%, below 136%, below 135%, below 134%, below 133%, below 132%, below 131%, below 130%, below 129%, below 128%, below 127%, below 126%, below 125%, below 124%, below 123%, below 122%, below 121%, below 120%, below 119%, below 118%, below 117%, below 116%, or below 115%.

[1183] In some embodiments, the % U_{TM} of a uracil-modified sequence encoding the IgG1 constant region of the disclosure is above 100%, above 101%, above 102%, above 103%, above 104%, above 105%, above 106%, above 107%, above 108%, above 109%, above 110%, above 111%, above 112%, above 113%, above 114%, above 115%, above 116%, above 117%, above 118%, above 119%, above 120%, above 121%, above 122%, above 123%, above 124%, above 125%, or above 126%, above 127%, above 128%, above 129%, above 130%, above 131%, above 132%, above 133%, above 134%, above 135%, above 136%, above 137%, above 138%, above 139%, above 140%, above 141%, above 142%, above 143%, above 144%, above 145%, above 146%, above 147%, above 148%, above 149%, or above 150%.

[1184] In some embodiments, the % U_{TM} of a uracil-modified sequence encoding the IgG1 constant region of the disclosure is between about 127% and about 148%.

[1185] In some embodiments, a uracil-modified sequence encoding the IgG1 constant region of the disclosure has a reduced number of consecutive uracils with respect to the corresponding wild-type nucleic acid sequence. For example, two consecutive leucines can be encoded by the sequence CUUUUG, which includes a four uracil cluster. Such a subsequence can be substituted, e.g., with CUGCUC, which removes the uracil cluster.

[1186] As discussed above, the number of phenylalanines in a sequence establishes a minimum number of uracil pairs (UU) that cannot be eliminated without altering the number of phenylalanines in the encoded polypeptide. For example, the IgG1 constant region of the disclosure has 10 phenylalanines. Thus, the absolute minimum number of uracil pairs (UU) that a uracil-modified sequence encoding the IgG1 constant region of the disclosure would be 10.

[1187] The wild type IgG1 constant region of the disclosure contains 12 uracil pairs (UU), and no uracil triplets (UUU) or quadruplets (UUUU). In some embodiments, a uracil-modified sequence encoding the IgG1 constant region of the disclosure has a reduced number of uracil triplets (UUU) with respect to the wild-type nucleic acid sequence. In some embodiments, a uracil-modified sequence encoding the IgG1 constant region of the disclosure contains 4, 3, 2, 1 or no uracil triplets (UUU).

[1188] In some embodiments, a uracil-modified sequence encoding the IgG1 constant region of the disclosure has a reduced number of uracil pairs (UU) with respect to the number of uracil pairs (UU) in the wild-type nucleic acid sequence. In some embodiments, a uracil-modified sequence encoding the IgG1 constant region of the disclosure has a number of uracil pairs (UU) corresponding to the minimum possible number of uracil pairs (UU) in the wild-type nucleic acid sequence, e.g., 10 uracil pairs in the case of the IgG1 constant region of the disclosure.

[1189] In some embodiments, a uracil-modified sequence encoding the IgG1 constant region of the disclosure has at least 1, 2, 3, 4, 5, 6, 7, 8, 9, 10, 11, or 12 uracil pairs (UU) less than the number of uracil pairs (UU) in the wild-type nucleic acid sequence. In some embodiments, a uracil-modified sequence encoding the IgG1 constant region of the disclosure has between 6 and 16 uracil pairs (UU).

[1190] The phrase “uracil pairs (UU) relative to the uracil pairs (UU) in the wild type nucleic acid sequence,” refers to a parameter determined by dividing the number of uracil pairs (UU) in a sequence-optimized nucleotide sequence by the total number of uracil pairs (UU) in the corresponding wild-type nucleotide sequence and multiplying by 100. This parameter is abbreviated herein as % UU_{wt}.

[1191] In some embodiments, a uracil-modified sequence encoding the IgG1 constant region of the disclosure has a % UU_{wt} less than 134%, less than 130%, less than 125%, less than 120%, less than 115%, less than 110%, less than 105%, less than 100%, less than 95%, less than 90%, less than 85%, less than 80%, less than 75%, less than 70%, less than 65%, less than 60%, less than 65%, less than 60%, less than 55%, or less than 50%.

[1192] In some embodiments, a uracil-modified sequence encoding the IgG1 constant region of the disclosure has a % UU_{wt} between 40% and 140%. In some embodiments, a uracil-modified sequence encoding the IgG1 constant region of the disclosure has a % UU_{wt} between 50% and 134%.

[1193] In some embodiments, the polynucleotide of the disclosure comprises a uracil-modified sequence encoding the IgG1 constant region of the disclosure disclosed herein. In some embodiments, the uracil-modified sequence encoding the IgG1 constant region of the disclosure comprises at least one chemically modified nucleobase, e.g., 5-methoxyuracil. In some embodiments, at least 95% of a nucleobase (e.g., uracil) in a uracil-modified sequence encoding the IgG1 constant region of the disclosure are modified nucleobases. In some embodiments, at least 95% of uracil in a uracil-modified sequence encoding the IgG1 constant region of the disclosure is 5-methoxyuracil. In some embodiments, the polynucleotide comprising a uracil-modified sequence further comprises a miRNA binding site, e.g., a miRNA binding site that binds to miR-122. In some embodiments, the polynucleotide comprising a uracil-modified sequence is formulated with a delivery agent, e.g., a compound having Formula (I), e.g., any of Compounds 1-147.

[1194] In some embodiments, the “guanine content of the sequence optimized ORF encoding the IgG1 constant region of the disclosure with respect to the theoretical maximum guanine content of a nucleotide sequence encoding the IgG1 constant region of the disclosure,” abbreviated as % G_{TMX}, is at least 60%, at least 61%, at least 62%, at least about 63%, at least about 64%, at least about 65%, at least about 66%, at least about 67%, at least about 68%, at least about 69%, at least about 70%, at least about 71%, at least about 72%, at least about 73%, at least about 74%, at least about 75%, at least about 76%, at least about 77%, at least about 78%, at least about 79%, or at least about 80%. In some embodiments, the % G_{TX} is between about 60% and about 85%, between about 65% and about 80%, between about 67% and about 78%, or between about 68% and about 77%.

[1195] In some embodiments, the “cytosine content of the ORF relative to the theoretical maximum cytosine content of a nucleotide sequence encoding the IgG1 constant region of the disclosure,” abbreviated as % C_{TMX}, is at least 60%, at least 61%, at least about 62%, at least about 63%, at least about 64%, at least about 65%, at least about 66%, at least about 67%, at least about 68%, at least about 69%, at least about 70%, at least about 71%, at least about 72%, at least about 73%, at least about 74%, at least about 75%, at least about 76%, at least about 77%, at least about 78%, at least about 79%, or at least about 80%. In some embodiments, the % C_{TMX} is between about 60% and about 85%, between about 65% and about 80%, between about 67% and about 79%, or between about 69% and about 76%.

[1196] In some embodiments, the “guanine and cytosine content (G/C) of the ORF relative to the theoretical maximum G/C content in a nucleotide sequence encoding the IgG1 constant region of the disclosure,” abbreviated as % G/C_{TMX} is at least about 81%, at least about 85%, at least about 90%, at least about 95%, or about 100%. The % G/C_{TMX} is between about 80% and about 100%, between about 85% and about 99%, between about 90% and about 98%, or between about 92% and about 97%.

[1197] In some embodiments, the “G/C content in the ORF relative to the G/C content in the corresponding wild-type ORF,” abbreviated as % G/C_{WT} is at least 95%, at least 96%, at least 97%, at least 98%, at least 99%, at least 100%, at least 101%, at least 102%, at least 103%, at least 104%, at least 105%, at least 106%, at least 107%, at least 109%, or at least 110%.

[1198] In some embodiments, the polynucleotide of the disclosure comprises an open reading frame (ORF) encoding the IgG1 constant region of the disclosure, wherein the ORF has been sequence optimized, and wherein each of % U_{TL}, % U_{WT}, % U_{TM}, % G_{TL}, % G_{WT}, % G_{TMX}, % C_{TL}, % C_{WT}, % C_{TMX}, % G/C_{TL}, % G/C_{WT}, or % G/C_{TMX}, alone or in a combination thereof is in a range between (i) a maximum corresponding to the parameter's maximum value (MAX) plus about 0.5, 1, 1.5, 2, 2.5, 3, 3.5, 4, 4.5, 5, 5.5, 6, 6.5, 7, 7.5, 8, 8.5, 9, 9.5, or 10 standard deviations (STD DEV), and (ii) a minimum corresponding to the parameter's minimum value (MIN) less 0.5, 1, 1.5, 2, 2.5, 3, 3.5, 4, 4.5, 5, 5.5, 6, 6.5, 7, 7.5, 8, 8.5, 9, 9.5, or 10 standard deviations (STD DEV).

[1199] Sequence Optimized Anti-CTLA-4 Antibodies: The present disclosure also provides sequence optimized mRNA sequences encoding anti-CTLA-4 antibodies. Compositions comprising these sequence optimized mRNAs can be administered to a subject in need thereof to facilitate in vivo expression and assembly of a therapeutic antibody. Each of the sequence optimized nucleotide sequences disclosed herein is not a wild type nucleotide sequence encoding a therapeutic antibody known in the art.

[1200] The present disclosure provides polynucleotides comprising sequence optimized mRNA sequences encoding anti-CTLA-4 antibodies which can be used to express the antibodies, for example, in vivo in a host organism (e.g., in a particular tissue or cell). The sequence optimized mRNA sequences presented in the instant disclosure can present improved properties related to expression efficacy after administration in vivo to a subject in need thereof. Such properties include, but are not limited to, improving nucleic acid stability (e.g., mRNA stability), increasing translation efficacy in the target tissue, reducing the number of truncated proteins expressed, improving the folding or prevent misfolding of the expressed proteins, reducing toxicity of the expressed products, reducing cell death caused by the expressed products, increasing or decreasing protein aggregation, etc.

[1201] The sequence optimized nucleotide sequences disclosed herein have been optimized for expression in human subjects, having structural and/or chemical features that avoid one or more of the problems in the art, for example, features which are useful for optimizing formulation and delivery of nucleic acid-based therapeutics while retaining structural and functional integrity, overcoming the threshold of expression, improving expression rates, half-life and/or protein concentrations, optimizing protein localization, and avoiding deleterious bio-responses such as the immune response and/or degradation pathways.

[1202] Sequence optimized polynucleotides encoding the anti-CTLA-4 antibodies of the present disclosure are shown in TABLE 2. These codon optimized polynucleotides can be used to practice the methods disclosed elsewhere in the present application, for example, as alternatives or complementing the sequences disclosed in TABLE 1.

TABLE 2
Sequence optimized polynucleotides encoding anti-CTLA-4
antibodies, and their respective polypeptide sequences

| SEQ | | |
|---|---|---|
| ID NO | Construct Name | Description |
| 251 | aCTLA-4_Ab1_HC_IgG1_001 | Sequence, NT (5′ UTR, |
| | | ORF, 3′ UTR) |
| 252 | aCTLA-4_Ab1_HC_IgG1_001 | ORF Sequence, AA |
| 253 | aCTLA-4_Ab1_HC_IgG1_001 | ORF Sequence, NT |
| 254 | aCTLA-4_Ab1_HC_IgG1_001 | mRNA Sequence |
| | | (assumes T100 tail) |
| 255 | aCTLA-4_Ab1_HC_IgG1_001 | ORF Sequence, AA |
| | | (without leader sequence) |
| 256 | aCTLA-4_Ab1_HC_IgG1_002 | Sequence, NT (5′ UTR, |
| | | ORF, 3′ UTR) |
| 257 | aCTLA-4_Ab1_HC_IgG1_002 | ORF Sequence, AA |
| 258 | aCTLA-4_Ab1_HC_IgG1_002 | ORF Sequence, NT |
| 259 | aCTLA-4_Ab1_HC_IgG1_002 | mRNA Sequence |
| | | (assumes T100 tail) |
| 260 | aCTLA-4_Ab1_HC_IgG1_002 | ORF Sequence, AA |
| | | (without leader sequence) |
| 261 | aCTLA-4_Ab1_HC_IgG1_003 | Sequence, NT (5′ UTR, |
| | | ORF, 3′ UTR) |
| 262 | aCTLA-4_Ab1_HC_IgG1_003 | ORF Sequence, AA |
| 263 | aCTLA-4_Ab1_HC_IgG1_003 | ORF Sequence, NT |
| 264 | aCTLA-4_Ab1_HC_IgG1_003 | mRNA Sequence |
| | | (assumes T100 tail) |
| 265 | aCTLA-4_Ab1_HC_IgG1_003 | ORF Sequence, AA |
| | | (without leader sequence) |
| 266 | aCTLA-4_Ab1_LC_K_001 | Sequence, NT (5′ UTR, |
| | | ORF, 3′ UTR) |
| 267 | aCTLA-4_Ab1_LC_K_001 | ORF Sequence, AA |
| 268 | aCTLA-4_Ab1_LC_K_001 | ORF Sequence, NT |
| 269 | aCTLA-4_Ab1_LC_K_001 | mRNA Sequence |
| | | (assumes T100 tail) |
| 270 | aCTLA-4_Ab1_LC_K_001 | ORF Sequence, AA |
| | | (without leader sequence) |
| 271 | aCTLA-4_Ab1_LC_K_002 | Sequence, NT (5′ UTR, |
| | | ORF, 3′ UTR) |
| 272 | aCTLA-4_Ab1_LC_K_002 | ORF Sequence, AA |
| 273 | aCTLA-4_Ab1_LC_K_002 | ORF Sequence, NT |
| 274 | aCTLA-4_Ab1_LC_K_002 | mRNA Sequence |
| | | (assumes T100 tail) |
| 275 | aCTLA-4_Ab1_LC_K_002 | ORF Sequence, AA |
| | | (without leader sequence) |
| 276 | aCTLA-4_Ab1_LC_K_003 | Sequence, NT (5′ UTR, |
| | | ORF, 3′ UTR) |
| 277 | aCTLA-4_Ab1_LC_K_003 | ORF Sequence, AA |
| 278 | aCTLA-4_Ab1_LC_K_003 | ORF Sequence, NT |
| 279 | aCTLA-4_Ab1_LC_K_003 | mRNA Sequence |
| | | (assumes T100 tail) |
| 280 | aCTLA-4_Ab1_LC_K_003 | ORF Sequence, AA |
| | | (without leader sequence) |
| 281 | aCTLA-4_Ab2_HC_IgG1_001 | Sequence, NT (5′ UTR, |
| | | ORF, 3′ UTR) |
| 282 | aCTLA-4_Ab2_HC_IgG1_001 | ORF Sequence, AA |
| 283 | aCTLA-4_Ab2_HC_IgG1_001 | ORF Sequence, NT |
| 284 | aCTLA-4_Ab2_HC_IgG1_001 | mRNA Sequence |
| | | (assumes T100 tail) |
| 285 | aCTLA-4_Ab2_HC_IgG1_001 | ORF Sequence, AA |
| | | (without leader sequence) |
| 286 | aCTLA-4_Ab2_HC_IgG1_002 | Sequence, NT (5′ UTR, |
| | | ORF, 3′ UTR) |
| 287 | aCTLA-4_Ab2_HC_IgG1_002 | ORF Sequence, AA |
| 288 | aCTLA-4_Ab2_HC_IgG1_002 | ORF Sequence, NT |
| 289 | aCTLA-4_Ab2_HC_IgG1_002 | mRNA Sequence |
| | | (assumes T100 tail) |
| 290 | aCTLA-4_Ab2_HC_IgG1_002 | ORF Sequence, AA |
| | | (without leader sequence) |
| 291 | aCTLA-4_Ab2_HC_IgG1_003 | Sequence, NT (5′ UTR, |
| | | ORF, 3′ UTR) |
| 292 | aCTLA-4_Ab2_HC_IgG1_003 | ORF Sequence, AA |
| 293 | aCTLA-4_Ab2_HC_IgG1_003 | ORF Sequence, NT |
| 294 | aCTLA-4_Ab2_HC_IgG1_003 | mRNA Sequence |
| | | (assumes T100 tail) |
| 295 | aCTLA-4_Ab2_HC_IgG1_003 | ORF Sequence, AA |
| | | (without leader sequence) |
| 296 | aCTLA-4_Ab2_HC_IgG2_001 | Sequence, NT (5′ UTR, |
| | | ORF, 3′ UTR) |
| 297 | aCTLA-4_Ab2_HC_IgG2_001 | ORF Sequence, AA |
| 298 | aCTLA-4_Ab2_HC_IgG2_001 | ORF Sequence, NT |
| 299 | aCTLA-4_Ab2_HC_IgG2_001 | mRNA Sequence |
| | | (assumes T100 tail) |
| 300 | aCTLA-4_Ab2_HC_IgG2_001 | ORF Sequence, AA |
| | | (without leader sequence) |
| 301 | aCTLA-4_Ab2_HC_IgG2_002 | Sequence, NT (5′ UTR, |
| | | ORF, 3′ UTR) |
| 302 | aCTLA-4_Ab2_HC_IgG2_002 | ORF Sequence, AA |
| 303 | aCTLA-4_Ab2_HC_IgG2_002 | ORF Sequence, NT |
| 304 | aCTLA-4_Ab2_HC_IgG2_002 | mRNA Sequence |
| | | (assumes T100 tail) |
| 305 | aCTLA-4_Ab2_HC_IgG2_002 | ORF Sequence, AA |
| | | (without leader sequence) |
| 306 | aCTLA-4_Ab2_HC_IgG2_003 | Sequence, NT (5′ UTR, |
| | | ORF, 3′ UTR) |
| 307 | aCTLA-4_Ab2_HC_IgG2_003 | ORF Sequence, AA |
| 308 | aCTLA-4_Ab2_HC_IgG2_003 | ORF Sequence, NT |
| 309 | aCTLA-4_Ab2_HC_IgG2_003 | mRNA Sequence |
| | | (assumes T100 tail) |
| 310 | aCTLA-4_Ab2_HC_IgG2_003 | ORF Sequence, AA |
| | | (without leader sequence) |
| 311 | aCTLA-4_Ab2_LC_K_001 | Sequence, NT (5′ UTR, |
| | | ORF, 3′ UTR) |
| 312 | aCTLA-4_Ab2_LC_K_001 | ORF Sequence, AA |
| 313 | aCTLA-4_Ab2_LC_K_001 | ORF Sequence, NT |
| 314 | aCTLA-4_Ab2_LC_K_001 | mRNA Sequence |
| | | (assumes T100 tail) |
| 315 | aCTLA-4_Ab2_LC_K_001 | ORF Sequence, AA |
| | | (without leader sequence) |
| 316 | aCTLA-4_Ab2_LC_K_002 | Sequence, NT (5′ UTR, |
| | | ORF, 3′ UTR) |
| 317 | aCTLA-4_Ab2_LC_K_002 | ORF Sequence, AA |
| 318 | aCTLA-4_Ab2_LC_K_002 | ORF Sequence, NT |
| 319 | aCTLA-4_Ab2_LC_K_002 | mRNA Sequence |
| | | (assumes T100 tail) |
| 320 | aCTLA-4_Ab2_LC_K_002 | ORF Sequence, AA |
| | | (without leader sequence) |
| 321 | aCTLA-4_Ab2_LC_K_003 | Sequence, NT (5′ UTR, |
| | | ORF, 3′ UTR) |
| 322 | aCTLA-4_Ab2_LC_K_003 | ORF Sequence, AA |
| 323 | aCTLA-4_Ab2_LC_K_003 | ORF Sequence, NT |
| 324 | aCTLA-4_Ab2_LC_K_003 | mRNA Sequence |
| | | (assumes T100 tail) |
| 325 | aCTLA-4_Ab2_LC_K_003 | ORF Sequence, AA |
| | | (without leader sequence) |

[1203] Sequence optimized anti-CTLA-4 polynucleotides encoding tremelimumab and ipilimumab are shown in TABLE 3. These sequence optimized anti-CTLA-4 polynucleotides can be used to practice the methods disclosed elsewhere in the present application, for example, as alternatives or complementing the sequences disclosed in TABLES 1 and 2.

[1204] TABLE 3 presents the protein sequences of the light chains of tremelimumab (Treme-LC) and ipilimumab (IPI-LC), as well as heavy chains of tremelimumab (two forms, an IgG1 form and an IgG2) and ipilimumab (only an IgG1 form).

[1205] The protein subsequences corresponding to the constant regions, variable regions, and signal peptides are provided. Also included in TABLE 3 are sequence optimized anti-CTLA-4 polynucleotide sequences corresponding to each of the heavy chains and light chain for tremelimumab and ipilimumab. A person skilled in the art can easily determine with regions in the sequence optimized polynucleotides correspond to each one of the domains in the heavy or light chain.

[1206] Compositional analyses of the regions encoding the different domain of the codon optimized heavy and light chain sequences are presented in FIGS. 80A to 86D. The VH region is common to the IgG1 and IgG2 forms of the heavy chain of tremelimumab. The constant region of the LC is also common to the light chains for tremelimumab and ipilimumab.

[1207] Sequence comparison data provided in the specification and claims refers to sequences and subsequence in TABLE 3. The schema used to define a subsequence corresponding to a codon optimized sequence in TABLE 3 would be the following schema: [Antibody sequence]-[Chain]-[Domain]—[Codon optimized sequence]

[1208] Accordingly, IPI-HC-Var-CO9, would be the sequence corresponding to Ipilimumab, heavy chain, variable region, from codon optimized sequence 09 (C009).

TABLE 3
Optimized Tremelimumab and Ipilimumab Sequences

| SEQ | | |
|---|---|---|
| ID NO | Description | Sequence |
| 326 | Treme_LC (full | METPAQLLFLLLLWLPDTTGDIQMTQSPSSLSASVGDRVTITCRASQSINSY |
| | light chain) | LDWYQQKPGKAPKLLIYAASSLQSGVPSRFSGSGSGTDFTLTISSLQPEDFA |
| | | TYYCQQYYSTPFTFGPGTKVEIKRTVAAPSVFIFPPSDEQLKSGTASVVCLL |
| | | NNFYPREAKVQWKVDNALQSGNSQESVTEQDSKDSTYSLSSTLTLSKADYEK |
| | | HKVYACEVTHQGLSSPVTKSFNRGEC |
| 327 | Treme_LC (signal | METPAQLLFLLLLWLPDTTG |
| | peptide) | |
| 328 | Treme_LC | DIQMTQSPSSLSASVGDRVTITCRASQSINSYLDWYQQKPGKAPKLLIYAAS |
| | (variable region, | SLQSGVPSRFSGSGSGTDFTLTISSLQPEDFATYYCQQYYSTPFTFGPGTKV |
| | VL) | EIK |
| 329 | Treme_LC | RTVAAPSVFIFPPSDEQLKSGTASVVCLLNNFYPREAKVQWKVDNALQSGNS |
| | (constant region, | QESVTEQDSKDSTYSLSSTLTLSKADYEKHKVYACEVTHQGLSSPVTKSFNR |
| | CL) | GEC |
| 330 | Treme_LC-CO01 | ATGGAGACGCCCGCGCAGCTCCTCTTCCTCCTCCTCCTCTGGCTCCCCGACA |
| | | CCACCGGGGATATCCAGATGACCCAGTCCCCGAGCTCACTCTCCGCCAGCGT |
| | | TGGGGACCGGGTTACCATTACCTGCCGGGCGAGCCAGAGCATCAACAGCTAC |
| | | CTCGACTGGTACCAACAGAAGCCCGGCAAGGCCCCCAAGCTCCTTATTTACG |
| | | CCGCCAGCTCCTTACAGAGCGGGGTGCCCTCCAGGTTCAGCGGCTCCGGCTC |
| | | CGGCACCGACTTCACCCTAACCATCAGCAGCCTCCAGCCCGAAGACTTCGCC |
| | | ACGTACTACTGCCAGCAGTACTACAGCACCCCCTTCACCTTCGGGCCCGGCA |
| | | CCAAGGTGGAGATCAAGAGGACCGTGGCCGCCCCCAGCGTGTTTATCTTCCC |
| | | GCCCAGCGACGAGCAGTTAAAGTCCGGCACCGCGAGCGTGGTGTGTCTGCTG |
| | | AACAATTTCTACCCCCGGGAGGCCAAGGTGCAGTGGAAGGTGGATAACGCCC |
| | | TGCAGAGCGGCAATAGCCAGGAGTCCGTGACCGAGCAGGACAGCAAGGACAG |
| | | CACCTACTCCCTCAGCAGTACCCTGACTCTGAGCAAGGCCGATTACGAGAAG |
| | | CATAAGGTGTACGCCTGCGAGGTGACGCACCAAGGGCTGAGCTCACCCGTAA |
| | | CCAAGAGCTTCAACAGGGGGGAGTGC |
| 331 | Treme_LC-CO02 | ATGGAGACACCCGCCCAGCTTCTCTTCCTCTTGCTCCTTTGGCTCCCCGACA |
| | | CCACGGGGGACATCCAGATGACCCAGTCGCCCAGCAGCCTCAGCGCCAGCGT |
| | | TGGCGACAGGGTCACCATAACCTGTAGGGCCAGCCAGAGCATCAACAGCTAC |
| | | CTCGACTGGTACCAGCAGAAGCCGGGCAAGGCGCCCAAGCTCCTCATATACG |
| | | CCGCCTCCAGCCTCCAGTCCGGCGTCCCCAGCCGCTTCTCGGGCTCGGGCAG |
| | | CGGCACCGACTTCACGCTCACCATCTCCTCGCTCCAGCCCGAGGACTTTGCC |
| | | ACCTACTACTGTCAGCAGTACTATTCGACCCCCTTCACCTTCGGGCCGGGGA |
| | | CCAAGGTGGAGATCAAACGGACCGTGGCCGCCCCCAGCGTCTTTATCTTCCC |
| | | TCCCAGCGACGAGCAGTTGAAAAGCGGGACCGCCTCCGTGGTGTGCCTGCTG |
| | | AACAACTTTTATCCCAGGGAGGCCAAAGTGCAGTGGAAGGTGGACAATGCCC |
| | | TGCAGAGTGGCAACTCCCAGGAGAGCGTGACCGAGCAAGACTCCAAGGATTC |
| | | CACCTATAGCCTGTCCAGCACCCTCACCCTGTCCAAGGCCGACTATGAGAAG |
| | | CATAAGGTCTACGCCTGCGAGGTCACCCACCAGGGGCTGTCCAGCCCCGTGA |
| | | CCAAGAGCTTCAACAGGGGCGAGTGC |
| 332 | Treme_LC-CO03 | ATGGAGACACCCGCCCAGCTCCTCTTCCTCCTCCTTCTCTGGCTCCCCGACA |
| | | CCACCGGGGATATCCAGATGACCCAGAGCCCCAGCTCCCTATCGGCCTCCGT |
| | | AGGCGACCGCGTCACCATCACGTGCCGAGCCTCCCAATCCATTAATAGCTAT |
| | | TTGGACTGGTACCAACAGAAGCCGGGCAAGGCACCGAAGCTCTTGATCTACG |
| | | CCGCCAGCTCGCTCCAAAGCGGCGTACCGAGCCGCTTCAGCGGCAGCGGCTC |
| | | CGGGACCGATTTCACCCTCACCATCAGCAGCCTCCAGCCCGAGGACTTCGCC |
| | | ACCTACTATTGCCAGCAGTATTACAGCACCCCCTTCACCTTCGGGCCCGGAA |
| | | CCAAGGTGGAGATCAAGCGCACCGTGGCCGCCCCCAGCGTGTTTATCTTTCC |
| | | CCCGAGCGATGAGCAGCTGAAAAGCGGCACTGCCAGCGTGGTGTGCCTGCTG |
| | | AACAACTTCTACCCGCGCGAGGCGAAGGTCCAATGGAAAGTGGACAATGCCC |
| | | TGCAGAGCGGGAATAGCCAGGAGTCCGTGACCGAGCAGGACAGCAAGGACAG |
| | | CACCTACAGCCTGTCCAGCACCCTGACGCTGTCCAAAGCCGACTACGAGAAG |
| | | CACAAGGTCTACGCCTGCGAGGTGACCCACCAGGGCCTGAGCAGCCCCGTGA |
| | | CCAAGAGCTTCAATAGGGGGGAGTGC |
| 333 | Treme_LC-CO04 | ATGGAGACGCCCGCCCAGCTCCTCTTCCTCCTCCTCCTCTGGCTCCCCGACA |
| | | CCACCGGGGATATCCAGATGACCCAGTCCCCCAGCAGCCTCAGCGCCTCCGT |
| | | CGGGGACAGGGTCACCATCACCTGCCGGGCCTCCCAGTCCATCAATTCCTAC |
| | | CTCGACTGGTACCAGCAGAAGCCCGGCAAGGCCCCCAAGCTCCTCATCTACG |
| | | CCGCCAGCAGCTTGCAGAGCGGCGTCCCTTCCCGTTTCAGCGGCAGCGGGAG |
| | | CGGCACGGACTTCACCCTCACCATCTCGAGCCTCCAACCCGAGGATTTCGCC |
| | | ACCTACTACTGCCAGCAGTATTACAGCACCCCCTTCACCTTTGGCCCAGGGA |
| | | CCAAGGTGGAGATAAAGCGGACGGTGGCCGCCCCCAGCGTGTTCATCTTCCC |
| | | GCCCAGCGACGAACAGCTGAAAAGCGGGACCGCCAGCGTGGTGTGCCTGCTG |
| | | AACAACTTCTACCCCAGGGAGGCCAAGGTACAGTGGAAGGTGGACAATGCCC |
| | | TGCAAAGCGGGAACAGCCAGGAGAGCGTGACCGAGCAGGACTCCAAAGATTC |
| | | CACCTACAGCCTGTCCAGCACCCTGACTCTATCCAAGGCCGACTACGAAAAA |
| | | CACAAGGTGTACGCCTGCGAAGTCACCCACCAGGGTCTGAGCAGCCCCGTGA |
| | | CCAAGAGCTTTAACAGGGGGGAGTGC |
| 334 | Treme_LC-CO05 | ATGGAAACCCCCGCCCAGCTCCTCTTCCTCTTACTCCTCTGGCTCCCCGATA |
| | | CCACAGGGGACATCCAGATGACCCAGAGCCCCAGCTCCCTCTCCGCCAGCGT |
| | | CGGCGACCGGGTCACCATCACGTGCAGGGCCAGCCAGAGCATCAACTCGTAC |
| | | CTCGACTGGTATCAGCAGAAGCCCGGGAAGGCCCCCAAGCTCCTCATCTACG |
| | | CCGCCTCCTCCCTCCAGAGCGGCGTCCCGTCGAGGTTCAGCGGGTCGGGGTC |
| | | GGGCACCGACTTCACCCTAACCATCTCCAGCCTACAGCCGGAGGACTTTGCC |
| | | ACCTACTACTGCCAGCAATACTACTCCACGCCCTTCACCTTCGGCCCCGGCA |
| | | CCAAGGTGGAAATCAAGAGGACCGTGGCCGCCCCCTCCGTGTTTATCTTCCC |
| | | GCCCAGCGACGAGCAGCTCAAGAGCGGGACCGCCAGCGTGGTGTGCCTGCTC |
| | | AATAACTTCTACCCCCGGGAGGCCAAAGTGCAGTGGAAGGTGGACAACGCGC |
| | | TGCAGAGCGGTAACAGCCAGGAGTCCGTGACGGAGCAGGACTCCAAGGATTC |
| | | GACCTACTCCCTGAGCTCGACGCTGACCCTGAGCAAGGCCGACTACGAGAAG |
| | | CACAAGGTGTACGCCTGCGAGGTGACCCACCAAGGGCTGTCCAGCCCCGTGA |
| | | CCAAATCCTTCAACAGAGGGGAGTGC |
| 335 | Treme_LC-CO06 | ATGGAGACGCCCGCCCAGCTCCTCTTTCTTTTGCTCCTCTGGCTCCCGGACA |
| | | CAACCGGCGATATCCAGATGACCCAATCCCCCAGCAGCCTCAGCGCCAGCGT |
| | | CGGGGACAGGGTCACCATCACCTGCCGGGCCAGCCAGAGCATCAACAGCTAT |
| | | CTCGACTGGTACCAGCAGAAGCCCGGCAAGGCCCCCAAGCTTCTAATATACG |
| | | CCGCCAGCTCCCTCCAAAGCGGCGTACCGAGCCGGTTCTCCGGCAGCGGCAG |
| | | CGGGACCGACTTCACCCTCACGATCAGCAGCCTCCAGCCCGAAGACTTCGCG |
| | | ACCTATTACTGCCAACAGTATTACAGCACCCCGTTCACCTTCGGGCCCGGGA |
| | | CCAAGGTAGAGATCAAGCGCACCGTGGCCGCACCCTCCGTGTTTATCTTCCC |
| | | CCCGAGCGATGAGCAGCTGAAAAGCGGGACCGCCAGCGTGGTGTGCCTGCTG |
| | | AATAATTTTTACCCCAGGGAAGCCAAGGTGCAGTGGAAGGTGGACAACGCCC |
| | | TGCAGTCCGGCAACTCCCAGGAGTCCGTGACGGAGCAGGACAGCAAGGACAG |
| | | CACCTACAGCCTGTCCAGCACCCTCACCCTGAGCAAGGCCGACTACGAAAAG |
| | | CACAAGGTCTACGCCTGTGAGGTGACGCACCAGGGGCTGAGCTCCCCCGTCA |
| | | CCAAGAGCTTCAATCGCGGGGAGTGT |
| 336 | Treme_LC-CO07 | ATGGAGACTCCCGCCCAGCTCCTTTTCCTCCTTCTCCTCTGGTTGCCCGATA |
| | | CCACGGGCGACATCCAGATGACGCAGAGCCCCTCCAGCCTCAGCGCCTCCGT |
| | | TGGCGATAGGGTCACCATCACGTGTCGAGCCAGCCAGAGCATCAACTCCTAC |
| | | CTTGACTGGTACCAGCAGAAGCCCGGAAAGGCGCCCAAGCTCCTAATCTACG |
| | | CCGCCAGCAGCCTCCAAAGCGGCGTCCCCAGCCGCTTCAGCGGGTCCGGGTC |
| | | CGGCACCGACTTCACCCTCACCATATCGAGCCTACAGCCCGAGGATTTTGCA |
| | | ACGTACTATTGCCAGCAATATTATAGCACCCCCTTCACCTTCGGCCCCGGCA |
| | | CCAAGGTCGAGATTAAGCGGACCGTGGCGGCCCCCAGCGTGTTCATCTTCCC |
| | | TCCGAGCGATGAGCAGCTGAAAAGCGGGACCGCCAGCGTGGTCTGCCTGCTG |
| | | AACAACTTCTACCCCAGGGAGGCCAAGGTCCAGTGGAAGGTCGACAACGCCC |
| | | TCCAGTCTGGCAACAGCCAGGAGTCCGTGACCGAGCAGGACAGCAAGGACTC |
| | | CACGTACTCCCTGTCGAGCACCCTGACCCTGAGCAAGGCCGACTACGAGAAG |
| | | CACAAGGTCTACGCCTGTGAGGTGACCCATCAGGGCCTGTCCAGCCCCGTGA |
| | | CCAAGAGCTTTAACAGGGGAGAGTGC |
| 337 | Treme_LC-CO08 | ATGGAGACACCCGCCCAGCTCCTCTTCCTCCTCCTCCTATGGCTTCCAGACA |
| | | CCACCGGAGACATCCAGATGACCCAGAGCCCCAGCTCCCTCTCCGCCAGCGT |
| | | CGGCGACCGAGTCACCATCACCTGCAGGGCGAGCCAGAGCATAAACAGCTAC |
| | | CTCGACTGGTATCAGCAGAAGCCGGGCAAAGCCCCGAAGCTGCTCATTTACG |
| | | CCGCCAGCAGTCTCCAGAGCGGCGTACCCAGCAGGTTCAGCGGCAGCGGCTC |
| | | CGGCACCGACTTCACCCTCACGATAAGCAGCCTCCAGCCCGAGGACTTCGCG |
| | | ACCTACTACTGCCAGCAGTATTACTCCACGCCCTTCACCTTTGGCCCCGGGA |
| | | CCAAGGTGGAGATCAAGCGCACCGTGGCCGCCCCGAGCGTGTTCATCTTCCC |
| | | ACCCAGCGATGAGCAGCTGAAAAGCGGCACGGCCAGCGTCGTCTGCCTGCTG |
| | | AATAATTTCTACCCCCGGGAGGCCAAGGTGCAGTGGAAAGTGGACAATGCCC |
| | | TCCAGAGCGGCAACAGCCAGGAGAGCGTGACCGAGCAGGACTCCAAGGACAG |
| | | CACCTACAGCCTGTCCTCGACGCTGACCCTGTCCAAGGCCGACTACGAGAAA |
| | | CACAAAGTGTATGCCTGCGAGGTCACCCACCAGGGACTGAGCAGCCCGGTCA |
| | | CGAAGTCCTTCAACCGGGGCGAGTGC |
| 338 | Treme_LC-CO09 | ATGGAGACGCCCGCGCAGCTCCTCTTCCTCCTCCTCCTCTGGCTCCCCGACA |
| | | CCACCGGCGACATCCAGATGACCCAGTCTCCGAGCTCCCTCTCCGCGAGCGT |
| | | CGGCGACCGGGTCACCATAACCTGCAGGGCCAGCCAGAGCATCAACAGCTAT |
| | | CTCGACTGGTACCAGCAGAAGCCCGGCAAGGCCCCCAAACTCCTCATCTACG |
| | | CCGCCTCCAGCCTCCAGAGCGGCGTTCCCAGCCGGTTCAGCGGGTCCGGCAG |
| | | CGGCACGGACTTTACCCTCACCATCAGCAGCCTCCAACCGGAGGACTTCGCC |
| | | ACCTACTACTGCCAGCAGTATTACAGCACCCCCTTCACCTTTGGGCCCGGCA |
| | | CTAAGGTGGAGATCAAGCGCACCGTGGCCGCCCCCAGCGTGTTCATCTTCCC |
| | | GCCCAGCGACGAACAGCTGAAGTCCGGCACAGCCAGCGTGGTGTGCCTGCTG |
| | | AACAATTTCTACCCCAGGGAAGCCAAGGTGCAGTGGAAGGTGGACAACGCCC |
| | | TGCAGTCCGGCAACAGCCAGGAGTCCGTGACGGAACAGGACTCCAAGGACTC |
| | | CACCTACAGCCTATCCTCCACTCTCACCCTGTCCAAGGCCGACTACGAGAAG |
| | | CACAAGGTGTACGCCTGCGAGGTGACCCACCAGGGCCTCTCCAGCCCCGTTA |
| | | CCAAAAGCTTCAACCGGGGAGAGTGC |
| 339 | Treme_LC-CO10 | ATGGAGACGCCCGCCCAGCTTCTCTTCCTCCTCCTCCTCTGGCTTCCGGACA |
| | | CCACCGGCGACATCCAGATGACGCAGTCGCCCAGCAGCCTCAGCGCCTCCGT |
| | | CGGGGACAGGGTCACCATCACCTGCAGGGCCTCCCAGTCCATCAACTCCTAC |
| | | CTCGACTGGTACCAGCAGAAGCCGGGGAAAGCCCCCAAGCTCTTAATCTACG |
| | | CCGCGAGCAGCCTCCAGAGCGGGGTACCCTCGAGGTTCAGCGGCAGCGGCAG |
| | | CGGCACGGACTTCACCCTTACCATCAGCAGCCTCCAGCCCGAGGATTTCGCC |
| | | ACCTACTACTGTCAGCAGTACTACAGCACCCCCTTCACCTTCGGCCCCGGTA |
| | | CCAAGGTGGAGATCAAGAGGACCGTGGCCGCCCCCAGCGTCTTCATCTTCCC |
| | | GCCCAGCGATGAGCAGCTGAAATCCGGCACCGCCAGCGTGGTTTGCCTGCTG |
| | | AACAACTTCTACCCTCGGGAGGCCAAGGTGCAATGGAAGGTGGACAACGCGC |
| | | TGCAGTCGGGCAACAGCCAGGAAAGCGTGACCGAGCAGGACTCCAAGGACAG |
| | | CACCTATAGCCTGAGCTCCACGCTGACCCTGTCCAAGGCGGATTACGAGAAG |
| | | CACAAGGTGTACGCCTGCGAGGTCACGCACCAGGGCCTGTCAAGTCCGGTGA |
| | | CCAAAAGCTTCAACAGGGGCGAGTGC |
| 340 | Treme_LC-CO11 | ATGGAGACTCCCGCCCAGCTCCTTTTCCTCCTCCTCCTCTGGCTCCCGGACA |
| | | CCACCGGCGATATCCAGATGACCCAGAGCCCGTCCTCCCTAAGCGCCAGCGT |
| | | AGGCGACAGGGTCACAATCACCTGCAGGGCCAGCCAGAGCATCAACAGCTAT |
| | | TTGGACTGGTACCAGCAGAAGCCCGGCAAAGCCCCAAAGCTCCTAATCTACG |
| | | CCGCCAGCTCCCTTCAGAGCGGCGTCCCCTCCCGGTTTTCCGGTAGCGGATC |
| | | CGGGACCGACTTTACCTTGACCATCAGCAGCCTCCAGCCGGAAGATTTCGCC |
| | | ACCTATTACTGCCAGCAGTACTACAGCACCCCCTTCACCTTCGGCCCCGGCA |
| | | CCAAGGTGGAAATCAAAAGGACCGTGGCCGCCCCCAGCGTGTTCATTTTCCC |
| | | TCCCAGCGATGAGCAGCTGAAGTCGGGGACCGCCTCCGTGGTCTGCCTGCTG |
| | | AACAACTTTTATCCCAGGGAGGCCAAGGTGCAATGGAAAGTGGACAACGCCC |
| | | TGCAAAGCGGGAACAGCCAGGAGAGCGTGACCGAGCAGGACAGCAAGGACTC |
| | | CACCTACAGCCTGTCCTCCACCCTGACCCTCAGCAAGGCGGACTACGAAAAG |
| | | CATAAGGTGTATGCCTGCGAGGTGACCCACCAGGGGCTGTCCAGCCCGGTGA |
| | | CGAAGTCCTTCAACAGGGGGGAGTGC |
| 341 | Treme_LC-CO12 | ATGGAAACGCCCGCCCAACTACTTTTCCTCCTCCTCCTCTGGCTCCCCGACA |
| | | CCACGGGCGACATCCAGATGACCCAATCCCCCAGCAGCCTCAGCGCCAGCGT |
| | | AGGGGATAGGGTCACCATAACCTGCCGCGCCAGCCAGAGCATCAATAGCTAT |
| | | CTCGACTGGTACCAGCAGAAGCCGGGGAAGGCCCCGAAGCTCCTCATCTACG |
| | | CCGCCTCCTCACTCCAGAGCGGGGTCCCCTCTCGCTTCAGCGGAAGCGGGAG |
| | | CGGCACCGACTTCACGCTCACCATCTCCTCCCTCCAGCCCGAGGACTTTGCT |
| | | ACCTACTACTGCCAGCAGTACTATAGCACCCCCTTCACCTTCGGGCCCGGCA |
| | | CCAAGGTGGAGATCAAGAGGACGGTGGCCGCCCCCTCCGTGTTCATATTCCC |
| | | CCCGAGCGACGAGCAGCTGAAAAGCGGCACCGCCAGCGTGGTGTGCCTGCTG |
| | | AATAACTTCTACCCCAGGGAAGCCAAGGTGCAGTGGAAGGTGGACAACGCCC |
| | | TGCAGAGCGGCAACAGCCAGGAGTCCGTCACCGAACAGGACTCGAAGGACAG |
| | | CACGTACAGCCTCAGCAGCACCCTGACCCTGAGTAAGGCCGACTACGAGAAG |
| | | CATAAGGTGTACGCATGCGAAGTCACCCACCAGGGCCTGAGCAGCCCCGTGA |
| | | CAAAGTCCTTCAACCGGGGGGAGTGT |
| 342 | Treme_LC-CO13 | ATGGAAACCCCCGCCCAGCTCCTCTTCCTCCTCCTCCTCTGGCTCCCCGACA |
| | | CCACGGGGGACATCCAGATGACCCAGAGCCCCAGCTCCCTCTCCGCCAGCGT |
| | | CGGAGATCGGGTCACGATCACCTGCCGGGCCAGCCAGTCCATCAACAGCTAC |
| | | CTCGACTGGTACCAGCAGAAGCCCGGCAAGGCCCCCAAGCTCCTTATATACG |
| | | CCGCCTCCAGCCTTCAGAGCGGGGTCCCGAGCCGATTCAGCGGCTCCGGGTC |
| | | CGGCACAGATTTCACCCTCACCATCAGCTCCCTACAGCCGGAAGACTTCGCC |
| | | ACCTACTACTGCCAGCAGTACTACTCAACCCCGTTCACGTTTGGCCCCGGTA |
| | | CAAAGGTGGAGATCAAAAGGACCGTCGCCGCCCCCAGCGTGTTCATTTTCCC |
| | | GCCCAGCGACGAGCAGCTGAAAAGCGGCACTGCCAGCGTGGTGTGCCTGCTC |
| | | AACAACTTTTACCCCAGGGAGGCCAAGGTGCAGTGGAAAGTGGACAACGCCC |
| | | TCCAGAGCGGGAACAGCCAGGAGAGCGTCACCGAGCAGGACAGCAAAGACAG |
| | | CACGTACTCTCTGTCCAGCACCCTGACCCTCAGCAAGGCGGACTATGAGAAA |
| | | CACAAGGTGTACGCCTGCGAAGTGACCCACCAGGGCCTGAGCAGCCCGGTGA |
| | | CCAAGTCCTTCAACAGGGGCGAGTGC |
| 343 | Treme_LC-CO14 | ATGGAGACTCCCGCCCAGCTCCTCTTTCTTCTCCTCCTATGGCTCCCCGACA |
| | | CCACAGGCGACATCCAGATGACCCAGAGCCCCTCCAGCCTCAGCGCCTCGGT |
| | | CGGCGACAGGGTCACCATCACCTGCAGGGCCAGCCAGTCCATCAATAGCTAC |
| | | CTCGACTGGTACCAGCAGAAGCCCGGCAAGGCCCCCAAGCTCCTTATCTACG |
| | | CCGCCAGCAGCCTCCAGAGCGGGGTCCCGAGCCGTTTCAGCGGCAGCGGTAG |
| | | CGGCACGGACTTCACCCTCACCATCAGCAGCCTCCAGCCCGAGGATTTTGCC |
| | | ACCTACTACTGCCAGCAGTATTACTCCACCCCCTTCACCTTCGGACCCGGGA |
| | | CGAAGGTAGAGATCAAGAGGACGGTGGCGGCCCCCTCGGTGTTCATCTTCCC |
| | | GCCCAGCGATGAGCAGCTAAAGTCCGGCACCGCCAGCGTGGTGTGCCTGCTG |
| | | AACAACTTTTACCCGAGGGAGGCCAAGGTTCAGTGGAAGGTGGACAACGCCC |
| | | TGCAGAGCGGGAACTCCCAGGAGTCCGTGACGGAGCAGGACAGCAAGGACAG |
| | | CACCTACAGCCTGAGCAGCACCCTGACCCTGAGCAAGGCCGATTACGAGAAG |
| | | CACAAGGTGTACGCCTGCGAGGTGACCCATCAGGGCCTGAGCTCCCCGGTCA |
| | | CCAAGAGCTTCAACAGGGGCGAGTGC |
| 344 | Treme_LC-CO15 | ATGGAAACGCCCGCCCAGCTCCTCTTTCTCCTCCTCCTCTGGCTCCCCGACA |
| | | CCACGGGCGACATCCAGATGACCCAGTCCCCCAGCAGCCTCTCCGCCAGCGT |
| | | CGGCGATAGGGTCACCATCACCTGCCGGGCGTCCCAAAGCATCAACTCCTAC |
| | | CTGGACTGGTACCAGCAGAAGCCCGGCAAGGCGCCCAAGCTCCTTATCTACG |
| | | CCGCCAGCAGCCTCCAGAGCGGCGTCCCCAGCAGGTTCTCCGGGAGCGGGTC |
| | | CGGCACCGACTTCACCCTCACGATCTCCAGCCTCCAGCCCGAGGACTTCGCC |
| | | ACGTACTATTGTCAGCAGTACTACTCCACCCCGTTCACCTTCGGCCCGGGCA |
| | | CCAAGGTGGAGATCAAGAGGACGGTGGCCGCGCCCAGCGTGTTCATCTTCCC |
| | | TCCCTCCGATGAGCAGCTGAAGTCCGGCACCGCCTCCGTGGTCTGTCTGCTG |
| | | AACAACTTCTACCCCCGGGAGGCCAAGGTGCAGTGGAAGGTGGATAATGCCC |
| | | TGCAGAGCGGCAACAGCCAGGAGAGCGTGACCGAGCAGGACTCCAAGGACAG |
| | | CACCTACAGCCTCAGCTCCACCCTGACCCTGAGCAAGGCCGACTACGAGAAG |
| | | CACAAGGTGTATGCCTGTGAGGTCACCCATCAAGGGCTGTCCTCCCCCGTGA |
| | | CCAAGAGCTTCAACCGTGGCGAGTGT |
| 345 | Treme_LC-CO16 | ATGGAGACGCCCGCCCAATTGCTGTTCTTGCTCCTCCTCTGGCTCCCCGACA |
| | | CGACGGGCGACATCCAGATGACCCAGAGCCCCAGCTCCCTATCCGCCAGCGT |
| | | CGGCGACAGGGTCACCATCACCTGCCGCGCCTCCCAGAGCATCAATAGCTAC |
| | | CTCGACTGGTACCAGCAGAAGCCCGGCAAGGCCCCCAAACTCCTAATCTACG |
| | | CCGCCTCCTCGCTCCAATCCGGAGTCCCCAGCCGGTTCAGCGGGAGCGGCAG |
| | | CGGAACGGATTTCACCCTCACGATCAGCTCCCTCCAGCCGGAGGACTTTGCC |
| | | ACCTACTACTGTCAGCAGTACTACTCCACGCCCTTTACCTTTGGGCCCGGCA |
| | | CCAAGGTTGAGATCAAGCGGACGGTGGCCGCGCCCAGCGTGTTCATCTTCCC |
| | | GCCCTCCGACGAGCAGCTCAAGAGCGGGACCGCCAGCGTGGTCTGTCTGCTG |
| | | AACAACTTCTACCCGAGGGAGGCCAAGGTGCAGTGGAAGGTGGACAACGCCC |
| | | TGCAGAGCGGCAACTCCCAGGAGAGCGTCACCGAGCAAGACTCGAAGGACAG |
| | | CACCTACTCACTGTCCAGCACCCTGACCCTGTCGAAGGCCGACTATGAGAAG |
| | | CACAAGGTCTACGCCTGCGAGGTGACCCACCAGGGCCTTAGCAGCCCGGTGA |
| | | CCAAGAGCTTCAACAGGGGCGAGTGC |
| 346 | Treme_LC-CO17 | ATGGAGACACCCGCCCAGCTTCTCTTCCTCCTCCTCCTCTGGCTCCCCGACA |
| | | CCACCGGCGACATCCAGATGACCCAAAGCCCCAGCAGCCTCTCCGCCAGCGT |
| | | CGGCGACAGGGTCACCATAACTTGCCGGGCCTCCCAGTCCATCAATAGCTAC |
| | | CTAGACTGGTATCAGCAGAAGCCCGGCAAGGCCCCCAAATTACTCATCTACG |
| | | CCGCCAGCTCCCTCCAGTCCGGCGTCCCCAGCCGGTTCAGCGGGAGCGGCTC |
| | | GGGCACCGACTTCACGCTCACCATTTCCAGCCTCCAGCCGGAGGACTTCGCG |
| | | ACATACTACTGCCAGCAGTACTACAGCACCCCCTTCACGTTCGGGCCCGGCA |
| | | CCAAGGTGGAGATCAAGCGGACCGTGGCCGCCCCGAGCGTGTTCATCTTCCC |
| | | GCCCTCCGATGAGCAGCTGAAGTCCGGCACCGCTTCCGTGGTGTGTCTCCTG |
| | | AACAACTTTTACCCAAGGGAGGCCAAGGTGCAGTGGAAAGTTGACAACGCTC |
| | | TGCAGAGCGGCAACAGCCAGGAGAGCGTGACCGAGCAGGACAGCAAAGACTC |
| | | CACCTACAGCCTTAGCAGCACACTGACCCTGTCCAAGGCCGACTACGAGAAG |
| | | CACAAGGTGTACGCCTGTGAGGTGACCCACCAGGGGCTGTCCAGCCCCGTGA |
| | | CCAAGAGCTTCAATAGGGGGGAGTGC |
| 347 | Treme_LC-CO18 | ATGGAGACGCCGGCCCAGCTCCTCTTTCTCCTCCTCCTCTGGCTCCCGGACA |
| | | CGACGGGGGATATCCAGATGACCCAGAGCCCCAGCTCCCTCAGCGCCAGCGT |
| | | CGGCGATCGAGTCACGATCACCTGCCGGGCGTCCCAGAGCATCAACAGTTAC |
| | | CTCGACTGGTACCAGCAGAAGCCCGGCAAGGCCCCCAAGCTCTTAATCTACG |
| | | CCGCCAGCAGCCTCCAGAGCGGCGTTCCGTCCAGGTTCAGCGGCTCCGGCTC |
| | | GGGGACCGACTTCACCTTGACCATCAGCAGCCTCCAGCCCGAGGACTTCGCC |
| | | ACCTACTACTGTCAGCAGTACTATTCCACCCCATTCACCTTCGGCCCCGGCA |
| | | CCAAGGTCGAGATCAAGCGAACCGTGGCCGCCCCCAGCGTGTTTATCTTCCC |
| | | GCCCAGCGACGAGCAGCTGAAAAGCGGCACCGCCAGCGTGGTGTGCCTGCTG |
| | | AACAACTTCTACCCGAGGGAGGCCAAGGTGCAGTGGAAGGTGGACAATGCCC |
| | | TGCAGAGCGGCAACTCCCAGGAGAGCGTGACGGAGCAGGACAGCAAGGACTC |
| | | CACCTACAGCTTGTCAAGCACCCTGACGCTTAGCAAGGCTGACTATGAGAAG |
| | | CACAAGGTTTACGCCTGCGAAGTGACCCATCAAGGGCTGAGCTCACCCGTGA |
| | | CGAAAAGCTTCAATAGGGGTGAGTGC |
| 348 | Treme_LC-CO19 | ATGGAGACGCCCGCCCAGCTCCTCTTCCTCCTCCTCCTCTGGCTCCCCGATA |
| | | CCACCGGCGACATCCAGATGACCCAGTCACCCTCCAGCCTCAGCGCGAGCGT |
| | | CGGGGATCGAGTAACTATCACCTGCCGGGCCAGCCAGAGCATCAACAGCTAC |
| | | CTCGATTGGTACCAGCAAAAGCCCGGCAAGGCCCCCAAATTACTCATATACG |
| | | CGGCCAGCTCCCTCCAGTCCGGAGTCCCGTCCCGGTTCAGCGGCAGCGGGAG |
| | | CGGGACCGACTTCACCCTCACAATCTCAAGCCTCCAGCCCGAGGACTTCGCC |
| | | ACGTACTATTGCCAGCAGTACTACAGCACCCCCTTCACCTTCGGCCCCGGCA |
| | | CCAAGGTGGAGATCAAGAGGACGGTGGCCGCGCCCAGCGTCTTCATCTTTCC |
| | | CCCCTCCGACGAACAGCTGAAAAGCGGGACCGCCTCGGTGGTGTGCCTGCTG |
| | | AACAACTTTTACCCAAGGGAGGCCAAGGTGCAGTGGAAGGTGGACAACGCCC |
| | | TCCAGTCCGGGAACTCCCAGGAGTCCGTGACCGAGCAGGACTCTAAGGACAG |
| | | CACCTACTCCCTGTCCAGCACGCTGACGCTCAGCAAGGCGGACTACGAGAAG |
| | | CACAAGGTGTACGCCTGTGAGGTGACCCACCAGGGCCTGTCGAGCCCCGTCA |
| | | CCAAGAGCTTCAACAGGGGCGAGTGT |
| 349 | Treme_LC-CO20 | ATGGAGACTCCCGCCCAGCTCCTCTTTCTCCTCCTCCTCTGGCTCCCCGACA |
| | | CGACCGGGGACATCCAAATGACCCAGAGCCCCAGCAGCCTCAGCGCAAGCGT |
| | | AGGCGATCGGGTCACCATCACCTGCAGGGCCAGCCAGTCCATCAACTCGTAC |
| | | CTCGACTGGTACCAGCAGAAGCCCGGCAAAGCTCCCAAGCTCCTCATATACG |
| | | CCGCTAGCTCCCTCCAGAGCGGGGTCCCTAGTAGGTTCAGCGGGTCCGGGAG |
| | | CGGCACCGACTTCACGCTCACCATCTCCAGCTTGCAGCCCGAGGACTTCGCC |
| | | ACTTACTACTGCCAGCAGTACTACAGCACCCCCTTTACGTTTGGCCCCGGCA |
| | | CCAAGGTGGAGATCAAGAGGACCGTGGCCGCCCCCAGCGTGTTCATCTTCCC |
| | | GCCCAGCGACGAGCAGCTGAAGTCGGGCACCGCTTCAGTTGTCTGTCTGCTG |
| | | AACAACTTTTACCCCCGCGAGGCCAAGGTGCAGTGGAAGGTGGACAACGCCC |
| | | TCCAGAGCGGGAACAGCCAGGAGAGCGTGACGGAGCAGGACTCCAAGGATAG |
| | | CACCTACAGCCTGAGTTCGACCCTCACGCTGAGCAAGGCCGACTACGAGAAA |
| | | CACAAGGTGTATGCCTGCGAGGTGACCCACCAGGGGCTTTCCTCCCCCGTCA |
| | | CCAAGAGCTTCAATAGGGGGGAGTGC |
| 350 | Treme_LC-CO21 | ATGGAGACGCCCGCGCAACTTCTCTTCCTACTCCTCCTCTGGCTCCCCGACA |
| | | CCACCGGGGACATCCAGATGACCCAGTCCCCCTCGAGCCTCTCAGCCTCCGT |
| | | AGGGGACCGGGTCACCATCACTTGCAGGGCCAGCCAAAGCATCAACAGCTAC |
| | | CTCGACTGGTACCAGCAGAAGCCCGGGAAGGCCCCGAAGCTCCTCATCTACG |
| | | CCGCCAGCAGCCTCCAGTCCGGCGTACCCAGCAGGTTCTCCGGCTCCGGGAG |
| | | CGGAACCGACTTCACACTCACCATCTCGTCCCTCCAGCCCGAGGATTTTGCC |
| | | ACCTACTACTGTCAGCAGTACTACAGCACCCCCTTTACCTTTGGCCCCGGCA |
| | | CCAAAGTGGAGATCAAACGGACCGTGGCCGCCCCCTCGGTGTTCATATTCCC |
| | | GCCAAGCGACGAGCAGCTGAAAAGCGGCACGGCCTCCGTGGTGTGCCTGCTG |
| | | AACAACTTCTATCCCCGCGAAGCCAAGGTGCAGTGGAAGGTCGATAACGCCC |
| | | TGCAATCAGGGAACAGCCAGGAGTCGGTGACCGAGCAGGACAGCAAAGATAG |
| | | CACCTACTCCCTGAGCAGCACCCTGACCCTGTCCAAGGCGGACTACGAGAAA |
| | | CATAAGGTGTACGCGTGCGAGGTGACCCATCAGGGACTGAGCAGCCCCGTGA |
| | | CGAAGTCCTTCAACCGGGGCGAGTGC |
| 351 | Treme_LC-CO22 | ATGGAGACACCCGCCCAGCTCCTCTTCCTCCTCTTGCTCTGGCTCCCCGACA |
| | | CGACCGGGGACATCCAGATGACGCAGAGCCCTTCTTCGTTGTCCGCCTCCGT |
| | | CGGCGACCGGGTCACCATCACCTGCAGAGCCTCCCAGAGCATCAATAGCTAC |
| | | CTCGACTGGTACCAGCAGAAGCCGGGCAAGGCCCCCAAGCTCCTCATCTACG |
| | | CCGCCAGCAGCTTACAGAGCGGGGTACCCAGCCGGTTCTCGGGGAGCGGGAG |
| | | CGGCACCGACTTCACCCTCACCATCAGCAGCCTCCAGCCCGAGGACTTCGCC |
| | | ACCTATTACTGCCAGCAGTACTATAGCACCCCCTTCACCTTTGGGCCGGGCA |
| | | CGAAGGTGGAAATTAAGCGGACCGTGGCCGCCCCCAGCGTGTTCATCTTCCC |
| | | ACCCTCCGACGAGCAGCTCAAGAGCGGAACCGCCAGCGTGGTGTGTCTGCTG |
| | | AATAACTTCTACCCGCGCGAGGCCAAGGTCCAGTGGAAGGTGGACAACGCCC |
| | | TGCAGAGCGGGAACAGCCAGGAGTCCGTGACCGAGCAGGACAGCAAGGACAG |
| | | CACGTACAGCCTGTCCAGCACCCTGACCCTGTCCAAGGCCGACTATGAGAAG |
| | | CACAAGGTGTATGCCTGCGAGGTGACCCACCAAGGGCTGTCCAGCCCCGTGA |
| | | CCAAGTCCTTCAACAGGGGTGAGTGC |
| 352 | Treme_LC-CO23 | ATGGAGACGCCCGCGCAACTCCTCTTCCTCCTCCTCCTCTGGTTACCCGACA |
| | | CCACGGGCGATATCCAGATGACCCAGTCGCCCAGCAGCTTGTCCGCCAGCGT |
| | | AGGGGACAGGGTCACCATCACCTGCCGGGCATCTCAGAGCATCAACTCCTAC |
| | | CTCGACTGGTACCAGCAGAAGCCCGGCAAGGCCCCCAAGCTCTTGATCTACG |
| | | CCGCCAGCAGCCTCCAGAGCGGCGTCCCCTCGCGGTTCAGCGGGAGCGGCAG |
| | | CGGGACGGACTTCACCCTCACCATAAGCTCTCTCCAGCCAGAGGATTTCGCC |
| | | ACGTACTACTGTCAGCAGTATTACAGCACCCCGTTCACGTTCGGCCCCGGCA |
| | | CGAAGGTGGAGATCAAGCGGACCGTGGCCGCCCCCTCGGTGTTCATCTTTCC |
| | | CCCCTCCGACGAACAGCTGAAGTCGGGCACCGCCAGCGTGGTGTGCCTGCTG |
| | | AACAACTTCTACCCGCGCGAAGCCAAGGTGCAGTGGAAGGTAGACAATGCAC |
| | | TGCAGTCCGGCAACAGCCAAGAGTCCGTAACCGAGCAGGACTCCAAGGACAG |
| | | CACATACAGCCTGAGCAGTACCCTCACGCTCAGCAAGGCAGACTACGAGAAG |
| | | CACAAGGTCTATGCCTGCGAGGTGACCCACCAGGGCCTGAGCTCCCCCGTGA |
| | | CCAAGAGCTTTAACAGGGGCGAGTGC |
| 353 | Treme_LC-CO24 | ATGGAGACGCCCGCCCAGCTCCTCTTTCTCCTCCTCCTCTGGCTCCCCGACA |
| | | CCACGGGGGACATCCAGATGACCCAGAGCCCCTCCAGCCTCAGCGCCTCGGT |
| | | AGGCGACAGGGTTACCATCACCTGCCGGGCCTCCCAGTCGATCAATTCCTAC |
| | | CTCGACTGGTACCAGCAGAAGCCGGGCAAGGCCCCCAAGCTCCTCATTTACG |
| | | CCGCGAGCTCCCTCCAGTCCGGCGTCCCCAGCCGGTTTTCCGGCTCGGGCAG |
| | | CGGCACCGATTTTACCCTCACGATCTCCAGCTTGCAGCCCGAGGACTTCGCC |
| | | ACCTACTACTGTCAGCAGTATTACTCCACCCCGTTCACCTTTGGCCCCGGGA |
| | | CCAAAGTGGAGATCAAGCGTACGGTCGCCGCCCCCAGCGTGTTCATTTTCCC |
| | | ACCCAGCGACGAGCAACTCAAGTCCGGCACCGCCAGCGTGGTGTGCCTCCTG |
| | | AACAACTTTTATCCCCGCGAGGCCAAGGTGCAGTGGAAGGTGGACAACGCCC |
| | | TGCAAAGCGGCAACAGCCAGGAAAGCGTGACGGAGCAGGACTCCAAAGACTC |
| | | CACGTACAGCCTCTCCAGCACCCTGACCCTGAGCAAAGCAGACTACGAGAAA |
| | | CACAAGGTGTACGCCTGCGAGGTGACCCACCAGGGGCTCAGCAGCCCCGTGA |
| | | CCAAGAGCTTTAACCGGGGTGAGTGC |
| 354 | Treme_LC-CO25 | ATGGAAACGCCCGCCCAGCTTCTCTTCCTCCTACTCCTCTGGCTCCCCGACA |
| | | CCACCGGGGACATCCAGATGACCCAGAGCCCCTCCAGCCTCTCGGCCTCGGT |
| | | TGGCGACAGAGTAACCATAACCTGCCGGGCCTCCCAGAGCATCAACAGCTAC |
| | | CTCGACTGGTACCAGCAGAAGCCCGGCAAGGCGCCCAAGCTCTTGATTTACG |
| | | CGGCAAGCAGCTTGCAGTCCGGCGTCCCCTCACGGTTCAGCGGGAGCGGGTC |
| | | AGGCACCGACTTTACGCTCACCATCTCGAGCCTCCAGCCAGAGGACTTTGCC |
| | | ACCTACTACTGCCAACAGTATTACAGCACCCCGTTCACCTTCGGCCCAGGAA |
| | | CCAAGGTGGAGATCAAGCGCACCGTGGCCGCCCCCAGCGTCTTCATCTTCCC |
| | | GCCCAGCGACGAGCAGCTGAAAAGCGGCACCGCCTCCGTGGTGTGCCTGCTG |
| | | AATAACTTTTACCCGCGGGAGGCCAAGGTGCAGTGGAAGGTGGACAACGCCC |
| | | TCCAGAGCGGGAACTCCCAGGAGAGCGTGACCGAACAGGACAGCAAGGACTC |
| | | CACGTACTCCCTTAGCAGCACCCTGACCCTGTCGAAGGCCGATTACGAGAAG |
| | | CACAAGGTGTACGCCTGCGAGGTGACCCACCAGGGTTTATCCTCGCCCGTGA |
| | | CCAAGTCCTTCAACCGAGGCGAGTGC |
| 355 | Treme_HC_IgG2 | METPAQLLFLLLLWLPDTTGQVQLVESGGGVVQPGRSLRLSCAASGFTFSSY |
| | (tremelimumab | GMHWVRQAPGKGLEWVAVIWYDGSNKYYADSVKGRFTISRDNSKNTLYLQMN |
| | IgG2 heavy chain) | SLRAEDTAVYYCARDPRGATLYYYYYGMDVWGQGTTVTVSSASTKGPSVFPL |
| | | APCSRSTSESTAALGCLVKDYFPEPVTVSWNSGALTSGVHTFPAVLQSSGLY |
| | | SLSSVVTVPSSNFGTQTYTCNVDHKPSNTKVDKTVERKCCVECPPCPAPPVA |
| | | GPSVFLFPPKPKDTLMISRTPEVTCVVVDVSHEDPEVQFNWYVDGVEVHNAK |
| | | TKPREEQFNSTFRVVSVLTVVHQDWLNGKEYKCKVSNKGLPAPIEKTISKTK |
| | | GQPREPQVYTLPPSREEMTKNQVSLTCLVKGFYPSDIAVEWESNGQPENNYK |
| | | TTPPMLDSDGSFFLYSKLTVDKSRWQQGNVFSCSVMHEALHNHYTQKSLSLS |
| | | PGK |
| 356 | Treme_HC_IgG2 | METPAQLLFLLLLWLPDTTG |
| | (signal peptide) | |
| 357 | Treme_HC_IgG2 | QVQLVESGGGVVQPGRSLRLSCAASGFTFSSYGMHWVRQAPGKGLEWVAVIW |
| | (variable region, | YDGSNKYYADSVKGRFTISRDNSKNTLYLQMNSLRAEDTAVYYCARDPRGAT |
| | VH) | LYYYYYGMDVWGQGTTVTVSS |
| 358 | Treme_HC_IgG2 | ASTKGPSVFPLAPCSRSTSESTAALGCLVKDYFPEPVTVSWNSGALTSGVHT |
| | (constant region) | FPAVLQSSGLYSLSSVVTVPSSNFGTQTYTCNVDHKPSNTKVDKTVERKCCV |
| | | ECPPCPAPPVAGPSVFLFPPKPKDTLMISRTPEVTCVVVDVSHEDPEVQFNW |
| | | YVDGVEVHNAKTKPREEQFNSTFRVVSVLTVVHQDWLNGKEYKCKVSNKGLP |
| | | APIEKTISKTKGQPREPQVYTLPPSREEMTKNQVSLTCLVKGFYPSDIAVEW |
| | | ESNGQPENNYKTTPPMLDSDGSFFLYSKLTVDKSRWQQGNVFSCSVMHEALH |
| | | NHYTQKSLSLSPGK |
| 359 | Treme_HC_IgG2- | ATGGAGACGCCGGCCCAGCTATTGTTCCTCCTCCTCCTCTGGCTCCCCGACA |
| | CO01 | CCACCGGGCAGGTCCAGCTAGTTGAGAGCGGCGGGGGCGTCGTCCAGCCCGG |
| | | CAGGTCCCTCAGGCTCAGCTGCGCCGCCTCGGGGTTCACCTTCAGCTCCTAC |
| | | GGCATGCACTGGGTCAGGCAGGCCCCCGGCAAGGGGCTCGAGTGGGTCGCCG |
| | | TCATCTGGTACGACGGTAGCAATAAGTATTACGCCGATAGCGTCAAGGGCCG |
| | | GTTTACCATAAGCAGGGACAACAGCAAGAACACCCTCTACCTGCAGATGAAC |
| | | AGTCTGAGGGCCGAGGATACCGCCGTGTACTACTGTGCTCGGGACCCCAGGG |
| | | GTGCCACTCTGTACTACTACTACTACGGCATGGACGTGTGGGGCCAGGGCAC |
| | | GACGGTGACCGTGAGCTCCGCCTCCACCAAGGGCCCCTCTGTGTTCCCGCTG |
| | | GCCCCCTGCAGCCGGTCCACCAGCGAAAGCACCGCCGCCCTGGGCTGCCTGG |
| | | TGAAGGACTACTTCCCCGAGCCCGTGACCGTCAGCTGGAACAGCGGAGCTCT |
| | | GACCAGCGGCGTGCACACCTTTCCCGCCGTGCTCCAGAGCAGCGGCTTGTAC |
| | | AGCCTGTCCAGCGTGGTGACCGTGCCGAGCAGCAACTTCGGCACCCAAACGT |
| | | ACACCTGCAACGTGGACCATAAGCCCAGCAACACCAAGGTGGACAAGACCGT |
| | | GGAGCGGAAATGCTGCGTGGAGTGCCCACCCTGTCCCGCCCCGCCGGTGGCC |
| | | GGCCCCTCCGTGTTTCTGTTTCCGCCCAAGCCGAAGGACACCCTGATGATCA |
| | | GCCGCACCCCGGAGGTGACCTGCGTGGTGGTGGACGTGAGCCACGAGGACCC |
| | | CGAGGTGCAATTCAACTGGTACGTTGATGGCGTGGAGGTCCACAACGCCAAG |
| | | ACCAAGCCCAGGGAGGAACAGTTTAACTCCACCTTCCGGGTCGTGAGCGTGC |
| | | TGACTGTGGTGCACCAGGACTGGCTGAACGGCAAGGAGTACAAGTGCAAGGT |
| | | GAGCAACAAGGGGCTGCCCGCCCCCATCGAGAAGACGATCTCCAAGACCAAG |
| | | GGCCAGCCCCGCGAACCCCAAGTGTACACCCTGCCCCCCAGCCGGGAGGAAA |
| | | TGACCAAAAACCAGGTGAGCCTTACCTGTCTGGTGAAGGGCTTTTACCCCAG |
| | | CGACATCGCCGTGGAATGGGAGTCGAACGGCCAGCCGGAGAACAACTATAAA |
| | | ACCACCCCTCCCATGCTGGACAGCGACGGCTCTTTCTTCCTGTATAGCAAGC |
| | | TGACTGTGGACAAGAGCCGCTGGCAGCAGGGCAACGTGTTCTCATGCTCCGT |
| | | GATGCACGAAGCCCTACACAACCACTACACCCAGAAAAGCCTCAGCCTCAGC |
| | | CCCGGCAAG |
| 360 | Treme_HC_IgG2- | ATGGAGACGCCCGCCCAACTCCTCTTTCTCCTCCTCCTCTGGCTCCCCGACA |
| | CO02 | CGACCGGCCAAGTCCAGCTCGTCGAGAGCGGCGGCGGCGTCGTCCAGCCGGG |
| | | GAGGTCCCTCAGGCTCTCGTGCGCCGCCAGCGGCTTCACCTTCAGTTCCTAC |
| | | GGCATGCACTGGGTCAGGCAGGCCCCCGGCAAGGGTCTGGAGTGGGTCGCCG |
| | | TCATCTGGTACGACGGCAGCAACAAGTACTACGCCGACAGCGTAAAGGGCCG |
| | | GTTCACCATCAGCAGGGACAATTCGAAGAACACCCTGTATCTGCAGATGAAC |
| | | TCCCTCAGGGCCGAGGACACCGCCGTGTACTACTGCGCCAGGGACCCCAGGG |
| | | GGGCCACCCTCTACTATTACTACTACGGCATGGACGTGTGGGGGCAGGGGAC |
| | | CACCGTCACCGTGTCCAGCGCCAGCACGAAGGGGCCCAGCGTCTTCCCGCTG |
| | | GCCCCCTGCAGCAGGAGCACCAGCGAGAGCACCGCTGCCCTGGGGTGCCTGG |
| | | TGAAGGACTACTTTCCGGAGCCCGTGACAGTGAGCTGGAACAGCGGCGCCCT |
| | | GACCAGCGGGGTGCACACGTTCCCCGCAGTGCTGCAGAGCAGCGGGCTGTAC |
| | | AGCCTCTCCAGCGTGGTGACCGTGCCCAGCAGCAACTTTGGCACCCAGACGT |
| | | ACACCTGCAACGTGGACCACAAGCCCTCAAATACCAAGGTCGACAAGACCGT |
| | | GGAGCGGAAGTGCTGTGTGGAGTGCCCACCCTGCCCAGCCCCGCCCGTGGCC |
| | | GGCCCCTCCGTGTTCCTGTTTCCCCCGAAGCCGAAGGACACCCTCATGATCT |
| | | CCAGGACCCCCGAAGTGACCTGCGTGGTGGTGGACGTGAGCCACGAGGACCC |
| | | CGAGGTGCAGTTCAACTGGTACGTTGACGGGGTGGAGGTGCACAACGCCAAG |
| | | ACCAAGCCCCGCGAGGAGCAATTCAACAGCACCTTCAGGGTGGTGAGCGTAC |
| | | TGACCGTAGTGCACCAGGACTGGCTGAACGGCAAGGAGTACAAGTGTAAGGT |
| | | GAGCAACAAGGGCCTGCCCGCCCCCATCGAAAAGACAATTTCCAAGACGAAG |
| | | GGGCAACCCAGGGAGCCCCAGGTGTATACCCTGCCCCCCAGCAGGGAGGAGA |
| | | TGACGAAGAACCAGGTGTCGCTGACCTGTCTCGTCAAGGGCTTCTATCCGAG |
| | | CGACATCGCCGTGGAGTGGGAGTCGAACGGGCAACCCGAGAACAACTATAAG |
| | | ACCACGCCCCCCATGCTGGACTCCGACGGGAGCTTCTTCCTCTACAGCAAGC |
| | | TGACCGTGGACAAAAGCCGGTGGCAGCAGGGGAACGTGTTCAGCTGCTCCGT |
| | | GATGCACGAGGCGCTGCATAATCACTACACCCAGAAGTCCCTGAGCCTGAGC |
| | | CCGGGCAAG |
| 361 | Treme_HC_IgG2- | ATGGAGACGCCAGCCCAGCTCCTCTTTCTCTTACTCCTCTGGCTACCGGACA |
| | CO03 | CCACCGGCCAGGTCCAGCTCGTCGAGAGCGGCGGCGGCGTCGTCCAGCCGGG |
| | | CAGGTCCCTCAGGCTCAGCTGCGCCGCCAGCGGCTTCACCTTCAGCTCCTAC |
| | | GGCATGCACTGGGTAAGGCAGGCGCCGGGCAAGGGCCTAGAGTGGGTCGCCG |
| | | TTATCTGGTACGACGGGAGCAACAAATACTACGCCGACAGCGTCAAGGGAAG |
| | | GTTCACCATCAGCAGGGATAACTCCAAAAATACCCTCTACCTCCAGATGAAC |
| | | TCCCTGAGGGCGGAGGATACCGCGGTGTACTACTGCGCCAGGGATCCCAGGG |
| | | GCGCCACCCTCTACTATTACTACTACGGCATGGATGTATGGGGCCAGGGGAC |
| | | CACCGTGACCGTCAGCTCCGCCTCCACCAAAGGCCCGTCCGTGTTCCCCCTG |
| | | GCGCCCTGCAGCAGGAGCACCAGCGAGAGCACCGCTGCCCTGGGCTGCCTGG |
| | | TGAAGGACTACTTCCCGGAGCCCGTGACCGTGTCATGGAACTCCGGGGCCCT |
| | | GACCAGCGGCGTCCACACCTTCCCCGCCGTGCTGCAGTCCTCCGGACTGTAC |
| | | TCGCTGAGCTCCGTGGTGACGGTCCCCAGCTCCAATTTCGGGACCCAGACCT |
| | | ACACCTGCAACGTGGACCACAAGCCCAGCAACACCAAGGTGGACAAGACCGT |
| | | GGAACGAAAGTGCTGCGTCGAGTGTCCCCCCTGCCCCGCCCCGCCCGTCGCC |
| | | GGCCCCAGCGTGTTCCTGTTCCCACCCAAGCCCAAGGACACGCTGATGATCT |
| | | CCCGGACCCCCGAGGTGACCTGCGTGGTCGTGGACGTGTCTCACGAGGACCC |
| | | CGAGGTGCAGTTCAATTGGTACGTGGACGGGGTCGAGGTCCACAACGCCAAG |
| | | ACTAAGCCCCGGGAGGAGCAGTTCAACAGCACGTTCAGGGTGGTGTCCGTGC |
| | | TGACCGTCGTCCACCAGGACTGGCTCAACGGCAAGGAGTACAAGTGCAAGGT |
| | | TTCCAACAAGGGGCTCCCCGCCCCCATCGAGAAGACGATTTCCAAGACCAAG |
| | | GGCCAACCCCGCGAGCCCCAGGTGTACACCCTGCCCCCCAGCAGGGAGGAGA |
| | | TGACCAAAAACCAGGTGTCCCTGACCTGCCTGGTGAAGGGGTTCTACCCGAG |
| | | CGACATCGCCGTGGAGTGGGAGAGCAACGGGCAGCCCGAGAACAACTACAAG |
| | | ACCACCCCGCCGATGCTGGATAGCGACGGGAGCTTCTTCCTCTACTCCAAGC |
| | | TCACCGTGGACAAGAGCCGCTGGCAGCAGGGCAACGTGTTCAGCTGCAGCGT |
| | | GATGCACGAGGCCCTGCATAACCACTACACCCAGAAAAGCCTGTCCCTGAGC |
| | | CCCGGCAAG |
| 362 | Treme_HC_IgG2- | ATGGAGACACCCGCCCAACTCCTCTTTTTGCTCCTCCTTTGGCTCCCCGACA |
| | CO04 | CCACCGGCCAGGTCCAGCTCGTCGAGAGCGGCGGCGGGGTTGTCCAGCCGGG |
| | | CCGCTCCCTCAGGCTCAGCTGTGCCGCCAGCGGCTTCACTTTCAGCAGCTAC |
| | | GGCATGCACTGGGTCAGGCAGGCCCCCGGCAAGGGCTTGGAGTGGGTTGCCG |
| | | TTATCTGGTACGACGGCAGCAACAAGTACTACGCCGATTCCGTCAAGGGCCG |
| | | CTTCACCATAAGCAGAGACAACAGCAAAAACACGCTCTATCTGCAGATGAAC |
| | | AGCCTGCGGGCCGAGGACACCGCCGTGTATTACTGTGCCAGGGATCCGCGCG |
| | | GCGCCACCCTGTACTACTATTACTACGGGATGGACGTGTGGGGCCAGGGCAC |
| | | CACTGTTACCGTCTCCAGCGCCAGCACGAAGGGGCCCAGCGTCTTTCCGCTG |
| | | GCCCCCTGCAGCCGGAGCACGTCCGAGAGCACTGCCGCCCTGGGGTGCCTGG |
| | | TGAAGGACTACTTCCCCGAGCCCGTGACCGTCTCATGGAACTCCGGCGCTCT |
| | | GACCTCCGGGGTGCATACCTTCCCCGCCGTGCTTCAGTCCAGCGGCCTGTAC |
| | | AGCCTGAGCTCCGTGGTGACCGTGCCCTCCAGCAACTTTGGGACTCAGACCT |
| | | ACACCTGCAACGTCGACCACAAGCCAAGCAACACCAAGGTAGACAAGACCGT |
| | | GGAGCGGAAGTGCTGCGTGGAGTGCCCGCCCTGCCCTGCCCCTCCCGTCGCC |
| | | GGCCCAAGCGTGTTCCTGTTCCCACCCAAGCCCAAGGATACCCTGATGATTT |
| | | CCCGGACCCCCGAGGTGACCTGCGTCGTGGTGGACGTCAGCCACGAAGACCC |
| | | CGAGGTGCAGTTCAATTGGTACGTGGATGGCGTGGAAGTGCACAACGCCAAG |
| | | ACGAAGCCAAGGGAGGAGCAGTTTAACTCCACCTTCCGGGTGGTGAGCGTGC |
| | | TCACCGTCGTCCACCAGGACTGGCTCAATGGGAAGGAGTACAAGTGCAAGGT |
| | | GTCCAATAAGGGCCTGCCCGCCCCCATCGAGAAAACGATCAGCAAGACCAAG |
| | | GGGCAGCCAAGGGAGCCCCAGGTGTACACCCTCCCACCCAGCCGGGAGGAGA |
| | | TGACCAAGAATCAGGTCAGCCTCACTTGCCTGGTGAAGGGCTTTTACCCCTC |
| | | CGACATCGCCGTGGAGTGGGAGAGCAACGGCCAGCCCGAAAATAACTACAAG |
| | | ACCACCCCACCGATGCTGGATAGCGACGGCAGCTTCTTCCTGTACAGCAAGC |
| | | TGACCGTGGACAAGTCCCGCTGGCAGCAGGGCAACGTGTTCTCGTGCAGCGT |
| | | GATGCACGAGGCTCTGCATAACCACTACACCCAGAAATCCCTCTCCCTGTCC |
| | | CCCGGCAAG |
| 363 | Treme_HC_IgG2- | ATGGAGACACCCGCCCAGCTCCTCTTCCTCCTCCTATTGTGGCTCCCGGATA |
| | CO05 | CCACCGGGCAGGTCCAGCTGGTGGAGAGCGGCGGGGGCGTCGTACAGCCCGG |
| | | CAGGAGCCTCAGGCTCAGCTGCGCCGCCAGCGGCTTCACCTTCAGCAGCTAC |
| | | GGCATGCACTGGGTCAGGCAGGCCCCAGGGAAGGGGTTGGAGTGGGTCGCCG |
| | | TCATCTGGTACGACGGGAGCAACAAATACTACGCAGACAGCGTCAAGGGCCG |
| | | ATTCACCATTAGCCGGGATAACAGCAAGAACACCCTCTACCTGCAAATGAAC |
| | | AGCCTGAGGGCCGAGGACACGGCCGTATACTATTGCGCCAGGGACCCCCGTG |
| | | GCGCCACACTGTACTATTACTACTACGGTATGGACGTTTGGGGGCAGGGTAC |
| | | TACCGTGACCGTCTCGAGCGCCAGCACCAAAGGCCCCAGCGTGTTCCCCCTG |
| | | GCCCCCTGCTCCAGGAGCACCAGCGAGTCCACCGCCGCGCTGGGCTGCCTGG |
| | | TGAAGGATTACTTCCCCGAGCCCGTGACGGTGAGCTGGAACAGCGGGGCCCT |
| | | GACAAGCGGAGTGCATACCTTCCCGGCAGTGCTGCAAAGCAGCGGCCTCTAC |
| | | AGCCTGAGCAGCGTCGTGACCGTGCCCAGCAGCAACTTCGGCACACAGACCT |
| | | ACACCTGCAACGTGGACCACAAGCCCAGCAACACGAAGGTGGACAAGACCGT |
| | | GGAGAGGAAGTGCTGCGTGGAATGCCCACCCTGCCCCGCCCCGCCCGTGGCC |
| | | GGCCCCAGTGTGTTTCTGTTCCCACCCAAGCCGAAGGATACCCTGATGATCT |
| | | CCCGGACCCCCGAGGTGACCTGCGTGGTGGTGGATGTGAGCCACGAGGACCC |
| | | CGAAGTGCAGTTCAACTGGTATGTCGACGGCGTGGAGGTACACAATGCCAAG |
| | | ACCAAGCCCAGGGAGGAACAGTTCAACAGCACGTTTCGGGTGGTGAGCGTGC |
| | | TCACTGTCGTCCACCAAGACTGGCTGAACGGCAAGGAGTACAAGTGCAAGGT |
| | | GAGCAACAAGGGGCTGCCCGCGCCCATCGAGAAAACCATCTCCAAGACCAAA |
| | | GGCCAGCCGCGGGAGCCCCAGGTGTATACCCTGCCACCGAGCAGGGAGGAGA |
| | | TGACCAAAAATCAAGTGTCGCTGACCTGCCTCGTCAAGGGCTTTTACCCAAG |
| | | CGATATCGCGGTGGAGTGGGAAAGCAACGGCCAGCCCGAAAACAACTACAAG |
| | | ACCACCCCGCCCATGCTCGACTCAGATGGTAGCTTCTTTCTGTACAGCAAGC |
| | | TGACCGTGGACAAGAGCAGGTGGCAGCAGGGCAACGTGTTCTCCTGCAGCGT |
| | | GATGCACGAGGCCCTGCACAACCACTATACCCAAAAGAGCCTAAGCCTGAGC |
| | | CCCGGCAAG |
| 364 | Treme_HC_IgG2- | ATGGAGACGCCCGCCCAGCTCCTCTTCCTCCTATTGCTGTGGCTCCCCGATA |
| | CO06 | CCACCGGGCAGGTCCAGCTCGTAGAGTCGGGCGGCGGAGTAGTCCAACCGGG |
| | | GAGGAGCCTCAGGCTCAGCTGCGCAGCCTCCGGCTTCACCTTCAGCAGCTAC |
| | | GGCATGCACTGGGTACGGCAGGCCCCGGGAAAGGGCCTCGAGTGGGTCGCCG |
| | | TCATCTGGTACGACGGCAGCAACAAGTACTACGCCGACAGCGTCAAGGGCCG |
| | | CTTCACCATCTCCAGGGATAACAGCAAGAACACCCTTTACCTGCAGATGAAC |
| | | AGCCTCAGGGCCGAGGACACCGCCGTGTATTACTGCGCGCGGGATCCCCGCG |
| | | GCGCGACGCTGTACTACTACTACTATGGGATGGACGTGTGGGGCCAGGGCAC |
| | | TACCGTCACCGTGTCCAGCGCTAGCACGAAGGGCCCGTCCGTGTTCCCCCTG |
| | | GCCCCCTGCTCCCGGAGCACCTCCGAGAGCACCGCCGCCCTGGGTTGCCTGG |
| | | TGAAGGACTATTTCCCCGAGCCCGTCACCGTGAGCTGGAACAGCGGCGCCCT |
| | | CACATCCGGCGTGCATACCTTCCCGGCCGTGCTCCAGAGCAGCGGCCTGTAT |
| | | TCACTGTCGAGCGTGGTGACCGTGCCCAGCAGCAACTTTGGCACCCAGACGT |
| | | ACACCTGCAACGTGGACCACAAGCCGAGCAACACCAAGGTGGACAAGACCGT |
| | | GGAGCGGAAGTGCTGCGTGGAGTGTCCCCCGTGTCCCGCCCCGCCCGTAGCC |
| | | GGCCCCTCCGTATTCCTCTTCCCTCCCAAGCCCAAGGACACGCTCATGATCT |
| | | CGCGGACACCCGAGGTGACCTGCGTGGTGGTGGACGTCAGCCACGAGGATCC |
| | | CGAGGTGCAGTTCAACTGGTATGTGGACGGAGTGGAGGTGCATAACGCCAAA |
| | | ACCAAGCCCAGGGAAGAACAGTTCAACAGCACCTTCAGGGTGGTGAGCGTTC |
| | | TGACCGTCGTGCACCAGGACTGGCTCAACGGCAAGGAGTACAAGTGTAAGGT |
| | | GTCCAACAAGGGGCTGCCCGCCCCCATCGAGAAGACCATCTCGAAAACCAAA |
| | | GGCCAGCCCCGCGAGCCCCAGGTGTACACCCTCCCCCCGTCCCGGGAGGAGA |
| | | TGACCAAGAACCAGGTAAGCCTGACCTGTCTGGTGAAGGGCTTCTACCCCAG |
| | | CGACATCGCTGTGGAGTGGGAGAGCAACGGGCAGCCCGAGAATAACTACAAA |
| | | ACCACCCCGCCCATGCTGGACAGCGACGGAAGCTTTTTCTTGTACTCCAAGC |
| | | TGACCGTCGACAAGAGCCGGTGGCAGCAGGGCAACGTGTTCAGCTGCAGCGT |
| | | GATGCACGAGGCCCTGCACAACCACTACACCCAGAAAAGCCTCAGCCTGAGC |
| | | CCCGGGAAG |
| 365 | Treme_HC_IgG2- | ATGGAAACCCCGGCCCAACTCCTCTTCCTTCTTCTCCTCTGGCTCCCCGACA |
| | CO07 | CCACCGGCCAGGTCCAGCTCGTTGAGTCCGGCGGCGGCGTAGTCCAGCCCGG |
| | | GCGTTCGCTCAGGCTCAGCTGCGCCGCGTCCGGCTTCACCTTTAGCAGCTAC |
| | | GGCATGCACTGGGTACGGCAGGCCCCCGGCAAAGGGCTCGAGTGGGTCGCCG |
| | | TCATTTGGTACGACGGCAGCAATAAGTACTACGCAGACAGCGTCAAGGGAAG |
| | | GTTCACCATCAGCAGGGATAACTCCAAGAATACCCTCTACCTGCAAATGAAC |
| | | TCCCTGCGGGCCGAGGACACCGCCGTGTACTATTGCGCCCGGGACCCCAGGG |
| | | GGGCCACCCTGTACTACTACTACTACGGCATGGATGTGTGGGGCCAGGGCAC |
| | | CACCGTGACCGTCAGCTCAGCCAGCACCAAGGGCCCCAGCGTGTTCCCCCTC |
| | | GCCCCGTGTAGCCGGAGCACCTCCGAGAGCACCGCGGCCCTGGGGTGCCTGG |
| | | TGAAGGACTACTTCCCCGAACCCGTCACCGTGAGCTGGAACAGCGGGGCCCT |
| | | GACCAGCGGAGTGCACACCTTCCCGGCCGTGCTACAGAGCAGCGGCCTGTAC |
| | | TCCCTGTCATCCGTGGTGACCGTGCCCTCGTCCAACTTCGGCACCCAGACCT |
| | | ATACCTGCAACGTGGACCACAAACCCTCCAACACCAAGGTGGACAAGACCGT |
| | | GGAGAGGAAGTGCTGCGTGGAATGCCCTCCCTGCCCCGCGCCCCCAGTGGCC |
| | | GGGCCCTCCGTCTTCCTGTTCCCCCCGAAGCCGAAAGATACGCTGATGATCA |
| | | GCAGGACCCCCGAGGTGACCTGTGTGGTGGTGGACGTGAGCCACGAAGATCC |
| | | CGAGGTGCAGTTTAACTGGTACGTCGACGGGGTGGAAGTCCACAACGCCAAG |
| | | ACCAAGCCCAGAGAGGAACAGTTCAACAGCACGTTCCGGGTGGTGTCGGTGC |
| | | TCACCGTGGTCCACCAGGATTGGCTGAACGGAAAGGAGTATAAGTGCAAGGT |
| | | GAGCAACAAGGGGCTCCCGGCCCCGATCGAGAAGACCATCTCCAAAACCAAA |
| | | GGGCAGCCCCGGGAACCCCAGGTATACACCCTGCCACCAAGCAGGGAGGAGA |
| | | TGACCAAGAACCAGGTGAGCCTGACCTGTCTGGTGAAGGGCTTCTACCCCAG |
| | | CGACATCGCAGTGGAGTGGGAGAGCAACGGCCAGCCCGAGAACAACTACAAG |
| | | ACAACACCGCCCATGCTGGACAGCGACGGCTCCTTTTTTCTGTACTCCAAGC |
| | | TGACGGTGGACAAGAGCCGCTGGCAGCAGGGCAACGTGTTCAGCTGCAGCGT |
| | | GATGCATGAGGCCCTGCACAACCACTACACCCAGAAGTCCCTGTCCCTCAGC |
| | | CCGGGCAAG |
| 366 | Treme_HC_IgG2- | ATGGAGACGCCCGCCCAGCTCCTCTTCCTCCTTTTGCTGTGGCTCCCCGACA |
| | CO08 | CCACGGGCCAGGTCCAGCTCGTAGAGTCCGGCGGCGGCGTCGTACAGCCCGG |
| | | CCGGAGCCTCAGGTTGTCGTGCGCCGCCTCCGGTTTCACCTTCTCCAGCTAC |
| | | GGGATGCATTGGGTTCGGCAGGCCCCCGGGAAGGGCCTAGAGTGGGTCGCCG |
| | | TCATCTGGTACGACGGCTCCAATAAATACTACGCCGACAGCGTCAAGGGGCG |
| | | ATTCACTATCAGCAGGGACAACAGCAAGAACACCCTCTACCTGCAGATGAAC |
| | | AGCCTGCGCGCGGAGGACACCGCGGTGTACTATTGCGCCAGGGACCCGCGAG |
| | | GCGCCACCCTGTACTACTACTACTACGGCATGGACGTGTGGGGTCAGGGCAC |
| | | CACCGTGACCGTGAGCAGCGCCAGCACGAAGGGTCCCAGCGTGTTCCCCCTG |
| | | GCGCCCTGCTCCAGGAGCACGTCCGAGAGCACCGCCGCACTGGGCTGCCTGG |
| | | TGAAGGATTACTTCCCGGAGCCCGTGACCGTCAGCTGGAACTCCGGGGCCCT |
| | | CACGAGCGGCGTGCATACCTTCCCCGCCGTCCTGCAGAGCTCCGGCCTGTAC |
| | | AGCCTCTCCTCCGTGGTCACCGTCCCAAGCAGCAATTTCGGCACCCAGACCT |
| | | ACACCTGCAACGTGGATCATAAGCCCAGCAATACCAAGGTGGACAAGACCGT |
| | | GGAGCGCAAGTGCTGTGTCGAGTGCCCTCCCTGCCCGGCCCCACCCGTCGCC |
| | | GGCCCGAGCGTGTTCCTCTTCCCTCCCAAGCCCAAGGACACGCTGATGATCA |
| | | GCCGCACCCCCGAGGTGACCTGTGTCGTCGTGGATGTGAGCCACGAGGATCC |
| | | CGAGGTGCAGTTTAACTGGTACGTAGACGGCGTGGAGGTACACAACGCGAAG |
| | | ACCAAGCCTAGGGAGGAGCAGTTTAACTCCACCTTCCGGGTGGTGAGCGTCC |
| | | TGACGGTGGTGCATCAGGACTGGCTCAATGGTAAGGAGTACAAGTGCAAGGT |
| | | GAGCAACAAGGGCTTGCCCGCCCCTATCGAGAAGACAATCAGCAAGACCAAG |
| | | GGCCAGCCCCGGGAGCCGCAGGTGTACACCCTGCCCCCTTCGAGGGAGGAAA |
| | | TGACCAAGAACCAGGTGAGCCTGACCTGTCTGGTGAAGGGTTTTTACCCCAG |
| | | CGACATCGCGGTGGAGTGGGAGAGCAACGGGCAGCCCGAGAACAACTATAAG |
| | | ACCACCCCACCCATGCTGGACAGCGACGGGAGCTTCTTCCTGTACAGCAAGC |
| | | TGACCGTCGACAAGTCCCGATGGCAGCAGGGCAACGTGTTCAGCTGCAGCGT |
| | | GATGCACGAGGCGCTGCACAATCATTACACCCAGAAAAGCCTGAGCCTGAGC |
| | | CCCGGCAAA |
| 367 | Treme_HC_IgG2- | ATGGAGACGCCCGCCCAGCTCCTCTTCCTCCTCCTCCTCTGGCTACCGGACA |
| | CO09 | CCACCGGGCAGGTCCAGCTAGTCGAGTCGGGCGGCGGGGTCGTTCAGCCCGG |
| | | CCGTAGCCTCCGGCTCAGCTGCGCCGCCTCCGGCTTCACCTTCAGTAGCTAC |
| | | GGTATGCATTGGGTCCGCCAAGCCCCCGGCAAGGGCCTCGAGTGGGTCGCCG |
| | | TCATCTGGTACGACGGCTCCAATAAGTACTACGCGGATAGCGTCAAAGGGCG |
| | | GTTCACCATCAGCCGCGACAACAGCAAAAACACCCTCTACCTGCAGATGAAC |
| | | AGCCTGAGGGCGGAGGACACCGCCGTGTACTACTGCGCCAGGGACCCTCGTG |
| | | GGGCCACGCTGTATTACTACTACTATGGCATGGATGTGTGGGGGCAGGGCAC |
| | | CACCGTGACCGTCAGCTCCGCCAGCACCAAGGGGCCCAGCGTCTTCCCGCTG |
| | | GCTCCGTGCTCCCGGTCCACCTCCGAGAGCACCGCAGCCCTGGGCTGCCTGG |
| | | TGAAAGACTACTTTCCCGAACCCGTGACCGTCAGCTGGAACAGCGGCGCCCT |
| | | GACGAGCGGGGTGCACACCTTCCCCGCAGTGCTGCAGAGCAGCGGCCTGTAC |
| | | TCGCTCTCCTCCGTGGTCACGGTGCCCAGTTCCAACTTCGGAACCCAGACAT |
| | | ATACGTGCAACGTGGACCACAAGCCCAGCAACACCAAGGTGGACAAAACCGT |
| | | GGAGCGGAAATGCTGCGTGGAGTGCCCGCCCTGTCCCGCCCCTCCCGTCGCC |
| | | GGACCCAGCGTGTTTCTGTTCCCGCCCAAGCCCAAGGACACCCTTATGATCT |
| | | CGCGCACCCCTGAGGTAACCTGCGTCGTGGTAGACGTGTCCCACGAGGACCC |
| | | CGAGGTGCAGTTCAACTGGTACGTGGATGGCGTGGAGGTCCACAACGCCAAA |
| | | ACCAAGCCGCGGGAGGAACAATTCAACAGCACCTTCAGGGTGGTGTCCGTGC |
| | | TGACCGTGGTGCACCAGGACTGGCTGAACGGAAAGGAGTACAAGTGCAAGGT |
| | | GTCCAACAAGGGCCTGCCCGCGCCCATCGAGAAGACGATCAGCAAAACCAAG |
| | | GGCCAGCCTAGGGAACCCCAGGTCTACACCCTGCCCCCCAGCAGGGAGGAGA |
| | | TGACCAAGAACCAGGTAAGCCTGACCTGCCTGGTGAAGGGTTTCTATCCGTC |
| | | CGACATCGCAGTGGAGTGGGAAAGCAACGGCCAGCCCGAGAACAACTATAAG |
| | | ACCACCCCACCCATGCTGGACAGCGACGGCAGCTTCTTCCTGTACAGCAAGC |
| | | TGACTGTCGACAAAAGCAGGTGGCAGCAGGGCAACGTGTTTAGCTGCAGCGT |
| | | CATGCACGAGGCCCTGCATAACCACTACACCCAGAAGTCCCTGAGCCTCTCC |
| | | CCCGGCAAG |
| 368 | Treme_HC_IgG2- | ATGGAGACTCCCGCCCAACTCCTCTTTCTACTCCTCCTATGGCTCCCCGACA |
| | CO10 | CCACCGGGCAGGTCCAGCTCGTAGAGTCCGGGGGCGGCGTCGTTCAACCCGG |
| | | GAGGAGCCTCAGGCTCAGCTGCGCCGCCAGCGGGTTCACCTTCAGCTCCTAC |
| | | GGCATGCACTGGGTCCGGCAGGCCCCCGGCAAGGGCCTAGAGTGGGTCGCCG |
| | | TCATCTGGTACGACGGCTCCAACAAGTACTACGCCGACAGCGTCAAGGGCAG |
| | | GTTCACGATCAGCAGGGACAACAGCAAGAACACCTTGTACCTCCAGATGAAT |
| | | TCCCTGCGGGCCGAGGACACAGCCGTGTACTACTGCGCCCGCGACCCCAGGG |
| | | GTGCCACGCTGTACTATTACTACTACGGCATGGACGTGTGGGGGCAGGGCAC |
| | | CACAGTGACCGTCAGCTCAGCCAGCACCAAGGGCCCCTCGGTGTTTCCCCTG |
| | | GCCCCATGCAGCAGGAGCACGAGCGAGTCCACCGCCGCGCTCGGCTGCCTAG |
| | | TGAAGGACTACTTCCCCGAGCCCGTGACGGTGAGCTGGAATAGCGGTGCCCT |
| | | GACCAGCGGCGTGCACACCTTCCCCGCCGTGCTGCAAAGCAGCGGGCTGTAC |
| | | TCCCTGAGCTCCGTGGTCACGGTGCCCAGCTCCAACTTTGGCACTCAGACCT |
| | | ACACCTGCAACGTGGACCACAAGCCCAGCAATACGAAGGTGGACAAGACCGT |
| | | GGAGCGGAAGTGTTGCGTGGAGTGCCCGCCCTGTCCCGCCCCACCTGTGGCC |
| | | GGTCCCAGCGTGTTCCTGTTTCCCCCCAAGCCCAAGGACACCCTCATGATAA |
| | | GCAGGACACCCGAGGTGACCTGCGTCGTGGTCGACGTGTCCCACGAGGACCC |
| | | CGAGGTGCAGTTCAATTGGTACGTGGACGGCGTGGAGGTGCACAACGCCAAG |
| | | ACCAAGCCGAGGGAGGAGCAGTTCAACTCAACCTTCCGGGTCGTCAGCGTCC |
| | | TGACTGTGGTGCACCAGGACTGGCTGAATGGCAAAGAGTACAAGTGCAAGGT |
| | | GAGCAACAAGGGCCTCCCCGCCCCCATCGAGAAGACCATCTCGAAGACGAAG |
| | | GGCCAGCCCCGGGAGCCCCAGGTGTACACCCTGCCCCCTAGCAGGGAGGAGA |
| | | TGACCAAGAACCAGGTGTCCCTGACCTGCCTGGTGAAGGGCTTCTACCCCTC |
| | | CGACATCGCGGTGGAGTGGGAGAGCAACGGCCAGCCCGAGAACAACTACAAG |
| | | ACGACGCCCCCCATGCTGGACAGCGACGGGAGCTTCTTCCTGTACAGCAAGC |
| | | TGACCGTGGACAAATCTCGCTGGCAGCAGGGCAACGTATTCAGCTGCTCGGT |
| | | GATGCACGAGGCGCTGCACAACCACTACACGCAGAAGTCCCTGAGCCTGAGC |
| | | CCCGGGAAA |
| 369 | Treme_HC_IgG2- | ATGGAGACGCCCGCACAGCTCCTCTTCCTCCTCCTACTCTGGCTCCCGGACA |
| | CO11 | CAACCGGGCAGGTACAGCTCGTAGAGTCCGGCGGCGGCGTCGTCCAGCCGGG |
| | | GAGGAGCCTCAGGCTCAGCTGCGCCGCCAGCGGCTTTACCTTCTCCAGCTAC |
| | | GGCATGCACTGGGTAAGGCAGGCGCCCGGAAAGGGCCTCGAGTGGGTCGCGG |
| | | TCATCTGGTACGACGGCAGCAATAAGTACTACGCCGACAGCGTTAAGGGTCG |
| | | GTTCACCATCAGCAGGGACAATTCCAAGAATACGCTCTACCTGCAGATGAAC |
| | | AGCCTGCGGGCCGAGGACACCGCCGTCTACTACTGCGCGCGAGATCCCCGGG |
| | | GGGCCACCCTGTACTACTACTATTACGGAATGGACGTGTGGGGCCAGGGTAC |
| | | CACCGTGACGGTGTCAAGCGCCAGCACCAAAGGCCCCAGCGTGTTCCCGCTG |
| | | GCCCCCTGCTCCCGGAGCACCAGCGAGAGCACCGCCGCCCTCGGCTGCCTGG |
| | | TGAAGGACTACTTCCCCGAACCCGTGACCGTGAGCTGGAACAGCGGCGCCCT |
| | | GACAAGCGGCGTCCACACCTTCCCCGCCGTGTTGCAGAGCAGCGGTCTGTAC |
| | | TCCCTGAGCAGCGTGGTCACCGTGCCCAGTAGCAATTTCGGCACCCAGACCT |
| | | ACACCTGCAACGTGGACCATAAGCCCAGCAACACCAAGGTGGACAAGACCGT |
| | | GGAGAGGAAATGCTGCGTGGAGTGCCCGCCCTGCCCCGCCCCGCCCGTGGCG |
| | | GGCCCCAGCGTGTTCCTGTTTCCACCCAAGCCCAAGGACACACTGATGATAA |
| | | GCAGGACCCCCGAGGTAACCTGCGTGGTGGTGGACGTGAGCCATGAGGACCC |
| | | CGAAGTGCAGTTTAACTGGTACGTGGATGGCGTGGAGGTCCACAACGCCAAG |
| | | ACCAAGCCGCGTGAAGAACAGTTTAACTCCACCTTCCGGGTGGTGTCCGTGC |
| | | TCACCGTCGTCCACCAGGACTGGCTGAACGGGAAGGAATACAAATGCAAGGT |
| | | CAGCAACAAGGGCCTTCCCGCCCCCATCGAGAAAACCATCTCCAAGACGAAG |
| | | GGGCAGCCCCGGGAGCCCCAGGTCTACACCCTCCCACCCTCCAGGGAGGAGA |
| | | TGACCAAGAACCAAGTCTCCCTCACTTGCTTAGTGAAGGGCTTTTACCCCAG |
| | | CGACATCGCCGTGGAGTGGGAGTCCAACGGCCAGCCCGAGAACAACTACAAA |
| | | ACGACCCCACCCATGCTGGACAGCGACGGCAGCTTCTTCCTTTACTCCAAGC |
| | | TGACGGTGGATAAGAGCAGGTGGCAGCAGGGCAACGTGTTCTCGTGCTCCGT |
| | | GATGCACGAGGCCCTGCACAACCACTACACCCAGAAAAGCCTTTCCCTGAGC |
| | | CCCGGCAAG |
| 370 | Treme_HC_IgG2- | ATGGAGACGCCGGCCCAACTCCTCTTCCTCCTCCTCCTCTGGCTCCCGGACA |
| | CO12 | CCACCGGGCAGGTCCAGCTCGTCGAGAGCGGCGGCGGCGTCGTACAGCCCGG |
| | | GAGGTCCCTACGCCTCAGCTGCGCAGCCAGCGGCTTTACCTTCAGCAGCTAC |
| | | GGCATGCACTGGGTCAGGCAGGCCCCCGGCAAGGGGCTCGAGTGGGTCGCCG |
| | | TTATCTGGTACGACGGGTCCAATAAGTACTACGCCGACAGCGTAAAGGGCCG |
| | | CTTCACCATCAGCAGGGACAACTCGAAGAACACCCTCTACCTGCAGATGAAC |
| | | TCACTGCGGGCCGAGGACACCGCCGTGTACTACTGCGCCAGGGACCCCCGGG |
| | | GCGCCACCCTGTACTACTACTATTACGGGATGGATGTGTGGGGCCAGGGCAC |
| | | CACCGTGACCGTGAGCAGCGCCTCCACCAAGGGCCCGTCCGTCTTCCCCCTG |
| | | GCCCCCTGCTCCAGGAGCACGAGCGAGAGCACGGCGGCCCTGGGCTGCCTCG |
| | | TGAAGGACTACTTCCCCGAACCCGTGACCGTCAGCTGGAACTCCGGCGCCCT |
| | | CACCTCCGGGGTCCATACCTTCCCCGCCGTGTTACAGAGCAGCGGCCTGTAT |
| | | AGCCTGAGCAGCGTGGTGACCGTGCCGAGCAGCAACTTCGGCACCCAGACCT |
| | | ATACCTGTAACGTGGACCACAAGCCCAGCAACACCAAGGTGGACAAGACCGT |
| | | GGAGAGGAAGTGCTGCGTAGAGTGCCCGCCCTGTCCGGCCCCGCCCGTGGCG |
| | | GGCCCCAGCGTGTTTCTGTTCCCTCCCAAACCGAAGGACACCCTGATGATCA |
| | | GCAGGACCCCCGAGGTGACCTGCGTGGTCGTGGATGTGTCCCATGAAGACCC |
| | | CGAGGTGCAGTTCAACTGGTACGTGGACGGTGTGGAGGTGCATAATGCCAAG |
| | | ACGAAGCCACGTGAGGAGCAGTTCAATTCCACTTTCCGCGTGGTGTCCGTGC |
| | | TGACCGTGGTGCATCAGGACTGGCTCAACGGCAAGGAGTATAAGTGCAAGGT |
| | | GTCTAACAAGGGCCTGCCCGCCCCCATCGAGAAGACTATCTCCAAGACTAAG |
| | | GGGCAGCCGAGGGAGCCCCAGGTGTATACCCTGCCCCCCAGCAGGGAGGAGA |
| | | TGACCAAGAACCAGGTCAGCCTGACCTGCCTGGTGAAGGGCTTCTACCCCTC |
| | | CGACATCGCCGTGGAGTGGGAGAGCAACGGGCAGCCCGAGAACAACTACAAG |
| | | ACCACCCCGCCCATGCTGGACTCCGACGGGAGCTTTTTTCTGTATTCCAAGC |
| | | TGACCGTGGACAAGTCCAGGTGGCAGCAGGGGAACGTGTTCTCCTGCTCCGT |
| | | GATGCACGAAGCCCTGCACAACCACTATACCCAGAAAAGCCTTAGCCTGAGC |
| | | CCCGGGAAG |
| 371 | Treme_HC_IgG2- | ATGGAAACCCCCGCCCAATTACTCTTCCTTCTCCTCCTCTGGCTCCCCGACA |
| | CO13 | CCACCGGCCAGGTCCAACTCGTCGAGTCCGGAGGCGGCGTCGTCCAGCCCGG |
| | | CAGGAGCCTACGGCTCAGCTGCGCCGCCAGCGGCTTCACCTTCTCCAGCTAC |
| | | GGCATGCACTGGGTTCGCCAGGCCCCAGGCAAGGGGCTCGAGTGGGTCGCCG |
| | | TCATCTGGTACGACGGCAGCAATAAGTACTACGCCGACTCCGTTAAGGGTAG |
| | | GTTCACCATCAGCAGGGACAACTCCAAGAACACCCTCTACCTGCAGATGAAC |
| | | AGCCTGCGTGCCGAGGATACGGCCGTCTACTACTGCGCCCGGGACCCCCGGG |
| | | GGGCCACCCTCTACTACTATTACTACGGTATGGACGTCTGGGGCCAGGGCAC |
| | | GACCGTGACCGTGTCCAGCGCCTCGACCAAGGGCCCCAGCGTCTTCCCCCTG |
| | | GCCCCCTGCAGCAGGAGCACCAGCGAGAGCACCGCCGCCCTGGGGTGCCTCG |
| | | TGAAGGATTATTTTCCGGAACCCGTGACCGTAAGCTGGAACAGCGGCGCCCT |
| | | GACCTCCGGCGTGCACACCTTCCCCGCCGTACTCCAGTCCAGCGGACTGTAC |
| | | AGCCTGAGCTCCGTGGTGACCGTGCCCTCCAGCAACTTCGGCACCCAGACCT |
| | | ACACCTGCAACGTGGACCACAAACCCAGCAATACCAAGGTGGATAAGACCGT |
| | | GGAGAGGAAATGCTGCGTGGAGTGTCCCCCTTGCCCCGCCCCGCCCGTGGCC |
| | | GGGCCGTCTGTGTTCCTGTTCCCACCCAAGCCTAAGGACACCCTCATGATCT |
| | | CCAGGACCCCCGAGGTGACCTGCGTGGTCGTGGACGTGAGCCACGAGGACCC |
| | | CGAGGTCCAGTTCAACTGGTATGTGGATGGCGTGGAGGTGCATAACGCCAAG |
| | | ACCAAGCCCCGTGAGGAGCAGTTCAACAGCACCTTCCGCGTCGTGTCCGTGC |
| | | TGACCGTGGTCCACCAGGATTGGCTGAACGGGAAAGAGTACAAGTGCAAGGT |
| | | GTCCAACAAGGGCTTGCCCGCCCCCATCGAAAAGACCATCTCGAAGACCAAG |
| | | GGCCAGCCCAGGGAGCCCCAGGTTTACACCCTCCCGCCCTCCAGGGAGGAGA |
| | | TGACCAAGAACCAGGTGAGCCTCACCTGTCTGGTGAAAGGCTTTTATCCCAG |
| | | CGACATCGCCGTGGAGTGGGAGAGCAACGGCCAGCCCGAGAACAACTACAAG |
| | | ACCACCCCACCCATGCTGGACAGCGACGGCAGCTTCTTCCTTTACAGCAAGC |
| | | TGACCGTAGACAAGAGCAGGTGGCAGCAGGGCAATGTGTTCAGCTGCAGCGT |
| | | GATGCATGAAGCCCTGCATAACCACTACACCCAAAAGTCCCTGAGCCTGAGC |
| | | CCGGGGAAG |
| 372 | Treme_HC_IgG2- | ATGGAGACTCCCGCCCAGCTCCTATTCCTCCTCCTCCTCTGGCTCCCGGACA |
| | CO14 | CCACCGGCCAGGTACAGCTTGTGGAGTCCGGCGGCGGAGTTGTCCAGCCCGG |
| | | GAGGTCCCTCAGGCTCAGCTGCGCCGCCAGCGGGTTCACCTTCAGCAGCTAC |
| | | GGCATGCACTGGGTCAGGCAGGCCCCCGGGAAAGGACTCGAGTGGGTCGCAG |
| | | TTATCTGGTACGACGGGAGCAACAAGTACTACGCCGACAGCGTCAAGGGCAG |
| | | GTTCACCATCTCCAGGGATAATAGCAAGAACACCCTTTACCTGCAGATGAAC |
| | | AGCCTGCGGGCCGAGGACACAGCCGTGTACTACTGCGCCCGTGACCCCCGCG |
| | | GCGCCACCCTCTACTACTACTACTACGGCATGGACGTGTGGGGCCAGGGCAC |
| | | GACCGTGACCGTCAGCTCCGCCAGCACCAAGGGCCCCTCGGTGTTCCCCCTG |
| | | GCCCCGTGCAGCAGGAGCACCAGCGAGAGCACCGCGGCCCTGGGCTGTCTGG |
| | | TGAAGGACTACTTTCCCGAGCCCGTGACTGTCTCGTGGAACAGCGGGGCCCT |
| | | GACGAGCGGCGTGCACACGTTCCCCGCCGTGCTGCAGAGCAGCGGGCTGTAC |
| | | AGCCTCAGCAGCGTGGTAACCGTGCCCAGCTCCAACTTCGGCACCCAGACCT |
| | | ACACCTGTAACGTGGACCACAAGCCGAGCAACACCAAGGTGGACAAGACCGT |
| | | GGAGCGGAAGTGCTGCGTGGAGTGTCCCCCGTGCCCCGCCCCTCCGGTCGCC |
| | | GGCCCCAGCGTGTTCCTGTTCCCGCCCAAGCCGAAGGACACCCTGATGATCA |
| | | GCAGGACCCCTGAGGTCACCTGCGTGGTGGTGGACGTCAGCCATGAGGATCC |
| | | CGAGGTGCAGTTCAACTGGTACGTGGATGGCGTGGAAGTGCATAACGCCAAG |
| | | ACAAAGCCCAGGGAGGAGCAGTTCAACAGCACCTTCAGGGTGGTGAGCGTCC |
| | | TGACCGTGGTGCACCAAGATTGGCTGAACGGGAAGGAGTACAAGTGTAAAGT |
| | | GAGCAACAAAGGGCTGCCCGCCCCCATCGAGAAAACCATCTCCAAGACCAAG |
| | | GGCCAGCCCAGGGAGCCCCAGGTGTACACCCTGCCCCCCTCACGCGAGGAGA |
| | | TGACCAAGAACCAGGTGAGCCTGACCTGCCTCGTGAAAGGCTTCTATCCCAG |
| | | CGACATCGCGGTCGAATGGGAGAGCAACGGCCAGCCCGAGAACAACTACAAG |
| | | ACGACCCCGCCCATGCTGGACAGCGATGGCAGCTTTTTCCTGTACAGCAAGC |
| | | TGACCGTCGACAAGTCCAGGTGGCAGCAGGGCAACGTGTTCTCCTGTAGCGT |
| | | GATGCACGAGGCCCTCCACAACCACTACACCCAGAAATCCCTGAGCCTGAGC |
| | | CCCGGCAAG |
| 373 | Treme_HC_IgG2- | ATGGAGACACCGGCCCAGCTCCTCTTCCTCCTCCTCCTTTGGCTCCCCGACA |
| | CO15 | CGACCGGGCAGGTCCAATTGGTGGAGTCCGGCGGCGGCGTCGTTCAGCCCGG |
| | | CAGGAGCCTTCGGCTCAGCTGCGCCGCCAGCGGTTTTACCTTCAGCTCCTAC |
| | | GGCATGCACTGGGTCAGGCAGGCCCCCGGTAAGGGCCTCGAGTGGGTCGCCG |
| | | TCATCTGGTACGACGGGAGCAACAAATACTACGCCGACAGCGTAAAGGGCAG |
| | | GTTCACCATCTCGAGGGACAACAGCAAGAACACCCTCTACCTGCAGATGAAC |
| | | AGCCTGAGGGCGGAGGACACCGCAGTGTACTACTGCGCCCGGGACCCTAGGG |
| | | GCGCCACCCTCTACTATTACTACTACGGCATGGACGTGTGGGGCCAAGGAAC |
| | | TACCGTGACCGTGTCGTCCGCCAGCACCAAGGGCCCCAGCGTCTTCCCCCTG |
| | | GCCCCCTGCTCCCGTAGCACATCCGAGAGCACCGCCGCCTTGGGTTGCCTGG |
| | | TGAAGGATTACTTCCCGGAGCCGGTGACCGTGTCCTGGAACAGCGGGGCGCT |
| | | GACCTCCGGAGTGCACACCTTCCCCGCCGTGCTGCAGTCTAGCGGTCTGTAT |
| | | AGCCTGTCCTCCGTGGTGACCGTCCCCTCCAGCAACTTCGGTACACAAACCT |
| | | ACACCTGCAACGTCGACCACAAGCCCTCTAACACCAAGGTGGACAAAACCGT |
| | | GGAAAGGAAGTGCTGCGTCGAGTGCCCACCCTGCCCTGCCCCGCCCGTGGCC |
| | | GGGCCCAGCGTGTTCCTTTTCCCACCCAAACCCAAGGACACCCTGATGATCA |
| | | GCCGGACCCCCGAGGTGACCTGCGTGGTGGTGGATGTGAGCCACGAGGATCC |
| | | CGAAGTGCAGTTCAACTGGTACGTGGACGGCGTGGAGGTGCATAACGCGAAG |
| | | ACCAAGCCCCGGGAGGAGCAGTTCAACTCCACGTTCAGGGTCGTGTCGGTCC |
| | | TCACCGTCGTGCACCAGGACTGGCTGAACGGAAAGGAGTACAAGTGCAAGGT |
| | | GAGCAACAAAGGCCTGCCCGCCCCCATCGAGAAGACCATCTCCAAGACCAAG |
| | | GGGCAGCCCAGGGAGCCCCAGGTCTACACCCTGCCGCCCAGCCGGGAGGAGA |
| | | TGACCAAAAACCAGGTCAGCCTGACCTGCCTGGTCAAGGGCTTCTACCCCAG |
| | | CGACATCGCCGTGGAGTGGGAGAGCAACGGCCAGCCCGAGAACAACTACAAA |
| | | ACTACCCCGCCAATGCTGGACAGCGACGGCTCCTTCTTTCTGTACAGCAAGC |
| | | TGACCGTCGACAAGTCCAGGTGGCAACAGGGCAACGTGTTTAGCTGCAGTGT |
| | | GATGCACGAGGCCCTGCACAACCACTACACGCAGAAAAGCCTCAGCCTCAGC |
| | | CCAGGCAAG |
| 374 | Treme_HC_IgG2- | ATGGAGACTCCCGCCCAGCTCCTCTTCCTCCTCCTCCTCTGGCTCCCGGATA |
| | CO16 | CCACCGGGCAGGTCCAATTGGTCGAAAGCGGCGGCGGGGTCGTCCAGCCGGG |
| | | GCGCAGCCTCAGGCTCAGCTGCGCGGCCTCCGGCTTCACCTTCAGCAGCTAC |
| | | GGAATGCACTGGGTCCGGCAGGCCCCGGGGAAGGGCCTCGAGTGGGTCGCCG |
| | | TCATCTGGTACGACGGCAGCAATAAGTACTACGCCGACAGCGTCAAGGGTAG |
| | | GTTCACCATCAGCCGGGACAACTCAAAGAACACCCTCTATCTGCAGATGAAC |
| | | AGCCTGAGGGCCGAAGATACCGCCGTATACTATTGCGCCCGCGACCCCAGGG |
| | | GCGCCACCCTCTACTATTATTACTATGGGATGGACGTGTGGGGCCAGGGGAC |
| | | CACCGTGACCGTGAGCTCCGCCAGCACCAAGGGCCCGTCGGTGTTCCCGCTG |
| | | GCCCCCTGCTCCCGGAGCACAAGCGAGAGCACCGCCGCCCTGGGGTGTCTGG |
| | | TCAAGGACTACTTCCCCGAGCCCGTGACGGTGAGCTGGAACAGCGGCGCCCT |
| | | GACCTCCGGGGTGCACACGTTCCCCGCCGTGCTCCAGAGCAGCGGGCTGTAC |
| | | AGCCTGAGCTCCGTGGTGACCGTGCCCTCCAGCAACTTCGGCACCCAGACGT |
| | | ACACCTGCAACGTGGACCACAAGCCTAGCAATACCAAGGTGGACAAGACGGT |
| | | GGAGAGGAAGTGCTGCGTGGAGTGCCCGCCCTGCCCCGCCCCGCCCGTCGCA |
| | | GGCCCCTCCGTGTTCCTGTTCCCGCCCAAACCCAAGGACACGCTGATGATCA |
| | | GCCGGACCCCCGAGGTGACCTGCGTGGTGGTCGATGTGAGCCACGAGGATCC |
| | | CGAGGTGCAGTTCAATTGGTACGTCGACGGCGTCGAAGTGCACAACGCCAAG |
| | | ACCAAGCCCCGGGAGGAGCAATTCAACAGCACCTTCCGTGTCGTGTCGGTGC |
| | | TTACCGTGGTGCACCAGGACTGGCTGAACGGCAAAGAGTATAAGTGCAAGGT |
| | | CAGCAACAAAGGCCTGCCCGCCCCCATCGAGAAGACCATCAGCAAGACCAAA |
| | | GGGCAGCCGAGGGAGCCCCAGGTGTATACCCTGCCGCCCTCCAGGGAGGAGA |
| | | TGACAAAGAACCAGGTGTCCCTCACCTGCCTGGTGAAAGGTTTCTACCCCTC |
| | | GGACATAGCCGTGGAGTGGGAGTCCAACGGCCAGCCCGAGAACAACTACAAA |
| | | ACCACGCCCCCCATGCTGGATAGCGACGGCAGCTTCTTTCTGTACAGCAAGC |
| | | TGACGGTGGACAAGAGCCGCTGGCAGCAGGGCAACGTCTTCTCCTGCAGCGT |
| | | GATGCACGAGGCCCTGCACAACCACTACACCCAGAAGTCCCTGAGCCTGAGC |
| | | CCAGGGAAG |
| 375 | Treme_HC_IgG2- | ATGGAGACTCCCGCCCAGCTCCTCTTTCTCCTCCTCCTCTGGCTTCCCGACA |
| | CO17 | CCACCGGGCAGGTCCAGCTCGTCGAGAGCGGCGGCGGCGTCGTACAGCCCGG |
| | | CAGGAGCCTCAGGCTCAGCTGCGCCGCCAGCGGCTTCACCTTTTCCTCCTAC |
| | | GGAATGCACTGGGTCCGGCAGGCCCCCGGCAAGGGGCTCGAGTGGGTAGCCG |
| | | TCATCTGGTACGACGGTTCCAACAAGTACTACGCCGACAGCGTCAAAGGCAG |
| | | GTTCACGATCTCCAGGGATAACAGTAAGAACACTCTCTACCTGCAGATGAAC |
| | | TCGCTGAGGGCCGAGGACACCGCCGTCTACTACTGCGCCAGGGACCCCAGGG |
| | | GGGCCACCCTTTACTATTACTATTACGGGATGGACGTGTGGGGGCAGGGGAC |
| | | CACCGTGACCGTGTCATCCGCCTCGACCAAGGGGCCCAGCGTCTTCCCGCTC |
| | | GCGCCCTGCAGCAGGTCAACCTCCGAGTCGACCGCAGCCCTGGGCTGCCTGG |
| | | TGAAGGATTACTTCCCCGAGCCCGTGACCGTGAGCTGGAACAGCGGCGCGCT |
| | | GACGAGCGGGGTCCACACCTTCCCCGCTGTGCTGCAGAGCAGCGGGCTGTAC |
| | | TCGCTGAGCAGCGTCGTCACCGTGCCCAGCAGCAACTTTGGGACACAGACCT |
| | | ACACCTGCAACGTGGACCATAAGCCTAGCAACACCAAGGTGGACAAGACCGT |
| | | GGAACGTAAGTGTTGTGTGGAATGTCCCCCCTGCCCCGCCCCACCCGTGGCC |
| | | GGCCCCAGCGTGTTTCTGTTCCCACCCAAACCCAAGGACACCCTGATGATCA |
| | | GCAGGACCCCCGAGGTGACATGCGTGGTGGTGGACGTGAGCCACGAGGATCC |
| | | CGAGGTGCAGTTTAACTGGTATGTGGACGGGGTGGAGGTGCACAATGCCAAG |
| | | ACCAAGCCCCGGGAGGAGCAGTTCAACTCGACCTTCCGCGTGGTGAGCGTCC |
| | | TCACCGTGGTCCACCAGGACTGGCTGAATGGCAAAGAGTATAAATGCAAGGT |
| | | GAGCAACAAGGGCCTGCCCGCCCCCATCGAGAAGACCATCTCCAAAACCAAA |
| | | GGGCAGCCCAGGGAGCCCCAGGTCTACACCCTGCCCCCCAGCAGGGAAGAGA |
| | | TGACCAAGAACCAGGTCAGCCTGACCTGCCTCGTGAAAGGCTTCTACCCCTC |
| | | CGATATAGCCGTGGAGTGGGAGAGTAACGGCCAGCCAGAGAACAATTACAAG |
| | | ACGACCCCACCCATGCTGGATTCCGACGGGAGCTTCTTCCTCTACAGCAAAC |
| | | TGACCGTGGATAAGAGCAGGTGGCAGCAGGGGAACGTGTTCAGCTGCAGCGT |
| | | GATGCACGAGGCACTGCACAACCACTACACCCAGAAAAGCCTGTCCCTGAGC |
| | | CCCGGGAAG |
| 376 | Treme_HC_IgG2- | ATGGAAACCCCCGCCCAGCTTCTCTTCCTTCTCCTCCTATGGCTCCCCGATA |
| | CO18 | CTACCGGCCAAGTCCAGCTCGTCGAGAGCGGAGGGGGCGTCGTTCAGCCCGG |
| | | CCGGAGCCTCAGGCTCAGCTGCGCCGCCAGCGGGTTCACCTTCAGCAGCTAC |
| | | GGCATGCATTGGGTCCGGCAGGCCCCCGGCAAAGGCCTCGAGTGGGTCGCCG |
| | | TTATCTGGTACGACGGGAGCAACAAGTACTACGCCGATAGCGTCAAGGGCAG |
| | | GTTCACCATCTCCAGGGACAATTCCAAAAATACACTCTACCTGCAGATGAAT |
| | | AGCCTGCGGGCAGAGGACACCGCCGTGTACTACTGCGCCAGGGATCCCCGGG |
| | | GCGCAACCCTGTATTACTACTACTACGGGATGGACGTCTGGGGGCAGGGTAC |
| | | CACCGTGACCGTGTCCAGCGCCAGCACCAAGGGCCCCTCCGTGTTCCCCCTC |
| | | GCCCCCTGCAGCAGGTCCACCAGCGAGAGCACCGCCGCCCTGGGCTGCCTCG |
| | | TGAAAGACTACTTCCCCGAGCCCGTGACGGTGTCCTGGAATAGCGGAGCCCT |
| | | GACCAGCGGCGTGCACACCTTCCCCGCCGTGCTGCAATCCAGCGGCCTGTAT |
| | | TCGCTGAGCAGCGTGGTGACCGTCCCTTCCTCGAATTTCGGCACGCAGACCT |
| | | ACACGTGCAACGTGGACCACAAGCCAAGCAATACCAAGGTGGACAAGACTGT |
| | | GGAACGCAAATGCTGCGTGGAGTGCCCGCCCTGCCCCGCCCCACCGGTGGCC |
| | | GGGCCCAGCGTCTTCCTGTTCCCGCCCAAGCCGAAAGACACACTGATGATCA |
| | | GCCGGACCCCCGAGGTGACCTGCGTGGTGGTCGACGTGAGCCATGAGGACCC |
| | | GGAGGTGCAGTTCAACTGGTACGTGGACGGGGTGGAGGTCCACAACGCCAAG |
| | | ACCAAGCCCAGGGAGGAGCAATTCAACAGCACCTTCCGAGTGGTCAGCGTGC |
| | | TGACCGTGGTGCACCAGGACTGGCTGAACGGTAAAGAATACAAGTGCAAGGT |
| | | GTCCAATAAGGGGCTCCCCGCGCCCATCGAAAAAACCATCTCCAAAACGAAG |
| | | GGCCAGCCAAGGGAGCCCCAGGTGTACACCCTGCCCCCCAGCCGCGAGGAAA |
| | | TGACCAAGAACCAGGTGAGCCTGACCTGTCTCGTGAAGGGGTTCTACCCCAG |
| | | CGACATCGCCGTGGAGTGGGAGTCCAACGGGCAGCCGGAAAACAACTACAAA |
| | | ACCACGCCGCCCATGCTTGACTCAGATGGGTCCTTCTTCCTGTACAGCAAGC |
| | | TGACCGTGGACAAAAGCCGGTGGCAGCAGGGCAATGTCTTTTCCTGCTCAGT |
| | | GATGCACGAGGCCCTGCACAACCACTACACCCAGAAATCACTGAGCCTGAGC |
| | | CCGGGCAAA |
| 377 | Treme_HC_IgG2- | ATGGAGACGCCCGCCCAGCTCCTCTTCCTCCTCCTCCTTTGGCTCCCGGACA |
| | CO19 | CCACCGGCCAGGTCCAGCTCGTAGAGAGCGGCGGCGGCGTAGTACAGCCCGG |
| | | GAGGAGCCTCAGGCTCAGCTGTGCGGCGAGCGGCTTTACCTTCAGCAGCTAC |
| | | GGCATGCACTGGGTCCGCCAGGCGCCGGGCAAGGGACTCGAGTGGGTAGCCG |
| | | TCATCTGGTACGACGGAAGCAACAAGTATTACGCCGACAGCGTCAAGGGCCG |
| | | GTTTACCATCAGCAGGGACAACTCCAAGAACACGCTCTACCTGCAGATGAAT |
| | | AGCCTCCGGGCCGAGGACACGGCCGTTTACTACTGCGCCAGGGACCCCAGGG |
| | | GCGCCACCCTGTACTACTACTACTACGGCATGGACGTCTGGGGGCAGGGGAC |
| | | CACCGTGACCGTGAGCAGCGCCTCCACCAAGGGCCCCAGCGTGTTCCCCCTC |
| | | GCCCCGTGCAGCCGTAGCACGAGCGAGAGCACCGCAGCCCTGGGCTGCCTGG |
| | | TGAAAGACTACTTCCCCGAGCCCGTCACCGTCTCCTGGAACAGCGGCGCGCT |
| | | CACGTCCGGGGTGCACACCTTCCCCGCCGTCCTGCAATCCTCAGGGCTCTAT |
| | | TCCCTGAGCAGCGTAGTGACCGTGCCCAGCTCCAACTTCGGCACCCAGACCT |
| | | ACACATGCAATGTGGATCACAAGCCCTCAAACACCAAAGTGGACAAGACCGT |
| | | GGAGCGGAAGTGCTGCGTGGAGTGCCCTCCCTGCCCCGCCCCACCCGTGGCC |
| | | GGCCCCAGCGTGTTCCTGTTTCCCCCCAAGCCCAAGGACACCCTGATGATCA |
| | | GCAGGACCCCCGAGGTGACCTGCGTCGTGGTGGACGTGAGCCACGAGGATCC |
| | | CGAGGTGCAGTTCAATTGGTATGTCGACGGGGTGGAGGTGCACAACGCGAAG |
| | | ACGAAGCCCAGGGAGGAGCAGTTCAACAGCACCTTCAGGGTCGTCTCCGTGC |
| | | TGACCGTGGTGCACCAGGACTGGCTGAACGGCAAGGAGTACAAGTGTAAAGT |
| | | GAGCAATAAGGGCCTCCCGGCCCCGATCGAGAAGACCATCAGCAAGACCAAG |
| | | GGCCAGCCGAGGGAGCCGCAGGTGTACACCCTCCCTCCCAGCCGAGAGGAGA |
| | | TGACCAAAAACCAGGTGTCCCTGACGTGCCTGGTGAAGGGGTTCTACCCAAG |
| | | CGACATCGCCGTCGAGTGGGAGAGCAATGGCCAGCCCGAGAATAACTACAAG |
| | | ACCACGCCCCCCATGCTGGACAGCGACGGCTCCTTTTTCCTGTACAGCAAAC |
| | | TGACCGTGGACAAGAGCAGGTGGCAGCAGGGCAACGTGTTCAGCTGCAGCGT |
| | | GATGCATGAGGCCCTGCACAACCACTACACCCAGAAGTCCCTCTCCCTAAGC |
| | | CCCGGTAAG |
| 378 | Treme_HC_IgG2- | ATGGAGACGCCCGCCCAACTCCTCTTCCTACTCCTCCTCTGGCTCCCGGACA |
| | CO20 | CAACCGGCCAGGTTCAGCTCGTCGAGAGCGGAGGGGGCGTTGTCCAGCCCGG |
| | | CAGGTCCCTCAGGCTCAGCTGCGCCGCGAGCGGCTTCACCTTCAGCAGCTAC |
| | | GGCATGCATTGGGTCCGGCAGGCCCCCGGCAAGGGCCTCGAGTGGGTTGCCG |
| | | TCATCTGGTACGACGGCAGCAACAAGTACTACGCCGACAGCGTCAAGGGGAG |
| | | GTTCACCATCAGCAGGGACAACTCCAAGAATACCCTCTATCTGCAGATGAAC |
| | | AGCCTGAGGGCCGAGGACACCGCGGTGTACTACTGCGCCCGGGATCCCAGAG |
| | | GCGCCACCCTCTATTACTACTACTACGGCATGGACGTCTGGGGGCAGGGGAC |
| | | CACCGTGACGGTGAGCAGCGCCAGCACCAAGGGGCCCTCGGTGTTCCCCCTC |
| | | GCGCCCTGCTCACGTTCCACCAGCGAGAGCACCGCCGCCCTCGGCTGTCTGG |
| | | TGAAGGACTACTTCCCCGAGCCGGTCACCGTGTCCTGGAATAGCGGCGCCCT |
| | | GACGAGCGGCGTCCACACCTTCCCCGCCGTCCTCCAGAGCTCCGGTCTGTAT |
| | | AGCCTGTCCAGCGTGGTGACCGTGCCCAGCAGCAATTTCGGAACCCAGACCT |
| | | ATACTTGCAATGTGGACCACAAGCCGTCCAACACCAAGGTGGACAAGACGGT |
| | | CGAACGCAAATGCTGCGTTGAGTGCCCACCCTGCCCCGCCCCGCCCGTCGCG |
| | | GGGCCAAGCGTCTTCCTGTTTCCGCCCAAGCCTAAAGACACCCTCATGATCA |
| | | GCCGGACCCCCGAGGTGACCTGCGTGGTGGTCGACGTGTCCCACGAAGACCC |
| | | CGAAGTGCAGTTCAATTGGTACGTGGACGGGGTGGAGGTGCACAACGCCAAG |
| | | ACGAAACCCAGGGAGGAGCAGTTCAACTCTACTTTCCGGGTGGTGAGCGTGC |
| | | TGACGGTGGTGCACCAGGACTGGCTGAACGGGAAGGAGTACAAGTGCAAGGT |
| | | GTCCAACAAGGGACTGCCGGCCCCCATCGAGAAGACCATCAGCAAGACCAAG |
| | | GGCCAGCCCCGAGAGCCCCAAGTGTACACGCTCCCTCCCAGCAGGGAAGAGA |
| | | TGACCAAGAACCAGGTGAGCCTGACATGCCTGGTGAAGGGTTTCTACCCATC |
| | | CGACATCGCGGTGGAGTGGGAGTCCAACGGGCAGCCCGAAAACAATTACAAG |
| | | ACCACCCCTCCCATGCTGGACTCGGACGGCAGCTTCTTTCTGTACTCCAAGC |
| | | TGACCGTGGACAAGAGCAGGTGGCAGCAGGGCAACGTGTTCAGCTGCAGCGT |
| | | GATGCACGAGGCCCTGCACAACCATTACACCCAGAAGTCCCTCAGCCTGAGC |
| | | CCCGGAAAG |
| 379 | Treme_HC_IgG2- | ATGGAGACTCCCGCCCAGCTTTTGTTCCTCCTCCTCCTATGGCTCCCGGACA |
| | CO21 | CCACCGGACAGGTCCAGCTCGTAGAGAGCGGGGGAGGCGTCGTTCAGCCCGG |
| | | TCGGTCGCTAAGGCTCTCGTGCGCGGCCAGCGGCTTCACCTTTAGCAGCTAC |
| | | GGCATGCACTGGGTCAGGCAGGCCCCCGGTAAGGGTCTGGAGTGGGTCGCCG |
| | | TCATCTGGTACGACGGCTCCAACAAGTATTACGCCGATTCCGTTAAAGGGCG |
| | | GTTCACCATTTCCAGGGACAACTCCAAGAACACCCTCTACCTGCAGATGAAT |
| | | TCCCTGCGGGCCGAAGACACCGCCGTGTATTACTGCGCGCGGGACCCCCGGG |
| | | GGGCCACCCTGTATTATTACTATTACGGGATGGACGTCTGGGGCCAGGGCAC |
| | | CACCGTCACGGTCAGCTCCGCCAGCACAAAGGGTCCGAGCGTTTTCCCCCTG |
| | | GCCCCCTGCTCGCGCTCCACCAGCGAGTCCACCGCCGCCCTGGGCTGTCTGG |
| | | TCAAGGACTACTTCCCCGAGCCGGTGACTGTCAGCTGGAACTCCGGCGCGCT |
| | | CACGAGCGGGGTGCATACGTTCCCCGCCGTCCTACAGAGTTCGGGGCTGTAC |
| | | TCCCTGAGCAGCGTGGTGACGGTGCCCAGCTCCAACTTCGGGACCCAGACCT |
| | | ACACCTGCAACGTGGACCACAAGCCCAGCAACACCAAGGTGGATAAGACGGT |
| | | GGAGAGGAAGTGCTGCGTGGAGTGCCCGCCCTGTCCGGCCCCGCCCGTGGCC |
| | | GGCCCCAGCGTGTTCCTCTTTCCCCCCAAGCCCAAGGACACCCTGATGATCT |
| | | CGAGGACGCCCGAGGTGACCTGCGTGGTGGTCGACGTGAGCCACGAGGATCC |
| | | CGAGGTGCAATTCAACTGGTACGTGGACGGGGTGGAGGTGCACAACGCCAAA |
| | | ACCAAGCCAAGGGAAGAACAGTTCAATAGCACCTTTAGGGTGGTAAGCGTGC |
| | | TGACCGTCGTGCACCAGGATTGGCTGAACGGGAAGGAGTACAAGTGCAAGGT |
| | | GAGCAACAAGGGCCTCCCCGCCCCAATCGAGAAGACCATCAGCAAAACCAAG |
| | | GGGCAACCCAGGGAGCCCCAGGTGTATACCCTGCCCCCGTCCAGGGAGGAGA |
| | | TGACAAAGAACCAGGTGTCCCTGACCTGTCTGGTCAAGGGCTTTTATCCCAG |
| | | CGACATCGCCGTGGAGTGGGAAAGCAACGGGCAGCCAGAAAACAACTACAAG |
| | | ACCACGCCCCCCATGCTGGACAGCGATGGTTCCTTTTTCCTGTACAGCAAGC |
| | | TGACCGTGGACAAGAGTAGGTGGCAACAGGGGAACGTGTTCTCCTGCAGCGT |
| | | GATGCATGAGGCCCTCCACAACCACTACACCCAGAAAAGCCTGTCACTGTCG |
| | | CCCGGGAAG |
| 380 | Treme_HC_IgG2- | ATGGAGACTCCCGCACAGTTGCTGTTCCTCCTACTCCTCTGGCTCCCCGACA |
| | CO22 | CCACGGGACAGGTCCAGTTGGTCGAGTCCGGGGGCGGGGTCGTCCAACCCGG |
| | | GCGATCCCTCAGGCTCAGCTGTGCCGCCAGCGGCTTCACGTTCAGCAGCTAC |
| | | GGCATGCACTGGGTCAGGCAGGCCCCCGGCAAGGGGCTCGAGTGGGTCGCCG |
| | | TCATTTGGTACGACGGCTCCAACAAGTACTACGCCGACAGCGTCAAGGGCCG |
| | | CTTCACCATCAGCCGGGATAACAGCAAGAACACTCTCTATCTGCAGATGAAC |
| | | AGCCTGAGGGCCGAAGACACGGCCGTGTACTACTGCGCCAGGGACCCCCGCG |
| | | GCGCCACCCTGTACTACTACTATTACGGCATGGACGTCTGGGGCCAGGGTAC |
| | | CACCGTGACCGTGAGCAGCGCCTCCACCAAGGGCCCCAGCGTGTTCCCACTC |
| | | GCCCCCTGCAGCCGGAGCACAAGCGAATCCACCGCCGCTCTCGGATGCCTGG |
| | | TGAAGGACTACTTCCCCGAGCCCGTGACCGTGTCGTGGAATAGCGGCGCCCT |
| | | GACCAGCGGCGTCCACACCTTCCCCGCCGTGCTGCAGAGCAGCGGGCTGTAC |
| | | TCCCTGAGCTCCGTGGTCACGGTGCCCTCCTCCAATTTCGGCACCCAGACCT |
| | | ACACCTGCAATGTAGACCACAAGCCCTCCAATACCAAAGTGGACAAGACCGT |
| | | GGAGAGGAAGTGTTGCGTGGAGTGTCCCCCCTGCCCCGCCCCGCCCGTGGCC |
| | | GGCCCCAGCGTGTTCCTCTTTCCGCCGAAGCCCAAGGACACCCTGATGATCA |
| | | GCCGCACGCCGGAGGTGACCTGCGTGGTGGTGGACGTGAGCCACGAAGACCC |
| | | CGAGGTCCAGTTTAACTGGTATGTGGACGGCGTGGAGGTGCACAACGCCAAG |
| | | ACCAAGCCCAGGGAGGAGCAGTTCAACAGCACCTTTAGGGTGGTGAGCGTGC |
| | | TGACGGTCGTGCACCAGGACTGGCTGAATGGCAAAGAGTACAAGTGCAAGGT |
| | | GTCCAACAAGGGCCTGCCCGCCCCGATCGAGAAGACGATCTCCAAGACCAAG |
| | | GGCCAGCCCCGCGAGCCCCAGGTCTATACCCTCCCTCCCAGCAGGGAGGAAA |
| | | TGACCAAAAATCAGGTGTCCCTGACCTGCCTGGTGAAGGGGTTTTACCCCAG |
| | | CGATATCGCCGTGGAATGGGAGTCGAACGGCCAGCCAGAGAACAACTATAAA |
| | | ACCACCCCGCCCATGCTGGACTCCGACGGCAGCTTCTTCCTGTACAGCAAGC |
| | | TGACCGTAGACAAGTCGCGCTGGCAGCAGGGCAATGTCTTCAGCTGCTCGGT |
| | | GATGCACGAGGCCCTGCATAATCACTACACCCAGAAAAGCCTGAGCCTGTCC |
| | | CCCGGGAAG |
| 381 | Treme_HC_IgG2- | ATGGAGACACCCGCCCAGCTCCTCTTCCTCCTCCTACTCTGGTTGCCCGACA |
| | CO23 | CCACCGGACAGGTACAGCTCGTAGAATCCGGCGGCGGCGTCGTACAGCCCGG |
| | | CAGGTCCCTACGGCTCTCCTGTGCCGCCAGCGGGTTCACGTTCAGCAGCTAC |
| | | GGCATGCATTGGGTCCGTCAAGCCCCGGGCAAGGGTTTAGAGTGGGTCGCCG |
| | | TCATCTGGTACGACGGCTCCAACAAGTACTACGCCGACAGCGTCAAGGGCAG |
| | | GTTCACCATTTCACGGGACAATAGCAAGAACACGCTCTACCTGCAGATGAAC |
| | | AGCCTGCGAGCCGAGGACACCGCCGTGTACTACTGCGCCCGGGACCCCAGGG |
| | | GCGCCACCCTCTACTATTACTACTACGGGATGGATGTCTGGGGCCAGGGAAC |
| | | CACCGTGACCGTGTCCTCCGCCAGCACAAAGGGGCCCTCCGTGTTCCCCCTG |
| | | GCCCCCTGCAGCAGGAGCACCTCGGAGAGCACCGCCGCCCTGGGCTGCCTGG |
| | | TGAAGGACTATTTCCCCGAGCCCGTGACCGTCAGCTGGAACAGCGGCGCGCT |
| | | GACCTCCGGCGTGCATACCTTTCCGGCCGTGCTGCAGAGCAGCGGCCTGTAC |
| | | TCACTGAGCAGCGTGGTCACCGTCCCGTCCAGCAACTTCGGGACCCAGACCT |
| | | ATACCTGCAACGTGGACCACAAGCCCAGCAACACCAAGGTCGACAAGACCGT |
| | | GGAGCGGAAGTGCTGCGTGGAATGCCCCCCGTGCCCGGCGCCGCCCGTGGCC |
| | | GGCCCCAGCGTCTTCCTGTTCCCACCCAAGCCGAAGGATACCCTGATGATCA |
| | | GCAGGACCCCCGAGGTCACCTGCGTCGTGGTGGACGTGTCCCACGAGGACCC |
| | | CGAGGTGCAGTTCAACTGGTACGTCGACGGCGTCGAGGTCCACAACGCCAAG |
| | | ACAAAGCCAAGGGAGGAGCAGTTTAACAGTACGTTCCGGGTGGTGAGCGTGC |
| | | TGACCGTGGTCCACCAGGACTGGCTGAACGGCAAGGAGTATAAGTGCAAGGT |
| | | CAGCAACAAGGGGCTGCCCGCCCCCATCGAAAAGACTATCAGCAAGACCAAA |
| | | GGGCAGCCCCGGGAACCCCAGGTGTACACCCTCCCCCCAAGCAGGGAGGAGA |
| | | TGACCAAGAACCAGGTGAGCTTGACATGCCTGGTGAAGGGGTTCTACCCCAG |
| | | CGACATCGCCGTCGAGTGGGAGTCCAATGGCCAGCCCGAGAACAACTACAAG |
| | | ACCACCCCGCCCATGCTCGATAGCGACGGCAGCTTCTTCCTGTACAGCAAGC |
| | | TGACCGTGGACAAGTCCAGGTGGCAGCAGGGCAACGTGTTCTCGTGCAGCGT |
| | | GATGCACGAGGCCCTGCATAACCACTACACCCAGAAAAGCCTCAGCCTATCC |
| | | CCCGGCAAG |
| 382 | Treme_HC_IgG2- | ATGGAGACGCCCGCCCAACTCCTCTTCCTCCTCCTCCTCTGGCTCCCGGACA |
| | CO24 | CCACCGGCCAGGTCCAGCTCGTCGAGAGCGGCGGCGGGGTCGTCCAGCCAGG |
| | | CAGGAGCCTAAGGCTTTCCTGCGCCGCCAGCGGCTTCACCTTTAGCAGCTAC |
| | | GGCATGCACTGGGTTCGCCAGGCCCCCGGCAAGGGCCTCGAGTGGGTCGCCG |
| | | TTATCTGGTACGACGGCAGCAACAAGTACTACGCGGACAGCGTCAAGGGCAG |
| | | GTTTACCATAAGCAGGGACAACTCCAAGAACACCTTGTACCTGCAGATGAAC |
| | | AGCCTGCGAGCCGAGGACACTGCCGTGTACTACTGCGCGCGCGACCCCCGCG |
| | | GCGCGACCCTGTACTACTACTACTACGGGATGGATGTCTGGGGCCAGGGGAC |
| | | CACCGTGACGGTAAGCTCCGCGAGCACCAAGGGGCCCTCGGTGTTCCCCCTG |
| | | GCCCCCTGCTCCAGGTCCACCAGCGAGTCCACCGCCGCCCTGGGGTGTCTGG |
| | | TGAAGGACTACTTCCCCGAGCCCGTGACAGTCTCCTGGAACAGCGGGGCCCT |
| | | CACAAGCGGCGTGCACACCTTCCCCGCCGTGCTGCAGTCAAGCGGACTGTAC |
| | | AGCCTGTCCAGCGTGGTGACCGTGCCGTCCAGCAATTTCGGCACCCAGACCT |
| | | ACACCTGTAACGTCGACCACAAGCCCAGCAACACCAAGGTGGACAAGACCGT |
| | | GGAGCGCAAGTGCTGCGTGGAATGCCCCCCGTGCCCGGCCCCACCCGTGGCC |
| | | GGCCCCTCCGTGTTTCTGTTCCCACCCAAACCCAAGGACACGCTGATGATCA |
| | | GCAGGACCCCCGAGGTCACCTGCGTGGTGGTGGACGTGAGCCACGAAGACCC |
| | | CGAGGTGCAGTTCAACTGGTACGTGGACGGCGTGGAGGTGCACAACGCCAAG |
| | | ACCAAGCCGCGGGAGGAGCAGTTCAATAGCACCTTTAGGGTGGTGAGCGTAC |
| | | TGACCGTGGTGCACCAGGACTGGCTGAACGGGAAGGAATACAAGTGTAAGGT |
| | | CAGCAACAAGGGGCTCCCCGCCCCCATCGAGAAAACCATCAGCAAAACCAAG |
| | | GGGCAACCGCGAGAGCCCCAGGTGTACACCCTGCCACCGAGCAGGGAAGAGA |
| | | TGACCAAGAATCAGGTGAGCCTGACCTGCCTGGTGAAAGGCTTCTACCCAAG |
| | | CGATATCGCCGTGGAGTGGGAGAGCAATGGGCAGCCTGAGAATAACTACAAA |
| | | ACCACCCCGCCCATGCTGGACTCCGACGGGAGCTTCTTTCTGTATAGCAAGC |
| | | TGACCGTGGATAAGAGCCGTTGGCAGCAGGGGAACGTGTTCAGCTGTTCAGT |
| | | GATGCACGAGGCCCTCCATAACCACTACACTCAAAAGTCCCTCAGCCTTAGC |
| | | CCCGGCAAG |
| 383 | Treme_HC_IgG2- | ATGGAGACTCCCGCCCAGCTCCTCTTTCTACTCCTCCTCTGGCTCCCCGACA |
| | CO25 | CGACCGGGCAGGTCCAGCTCGTCGAGAGCGGCGGGGGCGTCGTACAGCCCGG |
| | | CAGGAGCCTCAGGCTTAGCTGCGCCGCCTCCGGGTTCACATTTAGCAGCTAC |
| | | GGGATGCACTGGGTCAGGCAGGCACCGGGCAAGGGCCTCGAGTGGGTCGCCG |
| | | TCATCTGGTACGACGGCTCCAACAAGTACTACGCCGATAGCGTCAAGGGCCG |
| | | GTTCACGATCAGCAGGGACAACAGCAAGAACACGCTTTACCTGCAGATGAAC |
| | | AGCCTGAGGGCCGAGGATACCGCCGTTTATTACTGCGCCAGGGACCCCCGGG |
| | | GGGCCACCCTGTACTACTACTACTACGGCATGGACGTGTGGGGACAGGGTAC |
| | | CACCGTGACCGTGAGCAGCGCCTCCACGAAGGGGCCCAGTGTGTTCCCCCTG |
| | | GCCCCCTGCAGCAGGTCCACCAGCGAGAGCACCGCGGCCCTGGGCTGCCTAG |
| | | TGAAGGACTACTTCCCCGAGCCCGTGACCGTGAGCTGGAACTCCGGCGCCCT |
| | | CACCAGCGGGGTCCACACCTTTCCGGCGGTGCTCCAGAGCAGCGGCCTGTAC |
| | | TCCCTCAGCAGCGTCGTGACGGTACCCAGCAGCAACTTCGGCACCCAAACCT |
| | | ACACCTGTAATGTGGACCACAAGCCCAGCAACACCAAGGTCGACAAGACCGT |
| | | GGAGCGAAAGTGCTGCGTGGAGTGCCCTCCCTGCCCTGCCCCGCCCGTGGCC |
| | | GGGCCCAGCGTGTTCCTGTTCCCTCCCAAGCCGAAGGACACCCTGATGATTT |
| | | CCCGGACCCCCGAGGTGACGTGCGTGGTGGTGGACGTGTCCCACGAGGACCC |
| | | CGAAGTGCAGTTCAACTGGTACGTGGACGGGGTGGAGGTGCACAACGCGAAG |
| | | ACGAAGCCCCGGGAGGAGCAGTTCAACAGCACCTTCAGAGTCGTGAGCGTGC |
| | | TGACCGTCGTGCACCAGGATTGGCTGAACGGCAAGGAGTACAAGTGTAAGGT |
| | | GAGCAACAAGGGGCTGCCCGCCCCCATCGAGAAGACGATCTCAAAGACCAAG |
| | | GGCCAGCCCAGGGAACCGCAGGTGTACACGCTGCCCCCCAGCAGGGAGGAGA |
| | | TGACCAAGAACCAGGTGTCCCTGACGTGCCTGGTCAAGGGCTTCTACCCCTC |
| | | CGATATCGCCGTGGAGTGGGAATCCAACGGTCAGCCCGAGAACAACTACAAA |
| | | ACCACTCCGCCCATGCTGGACTCCGACGGCAGCTTCTTTCTGTACTCCAAGC |
| | | TGACCGTGGACAAATCCAGGTGGCAGCAGGGCAACGTGTTTTCCTGCTCCGT |
| | | GATGCACGAGGCCCTGCACAACCACTACACCCAGAAGTCCCTCTCCCTGTCC |
| | | CCCGGCAAG |
| 384 | Treme_HC_IgG1 | METPAQLLFLLLLWLPDTTGQVQLVESGGGVVQPGRSLRLSCAASGFTFSSY |
| | (tremelimumab | GMHWVRQAPGKGLEWVAVIWYDGSNKYYADSVKGRFTISRDNSKNTLYLQMN |
| | IgG1 heavy chain) | SLRAEDTAVYYCARDPRGATLYYYYYGMDVWGQGTTVTVSSASTKGPSVFPL |
| | | APSSKSTSGGTAALGCLVKDYFPEPVTVSWNSGALTSGVHTFPAVLQSSGLY |
| | | SLSSVVTVPSSSLGTQTYICNVNHKPSNTKVDKRVEPKSCDKTHTCPPCPAP |
| | | ELLGGPSVFLFPPKPKDTLMISRTPEVTCVVVDVSHEDPEVKFNWYVDGVEV |
| | | HNAKTKPREEQYNSTYRVVSVLTVLHQDWLNGKEYKCKVSNKALPAPIEKTI |
| | | SKAKGQPREPQVYTLPPSREEMTKNQVSLTCLVKGFYPSDIAVEWESNGQPE |
| | | NNYKTTPPVLDSDGSFFLYSKLTVDKSRWQQGNVFSCSVMHEALHNHYTQKS |
| | | LSLSPGK |
| 385 | Treme_HC_IgG1 | METPAQLLFLLLLWLPDTTG |
| | (signal peptide) | |
| 386 | Treme_HC_IgG1 | QVQLVESGGGVVQPGRSLRLSCAASGFTFSSYGMHWVRQAPGKGLEWVAVIW |
| | (variable region, | YDGSNKYYADSVKGRFTISRDNSKNTLYLQMNSLRAEDTAVYYCARDPRGAT |
| | VH) | LYYYYYGMDVWGQGTTVTVSS |
| 387 | Treme_HC_IgG1 | ASTKGPSVFPLAPSSKSTSGGTAALGCLVKDYFPEPVTVSWNSGALTSGVHT |
| | (constant region) | FPAVLQSSGLYSLSSVVTVPSSSLGTQTYICNVNHKPSNTKVDKRVEPKSCD |
| | | KTHTCPPCPAPELLGGPSVFLFPPKPKDTLMISRTPEVTCVVVDVSHEDPEV |
| | | KFNWYVDGVEVHNAKTKPREEQYNSTYRVVSVLTVLHQDWLNGKEYKCKVSN |
| | | KALPAPIEKTISKAKGQPREPQVYTLPPSREEMTKNQVSLTCLVKGFYPSDI |
| | | AVEWESNGQPENNYKTTPPVLDSDGSFFLYSKLTVDKSRWQQGNVFSCSVMH |
| | | EALHNHYTQKSLSLSPGK |
| 388 | Treme_HC_IgG1- | ATGGAGACTCCCGCCCAGCTCCTCTTCCTCCTCCTACTCTGGCTTCCCGACA |
| | CO01 | CCACCGGGCAGGTACAGCTCGTCGAATCCGGGGGCGGCGTAGTCCAGCCGGG |
| | | CAGGTCGCTCCGGCTCAGCTGCGCCGCCTCCGGGTTTACCTTCAGCAGCTAC |
| | | GGCATGCATTGGGTCAGGCAGGCCCCCGGCAAGGGGCTCGAGTGGGTTGCCG |
| | | TCATCTGGTACGACGGCTCAAATAAATACTACGCCGACAGCGTCAAGGGCAG |
| | | GTTCACCATCAGCAGGGACAATAGCAAGAACACGCTCTACCTGCAGATGAAC |
| | | AGCCTGCGGGCCGAAGACACCGCCGTGTATTACTGCGCCAGGGACCCCCGCG |
| | | GCGCGACCCTGTACTACTACTACTACGGCATGGACGTGTGGGGCCAGGGCAC |
| | | GACCGTGACCGTGTCCTCTGCCAGCACTAAGGGCCCCAGCGTTTTCCCCCTG |
| | | GCCCCGAGCAGCAAGAGCACCTCCGGCGGCACGGCCGCCCTGGGGTGCCTGG |
| | | TGAAGGACTATTTCCCCGAGCCCGTGACCGTGAGCTGGAACTCCGGCGCCCT |
| | | GACCTCTGGCGTCCACACCTTCCCCGCCGTGCTGCAGAGTAGCGGCCTGTAC |
| | | AGCCTGTCCTCCGTGGTCACCGTGCCCAGCAGCTCGCTGGGCACCCAGACCT |
| | | ACATCTGCAATGTTAACCACAAGCCCTCCAATACCAAGGTGGATAAGAGGGT |
| | | GGAGCCAAAGAGCTGCGACAAGACACACACCTGCCCCCCGTGTCCCGCCCCC |
| | | GAGCTGCTGGGCGGCCCCTCCGTGTTCCTGTTCCCACCCAAGCCGAAGGACA |
| | | CCCTCATGATAAGCCGGACCCCCGAGGTGACCTGCGTGGTGGTGGATGTGAG |
| | | CCACGAGGACCCCGAAGTGAAGTTCAACTGGTACGTGGACGGCGTGGAGGTG |
| | | CACAATGCCAAGACCAAACCGCGTGAGGAGCAGTACAACAGCACCTACCGCG |
| | | TGGTGAGCGTGCTTACCGTCCTTCATCAAGACTGGCTGAACGGCAAGGAGTA |
| | | CAAGTGCAAGGTGTCCAATAAGGCCCTGCCGGCCCCCATCGAGAAGACCATC |
| | | TCCAAGGCCAAGGGGCAGCCCCGGGAGCCCCAGGTGTACACGCTGCCCCCCA |
| | | GCAGGGAGGAGATGACCAAGAACCAGGTGTCCCTCACCTGCCTGGTGAAGGG |
| | | CTTCTACCCCAGCGACATAGCCGTGGAATGGGAATCCAACGGGCAGCCCGAA |
| | | AATAACTACAAGACGACCCCTCCCGTGCTGGACTCCGATGGCAGCTTTTTCC |
| | | TGTACTCAAAGCTGACCGTGGACAAGAGCAGGTGGCAGCAGGGCAACGTGTT |
| | | TAGCTGTTCCGTGATGCATGAGGCTCTGCACAACCACTACACCCAGAAAAGC |
| | | CTGAGCCTGAGCCCCGGCAAG |
| 389 | Treme_HC_IgG1- | ATGGAGACGCCGGCCCAACTCCTTTTCCTCCTTCTCTTGTGGCTCCCCGACA |
| | CO02 | CCACCGGCCAGGTCCAGCTCGTCGAATCCGGAGGCGGGGTCGTCCAGCCCGG |
| | | CAGGAGCCTCCGGCTCAGCTGCGCGGCCTCCGGGTTCACGTTTAGCAGCTAC |
| | | GGCATGCACTGGGTACGTCAGGCCCCCGGCAAGGGTCTGGAGTGGGTCGCGG |
| | | TCATCTGGTACGACGGTAGCAACAAGTATTACGCGGACTCGGTCAAGGGGCG |
| | | GTTCACCATCAGCAGGGATAACAGCAAGAACACGCTCTACCTGCAGATGAAC |
| | | AGCCTGAGGGCCGAGGACACGGCCGTGTACTACTGCGCCAGGGACCCCCGAG |
| | | GCGCCACCCTGTACTACTACTATTACGGCATGGACGTGTGGGGCCAGGGCAC |
| | | CACAGTGACGGTGAGCAGCGCCTCCACCAAAGGCCCCTCCGTCTTCCCCCTG |
| | | GCCCCCAGCTCCAAGAGCACAAGCGGCGGCACCGCCGCGCTCGGCTGCCTGG |
| | | TGAAGGATTACTTCCCCGAGCCCGTGACCGTGAGCTGGAACAGCGGCGCCCT |
| | | GACCTCCGGCGTGCATACCTTCCCCGCCGTGCTGCAGTCCAGCGGGCTGTAC |
| | | TCCCTGAGCAGCGTGGTGACCGTGCCCAGCTCCAGCCTCGGCACCCAGACCT |
| | | ACATCTGCAATGTGAATCACAAGCCGTCCAACACCAAGGTGGACAAGCGTGT |
| | | GGAACCCAAGTCGTGCGACAAGACCCACACCTGCCCGCCCTGCCCCGCCCCG |
| | | GAGCTCCTGGGCGGCCCGTCCGTGTTCCTGTTCCCTCCCAAGCCCAAGGATA |
| | | CACTGATGATCAGCAGGACCCCCGAGGTGACCTGCGTGGTGGTGGACGTGAG |
| | | CCACGAGGACCCCGAGGTGAAATTTAACTGGTACGTGGACGGGGTGGAGGTC |
| | | CACAACGCCAAAACGAAGCCGCGAGAAGAACAGTACAACTCCACCTACCGGG |
| | | TGGTCAGCGTCCTGACCGTCCTGCATCAAGACTGGCTGAACGGAAAAGAGTA |
| | | CAAGTGCAAGGTCAGCAACAAGGCGCTGCCCGCCCCGATCGAGAAGACGATC |
| | | AGCAAGGCCAAAGGCCAGCCCCGCGAGCCCCAGGTCTACACCCTGCCCCCCA |
| | | GCAGAGAGGAGATGACGAAGAACCAGGTGTCCCTCACCTGTCTGGTGAAGGG |
| | | CTTCTACCCCTCCGACATCGCCGTCGAGTGGGAGAGCAATGGGCAGCCCGAG |
| | | AACAATTATAAGACCACCCCGCCCGTGCTGGACTCCGACGGCAGCTTCTTTC |
| | | TGTACAGCAAGCTGACCGTGGACAAGTCGCGGTGGCAGCAGGGCAACGTGTT |
| | | CAGCTGCTCGGTGATGCACGAAGCCCTGCACAACCACTATACCCAGAAAAGC |
| | | CTGAGCCTCTCCCCCGGGAAG |
| 390 | Treme_HC_IgG1- | ATGGAAACCCCCGCCCAACTCCTCTTCCTCCTCCTCCTATGGCTTCCGGACA |
| | CO03 | CCACCGGGCAGGTCCAGCTCGTCGAGTCCGGCGGGGGCGTCGTCCAGCCGGG |
| | | CAGGAGCCTCAGGCTCTCCTGCGCCGCATCAGGCTTCACCTTTAGCTCGTAC |
| | | GGGATGCACTGGGTCCGGCAGGCGCCCGGCAAGGGCTTGGAGTGGGTTGCCG |
| | | TAATCTGGTACGACGGCAGCAACAAGTACTACGCCGACTCCGTCAAGGGCCG |
| | | GTTCACCATCTCCAGGGACAACAGCAAGAACACCCTCTACCTGCAGATGAAC |
| | | AGCCTGAGGGCGGAGGACACCGCCGTGTACTATTGCGCCAGGGACCCCAGGG |
| | | GCGCCACCCTGTATTACTACTACTACGGCATGGACGTGTGGGGCCAGGGCAC |
| | | AACAGTCACGGTGTCGTCAGCCAGCACCAAAGGCCCGTCCGTCTTCCCCCTG |
| | | GCCCCCAGCAGCAAGAGCACATCCGGGGGAACCGCCGCCCTGGGCTGTCTGG |
| | | TGAAGGACTACTTCCCCGAGCCCGTGACCGTGTCGTGGAACAGCGGCGCCCT |
| | | GACCAGTGGGGTGCATACGTTCCCCGCCGTGCTTCAAAGCAGCGGCCTGTAC |
| | | AGCCTGAGCTCCGTGGTGACCGTGCCCAGCAGCTCGCTGGGGACCCAGACCT |
| | | ACATCTGTAATGTGAACCACAAGCCCAGCAATACCAAGGTGGACAAGCGAGT |
| | | GGAGCCCAAGTCCTGTGATAAGACCCACACCTGCCCGCCCTGCCCCGCGCCC |
| | | GAACTGCTGGGCGGCCCTAGCGTGTTCCTGTTCCCTCCCAAACCCAAAGACA |
| | | CTCTTATGATCAGCCGGACCCCCGAGGTGACCTGTGTGGTGGTGGACGTCAG |
| | | CCATGAGGACCCGGAAGTGAAGTTTAACTGGTACGTGGACGGCGTGGAGGTG |
| | | CATAACGCCAAAACCAAACCCCGGGAGGAGCAGTACAACAGCACGTACAGGG |
| | | TCGTGTCCGTGCTCACCGTGCTGCACCAGGATTGGCTTAACGGCAAGGAGTA |
| | | CAAGTGCAAGGTGAGCAACAAGGCCCTGCCCGCCCCGATCGAGAAGACCATC |
| | | TCCAAGGCTAAGGGCCAGCCTAGGGAGCCACAGGTGTACACACTGCCCCCCT |
| | | CCAGGGAGGAAATGACGAAAAATCAGGTGAGCCTGACCTGCCTGGTGAAGGG |
| | | GTTCTACCCCTCCGACATCGCCGTGGAGTGGGAAAGCAACGGGCAACCCGAG |
| | | AATAACTACAAAACCACCCCGCCCGTGCTGGATAGCGACGGCAGCTTCTTCC |
| | | TGTACTCCAAGCTGACCGTGGATAAGAGCCGATGGCAGCAGGGCAACGTGTT |
| | | CAGCTGCTCAGTGATGCACGAGGCGCTGCATAACCACTACACCCAGAAGAGT |
| | | CTGTCGCTGAGCCCCGGCAAA |
| 391 | Treme_HC_IgG1- | ATGGAGACTCCCGCCCAACTCCTATTCCTACTCCTCCTCTGGCTCCCGGACA |
| | CO04 | CCACGGGGCAAGTCCAGCTCGTGGAGTCCGGCGGGGGCGTTGTACAGCCCGG |
| | | CCGAAGCCTCAGGCTCAGCTGCGCCGCCAGCGGCTTCACCTTCTCCAGCTAC |
| | | GGCATGCACTGGGTCCGCCAGGCCCCCGGGAAGGGGCTCGAGTGGGTCGCCG |
| | | TCATCTGGTACGACGGCTCCAACAAGTACTACGCCGACAGCGTCAAGGGCAG |
| | | GTTCACCATCTCCCGGGATAACTCCAAGAATACCCTCTACCTGCAGATGAAC |
| | | AGCCTGCGAGCCGAGGATACCGCGGTCTACTACTGCGCCCGCGACCCCAGGG |
| | | GCGCCACCCTGTACTACTACTATTACGGCATGGACGTGTGGGGCCAGGGTAC |
| | | CACCGTGACCGTGTCCTCCGCCAGCACGAAAGGGCCCAGCGTCTTCCCGCTG |
| | | GCCCCCAGCTCCAAGAGCACGTCCGGCGGCACCGCCGCCCTGGGATGTCTGG |
| | | TGAAAGACTACTTTCCCGAACCCGTGACCGTGTCGTGGAACTCAGGCGCCCT |
| | | TACCAGCGGAGTGCACACCTTCCCGGCCGTGCTTCAGAGCTCGGGACTCTAT |
| | | TCCCTGAGCAGCGTGGTCACCGTGCCCAGCAGCAGCCTGGGCACCCAGACCT |
| | | ACATTTGCAACGTGAACCACAAGCCCTCTAACACGAAGGTGGACAAGAGGGT |
| | | GGAGCCCAAGAGCTGCGACAAGACCCACACCTGCCCCCCGTGCCCAGCGCCC |
| | | GAGCTGCTCGGCGGCCCCAGCGTGTTCCTGTTCCCTCCCAAGCCGAAGGACA |
| | | CGCTGATGATCAGCAGGACGCCAGAGGTAACCTGCGTGGTGGTAGACGTGTC |
| | | CCACGAGGACCCCGAGGTGAAATTCAACTGGTACGTCGATGGCGTGGAGGTG |
| | | CACAACGCCAAGACGAAACCCCGGGAGGAGCAATATAATTCCACCTACAGGG |
| | | TGGTCAGCGTGCTGACCGTGCTCCACCAAGACTGGCTGAACGGGAAAGAATA |
| | | CAAGTGCAAAGTGTCCAATAAAGCCCTGCCAGCCCCCATTGAGAAGACCATC |
| | | AGCAAGGCCAAGGGGCAGCCCAGGGAACCCCAGGTGTACACCCTGCCCCCAT |
| | | CCAGGGAGGAGATGACCAAGAACCAGGTGTCCCTGACGTGCCTGGTCAAGGG |
| | | CTTCTATCCCAGCGACATCGCCGTCGAGTGGGAAAGCAATGGGCAACCCGAG |
| | | AACAACTACAAGACCACCCCGCCCGTGCTCGACTCCGACGGCAGCTTCTTCC |
| | | TCTACTCCAAGCTGACCGTGGATAAGAGCCGCTGGCAGCAGGGCAATGTGTT |
| | | CAGCTGTAGCGTGATGCACGAGGCCCTGCACAACCACTACACCCAAAAGTCG |
| | | CTCAGTCTGTCCCCCGGCAAG |
| 392 | Treme_HC_IgG1- | ATGGAAACGCCCGCCCAGCTCCTCTTCCTCCTCCTCCTCTGGCTCCCCGACA |
| | CO05 | CTACGGGCCAGGTACAGCTCGTCGAGAGCGGGGGCGGCGTTGTACAGCCCGG |
| | | CCGGTCCCTCAGGCTATCCTGCGCCGCCAGCGGCTTCACCTTCAGCAGCTAC |
| | | GGCATGCACTGGGTCAGGCAGGCCCCCGGGAAGGGCCTCGAGTGGGTCGCCG |
| | | TCATCTGGTACGACGGCTCCAATAAGTACTACGCGGACAGCGTTAAGGGGCG |
| | | CTTCACGATCAGCAGGGACAACTCCAAGAACACGCTCTACCTGCAGATGAAC |
| | | TCCCTGAGGGCGGAGGACACCGCCGTGTACTACTGCGCCAGAGATCCCAGGG |
| | | GTGCGACCCTCTATTACTACTACTACGGCATGGACGTGTGGGGCCAGGGAAC |
| | | GACCGTGACCGTGTCCAGCGCCAGCACCAAAGGGCCCAGCGTGTTCCCCCTG |
| | | GCCCCCTCCAGCAAGAGCACGAGCGGTGGCACCGCCGCCCTCGGCTGCCTGG |
| | | TGAAAGACTATTTTCCCGAGCCCGTGACGGTGAGCTGGAACAGCGGGGCCCT |
| | | GACCAGCGGGGTGCATACGTTCCCCGCCGTGTTGCAGTCGAGCGGCCTGTAC |
| | | TCCCTGAGCTCCGTGGTGACCGTGCCGTCCTCCTCGCTGGGCACCCAAACCT |
| | | ACATCTGTAACGTGAACCACAAGCCCAGCAATACCAAGGTGGACAAGCGGGT |
| | | GGAGCCGAAATCCTGTGACAAGACCCACACCTGCCCGCCCTGCCCCGCCCCC |
| | | GAGCTGCTGGGCGGGCCCTCCGTGTTCCTGTTCCCTCCCAAGCCGAAGGACA |
| | | CCCTGATGATCTCGAGGACCCCCGAGGTGACCTGCGTGGTGGTCGACGTGAG |
| | | CCACGAAGACCCCGAGGTGAAGTTCAACTGGTACGTGGACGGGGTGGAGGTC |
| | | CACAACGCCAAGACTAAACCCCGCGAGGAACAGTACAACAGCACCTACAGGG |
| | | TGGTCAGCGTGCTGACCGTGCTGCACCAGGACTGGCTGAATGGCAAGGAATA |
| | | CAAGTGCAAGGTGTCCAATAAGGCACTGCCAGCGCCCATCGAGAAAACCATC |
| | | AGCAAGGCGAAGGGGCAGCCGAGGGAGCCCCAGGTGTACACGCTGCCCCCCA |
| | | GTAGAGAGGAGATGACCAAGAACCAGGTGTCGCTAACTTGCCTGGTGAAGGG |
| | | GTTCTACCCCTCGGACATCGCCGTGGAGTGGGAGTCCAACGGCCAGCCCGAG |
| | | AATAACTACAAGACCACCCCTCCCGTGCTGGACTCCGACGGCAGCTTCTTCC |
| | | TGTACAGCAAGCTGACCGTTGATAAGTCCCGGTGGCAGCAGGGAAACGTGTT |
| | | TTCCTGCAGCGTCATGCACGAGGCGCTGCACAACCACTACACCCAAAAAAGC |
| | | CTGAGCCTCAGTCCCGGCAAG |
| 393 | Treme_HC_IgG1- | ATGGAGACTCCGGCCCAGCTCCTCTTCCTCCTCCTCCTCTGGCTCCCCGACA |
| | CO06 | CCACCGGTCAGGTCCAGCTCGTCGAGAGCGGAGGCGGCGTCGTCCAGCCCGG |
| | | GCGGTCGCTCAGGCTCAGCTGCGCCGCCAGCGGCTTCACCTTCAGCAGCTAC |
| | | GGCATGCATTGGGTCAGGCAGGCCCCGGGCAAGGGTCTTGAGTGGGTCGCCG |
| | | TCATCTGGTACGACGGCTCCAACAAGTACTACGCCGACAGCGTCAAAGGCCG |
| | | GTTCACCATTTCCCGGGATAACTCCAAGAATACGCTCTACCTGCAGATGAAC |
| | | AGCCTCCGCGCCGAGGACACCGCCGTCTACTACTGCGCACGGGACCCCCGGG |
| | | GGGCCACGCTGTACTATTACTACTACGGCATGGACGTGTGGGGCCAGGGGAC |
| | | CACCGTAACCGTGAGCTCCGCCAGCACCAAGGGCCCCAGCGTGTTTCCGCTC |
| | | GCCCCTAGCAGCAAGTCCACCTCCGGGGGCACCGCCGCCCTGGGGTGCCTGG |
| | | TGAAGGACTACTTCCCTGAGCCCGTGACCGTCAGCTGGAACAGTGGCGCCCT |
| | | GACCAGCGGGGTGCACACGTTCCCCGCCGTGCTGCAGAGCTCCGGCCTCTAT |
| | | AGCCTCAGCAGCGTCGTGACCGTGCCGAGCAGCTCCCTGGGTACCCAGACCT |
| | | ACATATGCAACGTAAACCATAAACCCTCCAACACGAAGGTGGACAAAAGGGT |
| | | GGAACCCAAAAGCTGCGACAAGACTCACACATGCCCGCCCTGCCCCGCCCCA |
| | | GAGCTGCTGGGGGGCCCCAGCGTGTTCCTGTTCCCGCCCAAGCCCAAGGACA |
| | | CCCTGATGATCAGCCGCACCCCCGAAGTGACCTGCGTGGTGGTGGACGTGAG |
| | | CCACGAGGACCCGGAGGTGAAGTTCAACTGGTACGTGGATGGGGTGGAAGTG |
| | | CACAATGCCAAGACCAAGCCCCGGGAGGAGCAGTACAACTCTACCTACCGGG |
| | | TGGTGAGCGTGCTCACGGTGCTGCACCAGGACTGGCTCAATGGCAAGGAGTA |
| | | TAAGTGCAAGGTGAGCAACAAGGCCCTGCCAGCCCCCATCGAAAAAACGATC |
| | | AGCAAGGCCAAGGGCCAGCCCCGGGAGCCACAGGTGTACACCCTGCCCCCCT |
| | | CCAGGGAGGAGATGACCAAGAACCAGGTGTCCCTGACCTGCCTGGTGAAGGG |
| | | CTTCTACCCCTCCGACATCGCCGTCGAGTGGGAGTCCAACGGCCAGCCAGAG |
| | | AACAACTACAAGACCACGCCCCCCGTGCTCGACAGCGACGGCAGCTTCTTTC |
| | | TCTACTCCAAGCTGACCGTGGATAAGTCCAGGTGGCAGCAGGGCAACGTCTT |
| | | TAGCTGTAGCGTCATGCACGAGGCCCTGCACAACCACTACACTCAGAAAAGC |
| | | CTGAGCCTGTCCCCCGGCAAG |
| 394 | Treme_HC_IgG1- | ATGGAGACTCCGGCCCAGCTCCTCTTCTTGCTCCTCCTCTGGCTCCCGGACA |
| | CO07 | CCACCGGGCAGGTCCAACTCGTCGAATCCGGCGGCGGCGTCGTACAGCCCGG |
| | | CAGGAGCCTCAGGCTTTCCTGTGCCGCCAGCGGCTTCACCTTCAGCTCCTAC |
| | | GGCATGCACTGGGTCAGGCAGGCCCCCGGGAAGGGCCTCGAGTGGGTCGCCG |
| | | TCATCTGGTACGACGGCAGCAACAAGTACTACGCCGACTCCGTCAAGGGCAG |
| | | GTTCACCATCAGCAGGGACAATTCCAAAAACACGCTCTACCTGCAAATGAAC |
| | | AGCCTGCGCGCCGAGGACACAGCCGTGTACTACTGCGCCCGGGATCCCCGGG |
| | | GCGCCACCCTCTACTACTACTATTACGGGATGGATGTGTGGGGGCAGGGCAC |
| | | CACGGTGACGGTGAGCAGCGCCTCCACCAAAGGCCCCAGCGTGTTCCCCCTG |
| | | GCGCCCAGCAGCAAAAGCACCAGCGGGGGAACCGCCGCGCTGGGCTGCCTGG |
| | | TGAAGGACTACTTTCCCGAGCCCGTGACCGTGTCCTGGAACAGCGGCGCCCT |
| | | CACGAGCGGGGTGCACACCTTCCCCGCGGTGCTGCAGAGCAGCGGCCTGTAC |
| | | AGCCTGAGCAGCGTGGTGACCGTCCCCTCCTCCAGCCTGGGCACCCAGACAT |
| | | ACATCTGCAACGTGAACCATAAGCCCAGCAATACCAAGGTCGACAAGCGAGT |
| | | GGAGCCCAAGAGCTGCGACAAGACTCATACCTGCCCGCCCTGCCCCGCCCCC |
| | | GAGCTGCTGGGCGGCCCCAGCGTGTTCCTGTTCCCGCCCAAACCGAAGGATA |
| | | CCCTGATGATATCCCGCACCCCCGAGGTGACCTGCGTGGTGGTGGACGTGAG |
| | | CCACGAGGACCCGGAGGTGAAATTCAACTGGTACGTGGATGGAGTGGAAGTG |
| | | CATAACGCCAAGACCAAGCCCAGGGAGGAGCAGTACAACAGCACCTACCGAG |
| | | TGGTGAGCGTGCTGACCGTGCTGCACCAAGACTGGCTGAACGGCAAAGAGTA |
| | | CAAGTGCAAAGTGTCAAATAAAGCCCTCCCCGCCCCCATCGAGAAAACCATC |
| | | TCGAAGGCCAAGGGCCAGCCACGCGAGCCCCAGGTGTACACCCTCCCGCCCA |
| | | GCCGGGAGGAGATGACCAAGAACCAAGTGTCCCTGACGTGCCTGGTGAAGGG |
| | | GTTCTACCCCAGCGACATAGCCGTAGAGTGGGAGAGCAATGGCCAGCCCGAG |
| | | AATAATTATAAGACGACTCCCCCCGTGCTCGACAGCGACGGCAGCTTCTTCC |
| | | TCTACAGCAAGCTCACCGTCGACAAGAGCAGGTGGCAGCAGGGCAATGTGTT |
| | | CTCCTGCTCCGTCATGCATGAGGCCCTGCACAACCACTACACCCAGAAAAGC |
| | | CTGTCCCTGTCCCCAGGTAAG |
| 395 | Treme_HC_IgG1- | ATGGAGACTCCCGCCCAGCTCCTATTCCTCCTCCTCCTCTGGCTTCCCGATA |
| | CO08 | CCACCGGTCAGGTCCAGCTCGTCGAGTCCGGCGGCGGCGTGGTACAACCCGG |
| | | ACGGTCCCTCCGGCTCAGCTGCGCCGCGTCCGGCTTCACCTTCAGCTCCTAC |
| | | GGGATGCACTGGGTCCGGCAGGCCCCCGGTAAGGGCCTCGAGTGGGTCGCCG |
| | | TTATCTGGTACGACGGCAGCAACAAGTACTACGCCGACAGCGTCAAGGGCCG |
| | | GTTCACAATCAGCAGGGACAACTCCAAGAATACCCTCTACCTGCAGATGAAC |
| | | AGCCTGCGGGCCGAGGATACGGCGGTCTACTACTGCGCCAGGGACCCGAGGG |
| | | GCGCCACCCTGTATTACTATTACTACGGCATGGACGTGTGGGGCCAGGGCAC |
| | | CACCGTGACCGTGTCCAGCGCCAGCACCAAGGGGCCCTCGGTGTTTCCCCTG |
| | | GCCCCCAGCTCAAAGAGCACCAGCGGCGGGACCGCGGCCCTGGGATGCCTGG |
| | | TGAAGGACTACTTTCCCGAGCCCGTGACCGTGTCCTGGAACTCCGGCGCGCT |
| | | GACGAGCGGCGTACACACCTTTCCCGCCGTGCTGCAGAGCAGCGGCCTCTAT |
| | | AGCCTGAGCAGCGTGGTGACCGTGCCCAGCAGCAGCCTGGGCACGCAGACCT |
| | | ACATCTGCAACGTGAACCACAAGCCGAGCAACACCAAGGTGGATAAGAGGGT |
| | | CGAGCCCAAGTCGTGTGACAAGACACATACCTGCCCCCCGTGCCCCGCCCCC |
| | | GAGCTGCTGGGGGGCCCCAGCGTGTTCCTGTTCCCACCCAAGCCGAAAGACA |
| | | CGCTGATGATTAGCAGGACCCCCGAGGTGACCTGCGTGGTGGTGGACGTCAG |
| | | CCACGAGGACCCCGAGGTGAAGTTCAACTGGTACGTGGACGGCGTGGAGGTG |
| | | CATAATGCTAAGACCAAGCCCCGGGAGGAGCAGTACAACTCCACCTACAGAG |
| | | TGGTAAGCGTACTGACCGTGCTGCACCAGGACTGGCTGAACGGTAAGGAGTA |
| | | CAAGTGTAAGGTGAGCAACAAGGCCCTGCCCGCCCCCATCGAGAAGACGATC |
| | | TCGAAGGCCAAGGGCCAGCCCCGGGAGCCCCAGGTCTACACGCTCCCTCCCA |
| | | GCAGGGAGGAGATGACGAAGAACCAGGTCAGCCTCACGTGCCTCGTGAAGGG |
| | | CTTCTACCCCAGCGACATAGCCGTGGAGTGGGAGTCCAACGGACAGCCCGAG |
| | | AACAACTACAAGACCACGCCCCCCGTTCTGGACTCCGACGGATCCTTTTTCC |
| | | TCTACAGCAAACTGACCGTGGACAAGTCCCGGTGGCAGCAGGGCAACGTGTT |
| | | CAGCTGCAGCGTGATGCACGAAGCCCTGCACAACCACTATACCCAGAAAAGC |
| | | CTGTCCCTCAGCCCCGGCAAG |
| 396 | Treme_HC_IgG1- | GTTCACAATCAGCAGGGACAACTCCAAGAATACCCTCTACCTGCAGATGAAC |
| | CO09 | AGCCTGCGGGCCGAGGATACGGCGGTCTACTACTGCGCCAGGGACCCGAGGG |
| | | GCGCCACCCTGTATTACTATTACTACGGCATGGACGTGTGGGGCCAGGGCAC |
| | | CACCGTGACCGTGTCCAGCGCCAGCACCAAGGGGCCCTCGGTGTTTCCCCTG |
| | | GCCCCCAGCTCAAAGAGCACCAGCGGCGGGACCGCGGCCCTGGGATGCCTGG |
| | | TGAAGGACTACTTTCCCGAGCCCGTGACCGTGTCCTGGAACTCCGGCGCGCT |
| | | GACGAGCGGCGTACACACCTTTCCCGCCGTGCTGCAGAGCAGCGGCCTCTAT |
| | | AGCCTGAGCAGCGTGGTGACCGTGCCCAGCAGCAGCCTGGGCACGCAGACCT |
| | | ACATCTGCAACGTGAACCACAAGCCGAGCAACACCAAGGTGGATAAGAGGGT |
| | | CGAGCCCAAGTCGTGTGACAAGACACATACCTGCCCCCCGTGCCCCGCCCCC |
| | | GAGCTGCTGGGGGGCCCCAGCGTGTTCCTGTTCCCACCCAAGCCGAAAGACA |
| | | CGCTGATGATTAGCAGGACCCCCGAGGTGACCTGCGTGGTGGTGGACGTCAG |
| | | CCACGAGGACCCCGAGGTGAAGTTCAACTGGTACGTGGACGGCGTGGAGGTG |
| | | CATAATGCTAAGACCAAGCCCCGGGAGGAGCAGTACAACTCCACCTACAGAG |
| | | TGGTAAGCGTACTGACCGTGCTGCACCAGGACTGGCTGAACGGTAAGGAGTA |
| | | CAAGTGTAAGGTGAGCAACAAGGCCCTGCCCGCCCCCATCGAGAAGACGATC |
| | | TCGAAGGCCAAGGGCCAGCCCCGGGAGCCCCAGGTCTACACGCTCCCTCCCA |
| | | GCAGGGAGGAGATGACGAAGAACCAGGTCAGCCTCACGTGCCTCGTGAAGGG |
| | | CTTCTACCCCAGCGACATAGCCGTGGAGTGGGAGTCCAACGGACAGCCCGAG |
| | | AACAACTACAAGACCACGCCCCCCGTTCTGGACTCCGACGGATCCTTTTTCC |
| | | TCTACAGCAAACTGACCGTGGACAAGTCCCGGTGGCAGCAGGGCAACGTGTT |
| | | CAGCTGCAGCGTGATGCACGAAGCCCTGCACAACCACTATACCCAGAAAAGC |
| | | CTGTCCCTCAGCCCCGGCAAG |
| 397 | Treme_HC_IgG1- | ATGGAGACGCCCGCCCAGCTTCTCTTCCTCCTACTCCTCTGGCTCCCCGACA |
| | CO10 | CCACCGGGCAGGTCCAGCTCGTCGAGAGCGGCGGCGGCGTGGTGCAGCCCGG |
| | | CCGGAGCCTCAGGTTAAGCTGCGCGGCGAGCGGCTTCACCTTCTCCAGCTAC |
| | | GGCATGCACTGGGTCCGCCAGGCGCCCGGCAAGGGGCTCGAGTGGGTCGCCG |
| | | TAATCTGGTACGACGGCAGCAACAAGTACTACGCCGACAGCGTCAAGGGCAG |
| | | ATTCACAATCTCCAGGGACAACTCTAAGAACACCTTGTACCTGCAGATGAAC |
| | | AGCCTGCGCGCCGAAGACACGGCCGTGTACTACTGCGCCCGGGATCCCCGGG |
| | | GCGCGACCCTGTACTACTATTACTACGGCATGGACGTGTGGGGCCAAGGGAC |
| | | CACCGTGACCGTGAGCAGCGCCAGCACCAAGGGCCCCTCCGTGTTCCCGCTG |
| | | GCCCCCTCCAGCAAGTCCACCAGCGGCGGCACCGCAGCCCTCGGCTGCCTGG |
| | | TGAAGGACTATTTTCCCGAGCCGGTGACCGTGAGTTGGAATAGCGGCGCCCT |
| | | GACCAGCGGCGTACACACCTTCCCCGCGGTGCTGCAGAGCTCCGGCCTGTAC |
| | | TCCCTGAGCAGCGTGGTGACCGTGCCCAGCTCCAGCCTCGGCACCCAGACCT |
| | | ACATCTGCAATGTGAACCACAAGCCGAGCAACACCAAGGTGGATAAGAGGGT |
| | | GGAGCCGAAATCGTGCGACAAAACGCACACCTGCCCCCCATGTCCCGCCCCC |
| | | GAACTCCTGGGCGGTCCCAGCGTGTTTCTGTTCCCACCCAAACCGAAGGACA |
| | | CCCTGATGATCTCCAGGACACCCGAGGTGACCTGCGTGGTGGTGGATGTGTC |
| | | CCACGAGGACCCCGAGGTGAAATTCAATTGGTACGTGGACGGCGTGGAGGTC |
| | | CACAACGCCAAGACCAAGCCCAGGGAGGAACAATACAACTCCACCTACAGGG |
| | | TGGTGTCAGTGCTGACCGTCCTGCACCAGGATTGGCTGAACGGCAAGGAGTA |
| | | CAAGTGCAAGGTGTCCAACAAGGCCCTGCCGGCACCCATCGAGAAAACCATC |
| | | AGCAAAGCCAAGGGCCAGCCCCGGGAACCCCAAGTGTACACCCTGCCCCCCA |
| | | GCCGGGAGGAAATGACCAAGAACCAGGTGAGCCTCACCTGCCTGGTCAAGGG |
| | | CTTCTACCCCAGCGACATAGCCGTGGAGTGGGAGAGCAACGGCCAGCCCGAA |
| | | AACAACTATAAGACCACCCCGCCCGTCCTGGACAGCGACGGCTCTTTTTTCC |
| | | TGTACAGCAAGCTGACCGTGGACAAGAGCCGATGGCAGCAGGGGAACGTCTT |
| | | CAGCTGCAGCGTGATGCACGAGGCCCTGCATAACCATTATACCCAGAAAAGC |
| | | CTCAGCCTGTCGCCCGGCAAG |
| 398 | Treme_HC_IgG1- | ATGGAGACACCCGCCCAGCTCCTCTTCCTTCTCTTGCTCTGGCTCCCCGACA |
| | CO11 | CGACCGGGCAGGTCCAGCTCGTCGAGTCGGGCGGAGGCGTCGTCCAGCCCGG |
| | | AAGGAGCCTCAGGCTATCCTGCGCCGCGAGCGGCTTCACCTTCAGCTCCTAC |
| | | GGTATGCACTGGGTCCGGCAGGCCCCCGGCAAGGGGCTCGAGTGGGTAGCCG |
| | | TCATCTGGTACGACGGCTCCAACAAGTACTACGCCGACAGCGTCAAGGGCCG |
| | | GTTCACCATCAGCAGGGACAACAGCAAGAACACCCTCTACCTGCAAATGAAC |
| | | AGCCTGAGGGCCGAAGATACCGCCGTGTACTATTGCGCCAGGGACCCCCGGG |
| | | GCGCCACACTATATTACTACTACTACGGCATGGACGTGTGGGGGCAGGGCAC |
| | | CACCGTGACCGTGTCTAGCGCGAGCACGAAGGGCCCCAGCGTGTTCCCCCTG |
| | | GCCCCCAGCTCAAAGAGCACTAGCGGCGGAACCGCCGCCCTGGGCTGCCTGG |
| | | TCAAGGACTATTTTCCGGAGCCCGTCACGGTGTCCTGGAACAGCGGCGCCCT |
| | | GACCAGCGGGGTGCACACCTTCCCCGCCGTGCTGCAGAGCAGCGGGCTCTAC |
| | | AGCCTGAGCAGCGTGGTCACCGTGCCTTCCAGCAGCCTGGGTACCCAGACCT |
| | | ACATCTGCAACGTGAATCACAAACCCAGCAACACCAAGGTGGACAAGAGGGT |
| | | GGAGCCCAAGAGCTGCGACAAGACGCACACCTGCCCGCCCTGTCCCGCCCCC |
| | | GAACTGCTGGGAGGCCCCTCCGTGTTCCTGTTCCCGCCCAAGCCAAAGGACA |
| | | CCCTGATGATAAGCAGGACCCCCGAGGTGACCTGCGTGGTGGTGGACGTGTC |
| | | CCACGAGGACCCCGAGGTTAAGTTCAACTGGTATGTGGACGGCGTGGAAGTG |
| | | CACAACGCCAAAACCAAGCCCCGGGAGGAGCAGTACAACAGCACCTATAGGG |
| | | TGGTGAGCGTGCTCACCGTGCTGCACCAAGACTGGCTGAACGGGAAAGAGTA |
| | | TAAGTGCAAGGTGAGCAATAAAGCGCTGCCCGCCCCGATCGAGAAGACCATC |
| | | AGCAAGGCCAAGGGCCAGCCCCGGGAGCCGCAAGTATACACCCTGCCGCCGT |
| | | CCCGGGAGGAGATGACCAAGAACCAGGTGAGCCTGACCTGCCTCGTGAAAGG |
| | | GTTTTACCCCAGCGACATCGCGGTGGAGTGGGAGTCCAACGGCCAACCCGAG |
| | | AACAACTACAAGACCACCCCACCCGTGCTGGACTCCGACGGATCCTTTTTCC |
| | | TCTACTCCAAGCTGACCGTGGATAAGTCCAGGTGGCAGCAGGGCAACGTGTT |
| | | CAGCTGCAGCGTAATGCACGAGGCCCTGCACAATCATTACACGCAGAAAAGC |
| | | CTGTCTCTGAGCCCCGGCAAG |
| 399 | Treme_HC_IgG1- | ATGGAAACGCCAGCCCAGCTCTTATTCCTCCTCCTCCTCTGGCTCCCGGACA |
| | CO12 | CCACCGGCCAGGTCCAGCTCGTAGAGTCAGGGGGCGGCGTCGTCCAGCCCGG |
| | | CAGGTCCCTTCGCCTCTCCTGCGCCGCCAGCGGCTTCACCTTCAGCAGCTAC |
| | | GGCATGCACTGGGTCAGGCAGGCGCCCGGCAAGGGCCTCGAGTGGGTCGCCG |
| | | TCATCTGGTACGACGGCAGCAACAAATACTACGCCGACAGCGTCAAGGGCCG |
| | | GTTCACCATCAGCAGGGACAACAGCAAGAACACCCTCTACCTGCAGATGAAT |
| | | TCCCTGCGGGCTGAGGATACCGCGGTGTACTACTGCGCCCGCGACCCCAGGG |
| | | GCGCGACGCTGTACTACTACTACTACGGCATGGACGTGTGGGGGCAGGGGAC |
| | | CACCGTCACCGTGAGCAGCGCCAGCACCAAAGGGCCATCCGTGTTTCCCCTG |
| | | GCCCCGAGCTCCAAGAGCACCAGCGGCGGCACAGCCGCCCTGGGCTGTCTGG |
| | | TGAAGGACTATTTCCCGGAGCCCGTGACCGTGTCCTGGAACAGCGGCGCCCT |
| | | GACCAGCGGCGTGCACACGTTCCCCGCCGTGCTGCAAAGCTCCGGCCTGTAC |
| | | AGCCTGAGCAGCGTGGTGACCGTGCCCAGCAGCAGCCTGGGAACGCAGACCT |
| | | ACATCTGTAACGTGAACCATAAGCCCAGCAACACCAAGGTGGACAAACGCGT |
| | | CGAGCCCAAGAGTTGCGACAAGACCCACACCTGCCCTCCCTGTCCCGCCCCA |
| | | GAGCTCCTCGGGGGACCCAGCGTGTTCCTCTTTCCCCCTAAGCCCAAGGACA |
| | | CGCTGATGATTAGCAGGACTCCCGAGGTGACCTGCGTGGTGGTGGACGTGAG |
| | | CCACGAGGACCCAGAGGTGAAATTCAACTGGTATGTGGATGGCGTGGAGGTC |
| | | CACAACGCCAAAACCAAGCCCAGGGAGGAACAGTATAACAGCACCTACAGGG |
| | | TCGTATCCGTCCTGACCGTACTGCACCAGGACTGGCTGAACGGCAAGGAGTA |
| | | TAAGTGCAAAGTCAGCAATAAGGCCCTGCCCGCACCCATCGAGAAAACCATC |
| | | TCCAAGGCCAAGGGCCAGCCCAGGGAGCCCCAGGTGTATACCCTGCCCCCCA |
| | | GCAGGGAGGAGATGACCAAGAATCAGGTGAGCCTAACTTGCCTGGTGAAGGG |
| | | CTTTTACCCCAGCGACATCGCCGTGGAGTGGGAGTCCAACGGCCAGCCCGAG |
| | | AACAACTATAAGACCACCCCGCCCGTGCTGGACAGCGATGGCTCCTTCTTCC |
| | | TCTACAGCAAGCTGACCGTGGACAAGAGCAGGTGGCAGCAGGGCAACGTGTT |
| | | CTCCTGCAGCGTGATGCACGAGGCCCTGCATAATCATTACACCCAGAAGTCG |
| | | CTGAGCCTGAGCCCCGGTAAG |
| 400 | Treme_HC_IgG1- | ATGGAGACTCCAGCCCAACTCCTATTCTTGCTCCTTCTCTGGCTCCCCGACA |
| | CO13 | CCACCGGTCAGGTCCAGCTCGTCGAGAGCGGAGGCGGCGTTGTACAGCCCGG |
| | | CCGCAGCCTTCGACTAAGCTGCGCCGCCTCGGGCTTTACCTTCAGCAGCTAC |
| | | GGCATGCACTGGGTCAGGCAGGCCCCAGGCAAGGGGCTCGAGTGGGTAGCCG |
| | | TCATCTGGTACGACGGAAGCAATAAGTACTACGCGGACAGCGTTAAGGGCCG |
| | | GTTTACCATCAGCAGGGACAACAGCAAGAACACCCTCTACTTGCAGATGAAC |
| | | AGCCTGAGGGCGGAGGATACGGCCGTGTACTATTGCGCCAGGGATCCCCGGG |
| | | GCGCCACCCTGTACTACTACTATTACGGCATGGACGTGTGGGGCCAGGGCAC |
| | | CACCGTTACCGTGAGCTCGGCCAGCACCAAGGGGCCCAGCGTCTTCCCCCTG |
| | | GCCCCCAGCTCCAAGAGCACCAGCGGCGGGACCGCCGCCCTGGGCTGCCTGG |
| | | TGAAGGACTACTTCCCCGAGCCCGTGACGGTAAGCTGGAACAGCGGCGCCCT |
| | | GACCAGCGGCGTGCACACCTTCCCCGCCGTGCTGCAAAGCAGCGGCCTCTAC |
| | | TCCCTGAGTAGCGTGGTGACCGTGCCCAGCTCTAGCCTGGGCACGCAGACCT |
| | | ACATCTGCAACGTGAACCATAAACCCAGCAACACCAAAGTGGATAAGCGGGT |
| | | GGAGCCCAAGTCCTGCGACAAGACACACACCTGCCCGCCCTGCCCCGCCCCC |
| | | GAGCTGCTTGGCGGCCCCAGCGTCTTTCTGTTCCCGCCCAAGCCGAAGGACA |
| | | CACTCATGATCAGCCGTACCCCCGAGGTCACCTGCGTGGTGGTGGACGTGAG |
| | | CCACGAGGACCCCGAAGTCAAGTTCAACTGGTATGTGGACGGCGTCGAAGTC |
| | | CACAACGCCAAGACCAAGCCCAGGGAGGAGCAGTACAACAGCACCTACAGGG |
| | | TCGTCTCTGTGCTGACCGTACTGCACCAGGACTGGCTGAACGGCAAGGAGTA |
| | | CAAGTGCAAGGTGAGCAACAAGGCCCTGCCCGCCCCCATCGAGAAGACCATC |
| | | TCCAAGGCCAAGGGCCAGCCGAGGGAACCCCAGGTGTACACCCTGCCCCCCT |
| | | CCCGCGAGGAAATGACCAAAAACCAGGTGAGCCTGACCTGCCTGGTGAAGGG |
| | | GTTCTACCCCAGCGACATCGCCGTGGAGTGGGAGAGCAACGGCCAGCCCGAA |
| | | AACAACTACAAGACGACCCCGCCGGTGCTGGACAGCGACGGCAGCTTCTTCC |
| | | TGTACAGCAAGCTGACGGTGGACAAGAGCCGTTGGCAGCAAGGCAACGTGTT |
| | | CAGCTGCTCCGTGATGCACGAGGCGCTCCACAACCACTACACCCAGAAATCC |
| | | CTGAGCCTGTCGCCGGGGAAG |
| 401 | Treme_HC_IgG1- | ATGGAGACGCCCGCCCAGCTCCTCTTCCTCCTCCTCCTCTGGCTCCCCGACA |
| | CO14 | CCACGGGCCAGGTCCAGCTCGTCGAAAGCGGGGGCGGCGTCGTCCAACCCGG |
| | | ACGAAGCCTCCGGCTCTCCTGTGCCGCCTCGGGCTTTACATTCTCCAGCTAC |
| | | GGGATGCATTGGGTAAGGCAAGCCCCGGGGAAGGGCCTCGAGTGGGTCGCCG |
| | | TCATCTGGTACGACGGGAGCAATAAGTACTACGCAGACAGCGTCAAGGGCCG |
| | | GTTCACGATCTCCAGGGACAATTCCAAGAACACCCTCTACCTGCAGATGAAC |
| | | TCCCTGAGGGCCGAGGATACGGCCGTGTACTACTGCGCCCGGGACCCCAGGG |
| | | GAGCCACCCTGTATTACTACTACTACGGCATGGATGTGTGGGGCCAGGGGAC |
| | | CACGGTGACGGTGTCCAGTGCCAGCACAAAGGGCCCCAGCGTGTTCCCCCTG |
| | | GCCCCCAGCAGCAAGAGCACCAGCGGTGGGACCGCCGCGCTCGGCTGCCTGG |
| | | TGAAGGATTACTTCCCCGAGCCCGTGACCGTGAGCTGGAACTCCGGCGCCCT |
| | | CACGAGCGGGGTGCACACGTTCCCCGCGGTGCTGCAGAGCAGTGGCCTGTAC |
| | | TCCCTCAGCAGCGTGGTGACCGTGCCCAGCAGCTCACTGGGCACCCAGACCT |
| | | ACATCTGCAACGTGAACCACAAGCCCAGCAACACCAAAGTCGACAAGAGGGT |
| | | GGAGCCAAAAAGCTGCGATAAGACCCATACCTGTCCTCCCTGCCCCGCCCCC |
| | | GAGCTGCTCGGCGGACCCAGCGTCTTCCTGTTCCCTCCCAAACCCAAGGACA |
| | | CCCTGATGATCTCCAGGACCCCCGAGGTGACGTGCGTGGTCGTGGACGTGTC |
| | | CCACGAGGACCCCGAGGTGAAGTTCAACTGGTATGTGGACGGCGTGGAGGTC |
| | | CACAACGCCAAGACCAAACCCCGGGAGGAGCAGTATAACAGCACCTACAGGG |
| | | TCGTGAGCGTGCTGACCGTGCTCCACCAGGACTGGCTGAACGGCAAGGAGTA |
| | | CAAGTGTAAGGTTTCCAACAAGGCCCTGCCCGCCCCCATCGAGAAGACGATC |
| | | TCCAAGGCCAAGGGCCAGCCCAGGGAGCCCCAGGTGTATACCCTGCCCCCCT |
| | | CTAGGGAGGAGATGACCAAGAACCAGGTGAGCCTGACGTGCCTGGTGAAGGG |
| | | CTTTTACCCCTCCGACATCGCCGTGGAGTGGGAGAGCAATGGTCAGCCCGAG |
| | | AACAACTACAAGACCACCCCGCCCGTGCTGGACAGCGACGGCTCCTTCTTCC |
| | | TGTACAGCAAGCTGACCGTGGACAAGTCCCGGTGGCAGCAGGGCAACGTGTT |
| | | CAGTTGCTCTGTGATGCACGAGGCCCTGCACAACCACTACACCCAGAAAAGC |
| | | TTATCCCTGAGCCCCGGCAAG |
| 402 | Treme_HC_IgG1- | ATGGAGACACCCGCCCAACTGCTCTTTTTACTCCTCCTCTGGCTCCCCGACA |
| | CO15 | CCACGGGCCAGGTTCAGTTGGTCGAGTCCGGGGGCGGCGTCGTCCAGCCGGG |
| | | CCGGAGCCTCCGCCTTTCCTGCGCCGCCTCCGGCTTCACCTTCTCCAGCTAC |
| | | GGCATGCATTGGGTCCGCCAAGCCCCCGGGAAGGGGCTTGAGTGGGTCGCCG |
| | | TTATCTGGTACGACGGGAGCAACAAGTATTACGCCGACTCCGTCAAGGGCAG |
| | | ATTTACGATTAGCAGGGACAACAGCAAGAACACCCTTTACCTGCAGATGAAT |
| | | TCCCTGCGGGCGGAAGACACCGCCGTGTACTACTGTGCCCGGGACCCCAGGG |
| | | GCGCGACCCTCTACTATTACTACTATGGGATGGACGTGTGGGGGCAGGGCAC |
| | | CACGGTGACCGTGAGCTCTGCCTCCACCAAGGGCCCCAGCGTATTCCCTCTG |
| | | GCCCCCTCCAGCAAAAGCACCAGCGGCGGCACGGCCGCCTTGGGGTGCCTGG |
| | | TGAAAGATTACTTCCCCGAACCCGTCACCGTGAGCTGGAACTCCGGCGCCCT |
| | | GACCAGCGGGGTGCACACCTTCCCCGCCGTGCTGCAGTCCTCCGGGCTCTAC |
| | | TCGCTGAGCAGCGTGGTGACCGTGCCCAGCTCCTCCCTGGGCACCCAGACCT |
| | | ATATCTGCAACGTCAACCACAAACCCAGCAACACCAAGGTCGATAAGCGGGT |
| | | GGAACCCAAGAGTTGCGACAAAACCCACACCTGCCCGCCCTGCCCCGCCCCA |
| | | GAGCTGCTGGGAGGGCCCAGCGTGTTCCTCTTCCCTCCCAAGCCGAAGGACA |
| | | CCCTCATGATCAGCCGCACCCCCGAAGTGACGTGTGTGGTGGTGGACGTGTC |
| | | ACACGAGGACCCCGAGGTCAAGTTCAACTGGTATGTCGACGGCGTCGAGGTG |
| | | CACAACGCCAAGACGAAGCCGAGGGAGGAGCAGTACAACAGCACCTACAGGG |
| | | TGGTGTCCGTCCTGACCGTGCTGCACCAGGACTGGCTGAACGGCAAGGAGTA |
| | | TAAGTGCAAGGTGAGCAATAAGGCCCTGCCCGCCCCCATCGAGAAGACCATC |
| | | AGCAAGGCCAAGGGCCAGCCCCGGGAGCCCCAGGTGTACACACTCCCGCCCA |
| | | GCAGGGAAGAAATGACCAAGAACCAGGTGAGCCTGACCTGTCTCGTGAAAGG |
| | | CTTCTACCCCTCCGACATCGCAGTGGAGTGGGAGAGCAACGGGCAGCCGGAA |
| | | AACAACTATAAGACGACGCCCCCGGTGCTGGATAGCGATGGCAGCTTTTTCC |
| | | TGTACAGCAAACTGACCGTCGACAAGTCCAGGTGGCAGCAGGGCAACGTGTT |
| | | CAGCTGCAGCGTGATGCATGAAGCCCTGCATAACCATTACACGCAGAAAAGC |
| | | CTGAGCCTGAGCCCCGGCAAG |
| 403 | Treme_HC_IgG1- | ATGGAGACGCCCGCCCAGCTCCTTTTCCTCCTCCTCCTCTGGCTCCCAGATA |
| | CO16 | CCACCGGCCAGGTCCAGCTCGTCGAGAGCGGCGGCGGAGTCGTCCAGCCCGG |
| | | CCGCTCGCTTCGGCTTTCCTGCGCCGCCTCCGGGTTCACCTTCTCCTCGTAC |
| | | GGTATGCACTGGGTCAGGCAGGCCCCCGGGAAAGGGCTCGAGTGGGTAGCCG |
| | | TCATCTGGTACGACGGCAGCAACAAGTACTACGCCGACAGCGTAAAGGGGCG |
| | | CTTCACCATCTCCAGGGACAACAGCAAGAACACGCTTTACCTGCAGATGAAC |
| | | AGCCTGAGGGCCGAAGACACCGCCGTCTACTACTGCGCCCGGGACCCCAGGG |
| | | GTGCCACCTTGTACTATTACTACTACGGGATGGACGTGTGGGGCCAGGGCAC |
| | | GACCGTGACCGTGTCGAGCGCGTCCACCAAGGGCCCCAGCGTGTTCCCGCTG |
| | | GCTCCCAGCTCCAAGAGCACCTCCGGGGGCACAGCGGCCCTGGGCTGCCTGG |
| | | TGAAGGACTACTTCCCCGAGCCCGTGACGGTGAGCTGGAATTCCGGCGCCTT |
| | | GACCAGCGGCGTCCACACCTTTCCCGCCGTGCTCCAAAGCAGCGGCCTGTAT |
| | | AGCCTGAGCTCCGTGGTGACAGTCCCCAGCAGCAGCCTCGGCACCCAGACCT |
| | | ACATATGCAACGTCAATCACAAACCCTCCAACACCAAGGTCGACAAACGGGT |
| | | GGAGCCCAAAAGCTGCGACAAGACCCATACGTGCCCGCCCTGCCCCGCCCCC |
| | | GAGCTGCTGGGCGGGCCCAGCGTATTCCTCTTCCCGCCGAAGCCCAAGGACA |
| | | CCCTGATGATCAGCAGGACCCCGGAGGTGACGTGCGTGGTGGTCGACGTCTC |
| | | CCACGAAGACCCCGAGGTGAAGTTCAATTGGTACGTGGATGGCGTGGAGGTG |
| | | CACAACGCCAAGACGAAACCCAGGGAGGAGCAATATAACAGCACATACAGGG |
| | | TGGTGTCCGTGCTGACCGTGCTGCACCAGGACTGGCTGAACGGCAAGGAGTA |
| | | CAAGTGCAAGGTGAGCAACAAGGCCCTCCCCGCCCCCATCGAGAAGACCATC |
| | | AGCAAGGCCAAGGGCCAGCCCAGGGAGCCCCAGGTGTACACCCTGCCACCCA |
| | | GCAGGGAGGAGATGACGAAGAATCAGGTGAGCCTCACCTGCCTGGTGAAGGG |
| | | CTTCTACCCCAGCGACATCGCCGTGGAGTGGGAGTCCAACGGCCAGCCCGAG |
| | | AACAACTACAAGACGACCCCTCCCGTCCTGGACTCCGACGGGAGCTTCTTCC |
| | | TGTACTCCAAGCTCACCGTGGACAAAAGCCGTTGGCAGCAGGGCAACGTGTT |
| | | CAGCTGCAGCGTGATGCATGAGGCCCTGCACAATCACTATACCCAAAAGTCC |
| | | CTCAGCCTGTCCCCCGGCAAG |
| 404 | Treme_HC_IgG1- | ATGGAGACTCCCGCCCAGCTTCTATTCCTACTCTTGCTCTGGCTCCCGGACA |
| | CO17 | CCACCGGCCAGGTCCAGCTCGTGGAGTCCGGCGGAGGGGTGGTCCAACCCGG |
| | | GCGGTCGCTCCGGCTCTCCTGCGCCGCCAGCGGTTTCACATTCAGCAGCTAC |
| | | GGGATGCACTGGGTTAGGCAGGCACCCGGCAAGGGCCTCGAGTGGGTCGCCG |
| | | TCATCTGGTACGACGGCAGCAACAAATACTACGCCGATAGCGTCAAAGGACG |
| | | CTTTACGATCAGCCGGGACAACTCCAAGAACACCCTCTACCTGCAGATGAAC |
| | | AGCCTGAGGGCGGAGGACACCGCCGTGTATTACTGCGCCAGGGATCCCAGGG |
| | | GCGCCACCCTGTACTACTACTATTACGGCATGGATGTGTGGGGCCAGGGGAC |
| | | GACGGTGACCGTGAGCTCCGCCTCCACCAAGGGCCCAAGCGTGTTCCCCCTG |
| | | GCCCCCAGCAGCAAGAGCACCAGCGGCGGGACCGCCGCCCTGGGGTGCCTGG |
| | | TGAAGGACTACTTCCCCGAGCCCGTGACGGTGTCCTGGAACTCCGGCGCGCT |
| | | GACCAGCGGGGTGCACACCTTCCCCGCCGTGCTGCAGAGCAGCGGCCTGTAC |
| | | AGCCTGTCCAGCGTGGTGACCGTGCCCTCCTCAAGCCTGGGCACCCAGACCT |
| | | ACATCTGCAACGTCAATCACAAACCTAGCAACACCAAAGTGGATAAGCGGGT |
| | | GGAGCCCAAATCATGCGACAAGACGCACACTTGTCCACCGTGCCCCGCCCCC |
| | | GAGCTCCTGGGTGGGCCCAGCGTGTTCCTGTTCCCTCCCAAGCCCAAGGACA |
| | | CGCTCATGATCTCGCGGACCCCTGAGGTGACCTGTGTGGTGGTGGACGTGAG |
| | | CCACGAGGATCCCGAGGTGAAGTTCAACTGGTACGTGGATGGCGTGGAGGTG |
| | | CACAACGCCAAGACCAAACCCCGGGAGGAACAGTACAACAGCACGTACCGGG |
| | | TGGTGAGCGTCCTGACCGTGCTGCACCAGGACTGGCTAAACGGCAAAGAGTA |
| | | CAAGTGTAAGGTGAGCAATAAGGCCCTGCCGGCCCCCATCGAGAAGACGATC |
| | | TCCAAGGCCAAGGGCCAGCCCCGGGAGCCGCAGGTGTACACCCTGCCCCCCA |
| | | GTAGGGAGGAAATGACCAAGAACCAGGTGAGCCTGACGTGTCTGGTGAAGGG |
| | | CTTCTACCCCTCAGACATCGCCGTGGAGTGGGAGAGCAACGGCCAGCCCGAG |
| | | AACAATTATAAGACCACCCCGCCCGTGCTGGATTCGGACGGCTCCTTTTTCC |
| | | TCTACAGCAAGCTGACCGTCGACAAGTCCCGATGGCAGCAGGGCAACGTGTT |
| | | CAGCTGCAGCGTGATGCACGAGGCGCTGCACAACCACTACACGCAGAAAAGC |
| | | CTGAGCCTCAGCCCCGGTAAG |
| 405 | Treme_HC_IgG1- | ATGGAGACACCCGCCCAGTTGCTTTTCCTCCTCCTTCTCTGGCTCCCCGACA |
| | CO18 | CCACCGGGCAGGTCCAGCTCGTCGAGAGCGGCGGCGGCGTCGTTCAGCCCGG |
| | | ACGGTCCCTCAGGCTCAGCTGCGCCGCCAGCGGTTTCACGTTTAGCAGCTAC |
| | | GGCATGCATTGGGTCAGGCAAGCGCCCGGCAAGGGGCTGGAGTGGGTCGCCG |
| | | TCATCTGGTACGACGGGAGCAACAAGTACTACGCCGACAGCGTCAAGGGCAG |
| | | GTTCACCATCAGCCGCGACAATAGCAAGAACACCTTATATCTGCAGATGAAC |
| | | AGCCTCAGGGCCGAGGACACGGCCGTCTACTACTGTGCCAGGGACCCCCGGG |
| | | GCGCCACCCTGTACTACTACTACTACGGCATGGATGTGTGGGGCCAAGGCAC |
| | | CACCGTGACCGTCAGCAGCGCGTCCACCAAAGGGCCCAGCGTATTCCCCCTG |
| | | GCCCCTTCCAGCAAGTCCACCTCCGGCGGCACCGCCGCCCTGGGCTGCCTGG |
| | | TGAAGGACTACTTCCCCGAGCCCGTCACCGTATCTTGGAACAGTGGCGCCCT |
| | | GACCAGCGGCGTGCATACCTTTCCCGCCGTGCTGCAATCCAGCGGACTGTAC |
| | | AGCCTGTCCTCCGTGGTTACCGTGCCCAGCAGCTCCCTGGGCACGCAGACCT |
| | | ACATCTGTAACGTGAACCATAAGCCCTCCAATACCAAGGTGGACAAGCGTGT |
| | | GGAGCCCAAGAGCTGCGACAAGACCCACACCTGTCCGCCCTGCCCCGCCCCG |
| | | GAGCTGCTGGGCGGCCCCAGCGTGTTCCTGTTCCCACCCAAGCCCAAGGACA |
| | | CCCTGATGATCAGCCGGACCCCCGAGGTGACCTGCGTGGTGGTGGACGTGAG |
| | | CCACGAGGACCCCGAGGTGAAATTCAACTGGTACGTGGACGGCGTGGAGGTG |
| | | CACAACGCCAAGACCAAGCCGAGGGAGGAGCAGTACAATTCCACCTACAGGG |
| | | TGGTGAGCGTGCTCACCGTGCTGCATCAGGACTGGCTGAATGGGAAGGAATA |
| | | CAAATGCAAAGTGAGCAACAAGGCTCTGCCCGCCCCCATTGAGAAAACAATC |
| | | AGCAAAGCCAAAGGCCAGCCCAGGGAGCCCCAGGTGTACACCCTGCCGCCGA |
| | | GCCGGGAGGAGATGACCAAGAACCAGGTGAGCCTGACCTGCCTGGTGAAGGG |
| | | CTTTTATCCCTCTGACATAGCCGTGGAGTGGGAGAGCAACGGGCAGCCCGAG |
| | | AACAACTACAAGACGACCCCGCCTGTGCTGGACTCCGACGGGTCCTTTTTTC |
| | | TGTATAGCAAGCTCACGGTGGACAAGTCCAGGTGGCAGCAGGGCAACGTGTT |
| | | CAGCTGCAGCGTGATGCACGAGGCCCTGCATAACCACTATACCCAGAAAAGC |
| | | CTGAGCCTGAGCCCCGGCAAG |
| 406 | Treme_HC_IgG1- | ATGGAGACGCCCGCCCAATTACTCTTTCTCCTCCTCCTTTGGCTCCCCGATA |
| | CO19 | CCACCGGGCAGGTACAACTCGTAGAGTCCGGCGGCGGCGTCGTTCAGCCCGG |
| | | CCGGTCCCTTCGGCTCAGCTGCGCGGCCTCCGGCTTTACGTTCAGCAGCTAC |
| | | GGCATGCATTGGGTACGGCAGGCCCCCGGCAAGGGCCTCGAGTGGGTCGCCG |
| | | TCATCTGGTACGACGGCAGCAATAAGTACTACGCCGATTCCGTCAAGGGAAG |
| | | ATTTACCATCAGCCGGGACAACTCCAAGAACACCCTCTACCTCCAGATGAAC |
| | | TCCCTGCGGGCCGAGGACACCGCCGTGTACTACTGCGCCAGGGACCCCCGGG |
| | | GCGCCACCCTGTACTACTACTACTACGGGATGGACGTGTGGGGCCAGGGCAC |
| | | CACCGTGACCGTCAGCAGCGCGAGCACGAAAGGGCCCAGCGTGTTCCCGCTG |
| | | GCCCCGTCCAGCAAGTCCACCAGCGGCGGCACCGCCGCCCTGGGTTGCCTCG |
| | | TGAAGGACTACTTCCCTGAGCCGGTGACCGTGTCCTGGAACTCCGGCGCCCT |
| | | GACCAGCGGAGTGCACACCTTCCCCGCGGTGCTGCAGAGCAGCGGGCTGTAC |
| | | AGCCTAAGCTCCGTAGTGACGGTCCCCTCCAGCAGTCTGGGGACCCAGACCT |
| | | ACATATGCAACGTGAACCACAAACCCTCGAACACCAAGGTGGATAAGAGGGT |
| | | CGAGCCCAAATCCTGCGACAAAACCCATACGTGCCCGCCCTGCCCCGCGCCC |
| | | GAGCTGCTGGGTGGGCCATCGGTGTTCCTGTTCCCCCCGAAGCCCAAGGACA |
| | | CACTGATGATCAGCCGGACCCCCGAAGTGACCTGCGTGGTGGTGGACGTGAG |
| | | CCACGAGGACCCGGAGGTGAAGTTCAATTGGTACGTGGATGGCGTGGAGGTT |
| | | CATAATGCCAAGACCAAGCCGCGGGAAGAACAGTATAACTCCACCTACCGGG |
| | | TGGTGAGCGTGCTCACCGTCCTGCACCAGGACTGGCTGAATGGGAAGGAGTA |
| | | CAAGTGCAAAGTGTCCAATAAAGCCCTTCCCGCCCCCATCGAGAAGACGATC |
| | | AGCAAGGCCAAAGGACAGCCCCGGGAGCCTCAGGTGTACACGCTGCCCCCCA |
| | | GCAGGGAGGAGATGACCAAGAACCAGGTGAGCCTGACCTGTCTGGTGAAGGG |
| | | CTTCTACCCAAGCGATATCGCGGTGGAGTGGGAGTCCAACGGCCAGCCCGAG |
| | | AACAATTACAAGACCACCCCGCCCGTGCTGGATTCCGACGGGAGCTTCTTCC |
| | | TGTACAGCAAGCTGACCGTGGACAAGTCCCGGTGGCAGCAGGGAAATGTGTT |
| | | CAGCTGTAGCGTGATGCACGAAGCCCTGCACAACCATTACACCCAGAAAAGC |
| | | CTGAGCCTGAGCCCCGGCAAG |
| 407 | Treme_HC_IgG1- | ATGGAGACGCCCGCCCAGCTCCTCTTCCTCCTCCTCCTCTGGCTCCCGGACA |
| | CO20 | CAACCGGGCAGGTACAGCTCGTCGAGTCCGGCGGGGGTGTCGTCCAGCCCGG |
| | | GCGTTCCCTTAGGCTCAGCTGTGCGGCCTCCGGGTTCACCTTCAGCAGCTAC |
| | | GGCATGCACTGGGTAAGGCAGGCCCCCGGTAAGGGGCTCGAGTGGGTCGCGG |
| | | TCATCTGGTACGACGGGTCCAACAAGTACTACGCCGACTCCGTGAAGGGGAG |
| | | GTTCACCATCTCCCGAGACAACAGCAAGAATACCCTCTACCTGCAAATGAAT |
| | | TCCCTGCGGGCCGAGGATACCGCCGTCTACTATTGCGCCAGGGACCCCCGAG |
| | | GCGCCACGCTGTACTACTACTACTACGGGATGGACGTGTGGGGGCAGGGCAC |
| | | CACCGTGACCGTGAGCTCCGCCAGCACCAAGGGACCCTCCGTGTTCCCGCTC |
| | | GCGCCCAGCTCCAAAAGCACCAGCGGCGGTACAGCCGCGCTGGGATGCCTCG |
| | | TGAAGGACTACTTCCCCGAGCCCGTCACCGTGAGCTGGAATAGCGGAGCCCT |
| | | GACGAGCGGCGTGCACACCTTCCCCGCCGTCCTGCAGAGCAGCGGCCTGTAC |
| | | TCGCTCTCCTCGGTGGTGACCGTGCCCAGCAGCAGCCTGGGCACCCAGACCT |
| | | ATATCTGCAATGTGAACCACAAGCCCAGCAACACCAAGGTTGACAAGCGGGT |
| | | GGAGCCTAAGTCCTGCGACAAAACCCACACCTGCCCGCCCTGCCCCGCCCCC |
| | | GAGCTGCTCGGCGGGCCCAGCGTGTTCCTGTTCCCGCCCAAGCCCAAGGACA |
| | | CCCTGATGATCAGCCGCACCCCGGAGGTCACCTGTGTGGTGGTGGACGTGAG |
| | | CCATGAGGACCCCGAGGTGAAGTTCAACTGGTATGTGGACGGGGTGGAGGTG |
| | | CACAACGCCAAGACCAAACCGAGGGAGGAGCAGTACAACTCCACCTACAGGG |
| | | TGGTGTCCGTCCTGACCGTGCTGCACCAGGATTGGCTCAACGGGAAGGAGTA |
| | | CAAATGCAAGGTGAGCAACAAGGCCCTGCCCGCCCCCATCGAGAAGACCATC |
| | | AGCAAGGCCAAGGGACAGCCCAGGGAGCCCCAGGTGTATACCCTCCCTCCCA |
| | | GCCGTGAGGAAATGACCAAGAACCAGGTGAGCCTGACCTGTCTGGTCAAAGG |
| | | GTTCTACCCCAGCGACATCGCCGTCGAGTGGGAAAGCAACGGCCAGCCCGAG |
| | | AACAACTACAAGACCACGCCCCCCGTGCTGGACAGCGATGGCAGCTTTTTCC |
| | | TGTACAGCAAGCTGACGGTGGACAAGTCGAGGTGGCAACAGGGCAACGTGTT |
| | | CTCGTGCAGCGTGATGCACGAGGCCCTGCACAACCACTATACCCAGAAAAGC |
| | | CTCAGCCTGTCCCCCGGCAAG |
| 408 | Treme_HC_IgG1- | ATGGAAACCCCCGCCCAACTCCTCTTCCTCTTGCTCCTCTGGCTCCCCGATA |
| | CO21 | CGACCGGGCAGGTCCAGCTCGTCGAAAGCGGGGGAGGCGTGGTACAGCCCGG |
| | | GCGTAGCCTCAGGCTCAGCTGCGCCGCCTCCGGGTTCACCTTTTCATCTTAC |
| | | GGCATGCACTGGGTTCGGCAGGCCCCCGGCAAGGGCCTCGAGTGGGTCGCCG |
| | | TGATCTGGTACGACGGCTCGAACAAGTACTACGCGGACTCCGTCAAGGGCAG |
| | | GTTCACCATCAGCCGGGATAACTCCAAAAACACCTTATACCTGCAGATGAAC |
| | | TCCCTCCGGGCCGAGGACACCGCCGTGTACTATTGCGCGCGCGATCCCAGGG |
| | | GCGCGACCCTGTACTACTACTACTATGGCATGGACGTGTGGGGGCAAGGTAC |
| | | CACCGTCACCGTCAGCAGCGCCAGCACCAAAGGCCCCTCGGTGTTCCCCCTG |
| | | GCGCCCAGCAGCAAAAGCACCAGCGGGGGCACCGCGGCCCTGGGCTGCCTGG |
| | | TCAAAGACTACTTCCCCGAGCCCGTGACCGTGTCCTGGAACAGCGGGGCCCT |
| | | GACCAGCGGCGTGCACACCTTCCCGGCCGTGCTGCAGAGCAGCGGGCTGTAC |
| | | AGCCTGAGCTCCGTGGTGACGGTGCCCTCCAGCAGCCTGGGGACACAGACGT |
| | | ACATATGTAACGTGAACCATAAGCCCAGCAACACCAAAGTGGACAAACGCGT |
| | | GGAACCCAAAAGCTGCGACAAGACCCACACTTGTCCCCCCTGCCCCGCCCCC |
| | | GAGCTCCTGGGCGGGCCCAGCGTGTTCTTGTTCCCCCCGAAACCGAAGGACA |
| | | CCCTGATGATTTCCCGGACCCCCGAAGTGACCTGCGTAGTCGTGGACGTGAG |
| | | CCACGAGGACCCCGAGGTGAAGTTCAATTGGTACGTGGACGGCGTGGAGGTC |
| | | CACAACGCCAAGACCAAGCCCCGGGAGGAGCAGTACAACTCCACCTATAGGG |
| | | TCGTGAGCGTGCTGACCGTGCTGCACCAGGACTGGCTGAACGGCAAGGAGTA |
| | | TAAGTGCAAGGTGTCCAATAAGGCCCTCCCCGCCCCCATCGAGAAGACCATA |
| | | TCCAAGGCCAAGGGCCAGCCAAGGGAGCCGCAGGTGTACACCCTGCCGCCCT |
| | | CGAGGGAGGAGATGACCAAAAATCAGGTGAGCCTGACCTGCCTGGTCAAGGG |
| | | GTTCTACCCGAGCGACATCGCCGTGGAGTGGGAGAGCAACGGGCAGCCCGAG |
| | | AACAACTACAAGACCACCCCTCCCGTCCTGGACTCCGACGGCAGCTTCTTCC |
| | | TGTATTCCAAGCTGACCGTGGATAAGTCCAGGTGGCAGCAGGGCAACGTGTT |
| | | CAGCTGTAGCGTGATGCATGAGGCCCTGCATAACCATTACACCCAGAAATCC |
| | | CTGAGCCTGAGCCCGGGCAAA |
| 409 | Treme_HC_IgG1- | ATGGAGACGCCCGCCCAGCTCCTCTTCCTCCTCCTCTTATGGCTCCCCGACA |
| | CO22 | CCACCGGCCAGGTCCAGCTCGTCGAGAGCGGGGGCGGGGTAGTCCAGCCCGG |
| | | CAGGTCCCTCCGGCTTAGCTGTGCCGCCTCGGGGTTCACATTCAGCTCCTAC |
| | | GGCATGCACTGGGTACGACAGGCACCGGGGAAGGGACTCGAGTGGGTCGCCG |
| | | TTATCTGGTACGACGGCAGCAACAAGTACTACGCCGACAGCGTCAAAGGCAG |
| | | GTTCACCATCAGCAGGGACAACAGCAAGAACACCCTATACCTGCAGATGAAT |
| | | AGCCTGCGAGCCGAGGACACTGCCGTGTATTATTGCGCCAGGGATCCCCGGG |
| | | GAGCCACGCTCTATTATTACTACTACGGGATGGACGTGTGGGGCCAGGGGAC |
| | | CACCGTGACGGTGTCATCTGCCTCCACGAAGGGTCCGAGCGTGTTCCCGCTG |
| | | GCCCCCAGCTCCAAGAGCACGAGCGGCGGCACCGCCGCCCTGGGCTGCCTGG |
| | | TGAAGGATTACTTCCCCGAGCCCGTGACCGTGTCCTGGAATAGCGGCGCCCT |
| | | GACCAGCGGCGTGCATACCTTCCCCGCCGTCCTGCAGAGCAGCGGCCTGTAC |
| | | AGCCTGTCTTCCGTGGTCACCGTGCCCAGCAGCAGCCTCGGCACGCAGACCT |
| | | ATATCTGCAACGTGAACCACAAACCGAGCAACACGAAGGTGGACAAGCGTGT |
| | | GGAGCCCAAAAGCTGCGATAAGACCCACACGTGTCCCCCCTGCCCCGCCCCC |
| | | GAGCTGCTGGGCGGGCCCAGCGTGTTCCTGTTCCCCCCGAAGCCCAAGGACA |
| | | CCCTGATGATCTCCCGAACCCCCGAGGTGACCTGTGTAGTCGTCGATGTGAG |
| | | CCACGAGGACCCGGAGGTGAAATTTAACTGGTACGTGGACGGGGTGGAGGTG |
| | | CACAACGCGAAGACGAAGCCCCGAGAGGAGCAGTACAACAGCACCTACAGGG |
| | | TGGTGAGCGTCCTGACCGTGCTGCACCAGGACTGGCTGAACGGGAAAGAGTA |
| | | CAAGTGTAAAGTCAGCAACAAGGCCCTGCCCGCCCCCATCGAGAAGACCATC |
| | | TCCAAGGCCAAGGGCCAGCCCCGCGAGCCCCAAGTGTACACCCTGCCCCCCA |
| | | GCAGGGAGGAGATGACCAAGAACCAGGTGAGCCTGACGTGCCTGGTCAAGGG |
| | | CTTTTACCCCTCCGACATCGCGGTCGAGTGGGAGAGCAATGGCCAGCCCGAG |
| | | AACAACTACAAGACCACCCCGCCCGTGCTGGACTCCGACGGCAGCTTCTTCC |
| | | TGTACAGCAAGCTGACCGTGGACAAGTCGCGGTGGCAACAAGGCAACGTGTT |
| | | CTCCTGCTCGGTGATGCACGAGGCCCTGCACAACCACTACACCCAGAAAAGC |
| | | CTGAGCCTCAGCCCCGGTAAG |
| 410 | Treme_HC_IgG1- | ATGGAGACACCCGCGCAGTTGCTATTCCTCCTACTCCTCTGGCTCCCCGATA |
| | CO23 | CCACGGGCCAGGTCCAATTGGTAGAGTCCGGCGGCGGCGTAGTCCAGCCCGG |
| | | CCGGTCCCTCAGGCTTTCCTGCGCCGCCTCGGGCTTCACCTTCTCCAGCTAC |
| | | GGGATGCACTGGGTCCGGCAGGCCCCCGGGAAGGGCTTGGAGTGGGTCGCCG |
| | | TCATCTGGTACGACGGAAGCAACAAGTACTACGCCGACTCCGTCAAGGGTAG |
| | | GTTCACCATCAGCAGGGACAACTCGAAGAACACCTTGTATCTGCAGATGAAC |
| | | TCCCTTAGGGCCGAGGACACGGCCGTGTACTACTGCGCCCGGGACCCTCGAG |
| | | GAGCCACCCTGTACTACTATTACTACGGGATGGACGTGTGGGGGCAAGGGAC |
| | | GACCGTTACCGTGAGCTCCGCCAGCACGAAGGGGCCCAGCGTCTTCCCACTG |
| | | GCCCCTAGCAGCAAGAGCACCTCCGGCGGCACCGCCGCCCTGGGCTGCCTGG |
| | | TGAAGGATTACTTCCCGGAGCCCGTGACCGTGAGCTGGAACTCCGGCGCGCT |
| | | CACCAGCGGCGTCCACACCTTCCCCGCCGTGCTGCAGAGCAGCGGGCTGTAT |
| | | TCGCTGAGCTCGGTGGTCACCGTTCCCAGCTCAAGCCTGGGGACCCAGACGT |
| | | ATATCTGTAACGTGAACCACAAGCCCAGCAACACCAAGGTGGACAAAAGGGT |
| | | CGAGCCCAAGAGCTGCGACAAGACCCATACATGTCCCCCCTGCCCCGCGCCC |
| | | GAGCTGCTGGGGGGACCCAGCGTGTTCCTCTTTCCGCCCAAGCCCAAAGACA |
| | | CCCTCATGATCAGCCGAACCCCCGAGGTCACCTGCGTGGTAGTAGACGTGAG |
| | | TCACGAGGACCCGGAGGTGAAGTTCAATTGGTACGTGGACGGCGTGGAGGTG |
| | | CACAACGCCAAGACCAAACCCCGTGAGGAGCAGTACAATAGCACCTACAGGG |
| | | TCGTGAGCGTGCTCACCGTGCTCCACCAGGACTGGCTGAACGGCAAGGAGTA |
| | | CAAATGCAAGGTGTCGAACAAGGCGCTCCCCGCCCCCATCGAAAAGACTATC |
| | | TCCAAGGCTAAGGGCCAGCCCAGAGAGCCCCAGGTGTACACCCTGCCCCCGT |
| | | CCCGGGAGGAAATGACCAAGAACCAGGTCAGCCTCACCTGCCTGGTGAAGGG |
| | | CTTTTACCCCAGCGACATCGCAGTGGAGTGGGAGAGCAACGGTCAGCCCGAA |
| | | AATAACTATAAGACCACCCCGCCCGTCCTGGACAGCGACGGAAGCTTCTTCC |
| | | TGTACAGCAAGCTCACCGTGGACAAGTCCCGGTGGCAGCAGGGCAACGTATT |
| | | TAGCTGCTCCGTGATGCACGAAGCCCTGCACAACCACTACACCCAGAAAAGC |
| | | CTGTCCCTCAGCCCCGGCAAG |
| 411 | Treme_HC_IgG1- | ATGGAGACGCCCGCCCAGCTCCTCTTCCTCCTCCTCCTATGGCTACCCGACA |
| | CO24 | CAACCGGGCAGGTCCAGCTCGTCGAATCCGGCGGCGGGGTAGTCCAGCCAGG |
| | | TCGCTCCCTCAGGTTGTCCTGCGCCGCCTCCGGCTTTACGTTCAGCAGCTAC |
| | | GGCATGCACTGGGTCCGACAGGCCCCCGGCAAGGGGCTCGAGTGGGTCGCCG |
| | | TAATCTGGTACGACGGCAGCAACAAGTACTACGCCGACAGCGTCAAGGGAAG |
| | | GTTCACCATCAGCAGGGACAATAGCAAGAACACCCTATACCTCCAGATGAAC |
| | | AGCCTGAGGGCGGAGGACACCGCCGTGTACTACTGCGCCCGGGACCCCAGGG |
| | | GAGCCACCCTGTATTATTACTACTATGGGATGGACGTGTGGGGCCAAGGCAC |
| | | CACCGTGACCGTGTCCTCCGCGAGCACCAAGGGGCCCAGCGTGTTCCCCCTC |
| | | GCGCCCTCCAGCAAGAGCACCAGCGGGGGGACCGCCGCCCTGGGGTGCCTGG |
| | | TGAAGGACTACTTCCCCGAGCCCGTGACCGTCTCCTGGAACAGCGGCGCCCT |
| | | GACGTCCGGCGTGCACACCTTCCCCGCCGTCCTGCAGAGCAGCGGCCTGTAC |
| | | TCCCTGTCATCGGTCGTGACCGTGCCGTCCTCCTCCCTCGGCACCCAGACCT |
| | | ACATCTGTAACGTGAACCACAAGCCCTCCAACACAAAGGTGGACAAACGGGT |
| | | AGAGCCGAAGTCCTGTGACAAGACCCACACCTGCCCTCCCTGCCCCGCTCCC |
| | | GAGCTGCTCGGCGGGCCCAGCGTCTTCCTCTTCCCTCCCAAGCCCAAGGACA |
| | | CGCTAATGATCTCCCGCACCCCCGAGGTGACCTGCGTGGTGGTGGACGTGAG |
| | | CCACGAGGACCCGGAGGTGAAGTTCAACTGGTACGTGGACGGCGTGGAGGTG |
| | | CACAACGCCAAGACCAAACCCAGGGAGGAGCAGTATAATAGCACCTATAGGG |
| | | TGGTGTCCGTGCTAACGGTGCTGCACCAGGACTGGCTCAACGGGAAGGAGTA |
| | | CAAGTGCAAGGTCAGCAACAAGGCGCTGCCGGCCCCGATCGAGAAGACCATC |
| | | TCGAAGGCCAAGGGGCAGCCTAGGGAGCCCCAGGTCTACACGCTGCCCCCCA |
| | | GCAGGGAGGAAATGACCAAGAACCAGGTGTCCCTGACGTGCCTGGTGAAGGG |
| | | TTTCTACCCCAGCGACATCGCCGTGGAGTGGGAGAGCAACGGCCAGCCCGAG |
| | | AACAACTATAAGACCACCCCGCCCGTGCTGGACAGCGACGGGAGCTTCTTCC |
| | | TCTATAGCAAGCTGACCGTGGACAAGAGCCGCTGGCAGCAGGGCAACGTGTT |
| | | CTCCTGCTCCGTGATGCACGAGGCCCTGCACAACCACTACACGCAGAAATCC |
| | | CTGTCCCTGAGCCCGGGCAAG |
| 412 | Treme_HC_IgG1- | ATGGAGACACCCGCCCAGCTCCTTTTCCTCCTCCTCCTCTGGCTCCCCGACA |
| | CO25 | CCACCGGGCAGGTACAACTCGTCGAGTCCGGCGGCGGGGTCGTACAGCCCGG |
| | | CCGGTCCCTCCGGCTCTCCTGCGCCGCCAGCGGCTTCACCTTCTCAAGCTAC |
| | | GGGATGCATTGGGTCAGACAGGCCCCCGGTAAGGGGCTCGAGTGGGTTGCGG |
| | | TCATCTGGTACGACGGCAGCAACAAGTACTACGCCGACAGCGTCAAAGGCCG |
| | | GTTCACGATCAGCCGCGACAACAGCAAGAACACCCTCTACCTGCAAATGAAT |
| | | TCCCTTAGGGCCGAGGATACGGCCGTCTATTACTGCGCCCGCGACCCGAGGG |
| | | GCGCCACCCTGTATTATTACTACTACGGCATGGACGTGTGGGGCCAGGGCAC |
| | | CACGGTGACCGTCTCCAGCGCCTCCACCAAGGGTCCCTCGGTGTTCCCCCTG |
| | | GCGCCCAGCTCGAAGTCCACCAGCGGCGGGACCGCGGCCCTGGGATGTCTGG |
| | | TCAAGGACTACTTCCCAGAGCCCGTGACCGTGTCCTGGAACTCAGGGGCCCT |
| | | GACTTCCGGGGTGCACACCTTCCCGGCCGTGCTGCAAAGCTCGGGGCTGTAC |
| | | AGCCTGAGCTCCGTGGTGACCGTCCCCAGCAGCAGCCTGGGCACCCAGACCT |
| | | ACATCTGCAACGTGAACCACAAGCCCAGCAATACCAAGGTGGACAAGAGGGT |
| | | GGAGCCCAAGTCCTGCGATAAGACGCATACCTGCCCGCCCTGTCCTGCCCCC |
| | | GAACTGCTGGGAGGGCCCAGCGTGTTCCTCTTCCCACCCAAGCCCAAGGACA |
| | | CCCTGATGATCTCCCGCACGCCCGAGGTGACCTGCGTGGTGGTGGACGTGAG |
| | | CCACGAAGACCCCGAGGTGAAGTTCAACTGGTACGTCGATGGTGTGGAGGTA |
| | | CACAATGCAAAGACGAAGCCCAGGGAGGAGCAGTACAATAGCACCTACAGGG |
| | | TGGTGAGCGTGCTGACGGTCCTGCATCAGGACTGGCTGAACGGCAAGGAGTA |
| | | CAAGTGCAAGGTCAGCAACAAGGCCCTGCCGGCCCCCATCGAGAAGACCATC |
| | | AGCAAGGCCAAGGGCCAGCCGAGGGAGCCCCAGGTGTACACCCTGCCCCCCT |
| | | CCAGGGAAGAGATGACCAAGAACCAGGTGTCCCTGACCTGCCTGGTGAAGGG |
| | | GTTCTACCCCTCAGACATAGCTGTGGAGTGGGAGTCTAATGGGCAGCCCGAG |
| | | AACAATTACAAGACCACCCCGCCCGTGCTGGACTCCGACGGCAGCTTCTTCC |
| | | TCTACTCCAAACTGACGGTGGATAAGAGCCGATGGCAGCAGGGCAACGTGTT |
| | | TTCCTGCTCCGTGATGCACGAGGCCCTGCACAACCACTACACCCAGAAGTCC |
| | | CTCAGCCTGTCCCCCGGCAAG |
| 413 | IPI_LC | METPAQLLFLLLLWLPDTTGEIVLTQSPGTLSLSPGERATLSCRASQSVGSS |
| | (ipilimumab light | YLAWYQQKPGQAPRLLIYGAFSRATGIPDRFSGSGSGTDFTLTISRLEPEDF |
| | chain) | AVYYCQQYGSSPWTFGQGTKVEIKRTVAAPSVFIFPPSDEQLKSGTASVVCL |
| | | LNNFYPREAKVQWKVDNALQSGNSQESVTEQDSKDSTYSLSSTLTLSKADYE |
| | | KHKVYACEVTHQGLSSPVTKSFNRGEC |
| 414 | IPI_LC (signal | METPAQLLFLLLLWLPDTTG |
| | peptide) | |
| 415 | IPI_LC (variable | EIVLTQSPGTLSLSPGERATLSCRASQSVGSSYLAWYQQKPGQAPRLLIYGA |
| | region, VL) | FSRATGIPDRFSGSGSGTDFTLTISRLEPEDFAVYYCQQYGSSPWTFGQGTK |
| | | VEIK |
| 416 | IPI_LC (constant | RTVAAPSVFIFPPSDEQLKSGTASVVCLLNNFYPREAKVQWKVDNALQSGNS |
| | region, CL) | QESVTEQDSKDSTYSLSSTLTLSKADYEKHKVYACEVTHQGLSSPVTKSFNR |
| | | GEC |
| 417 | IPI_LC-CO01 | ATGGAGACTCCCGCCCAGCTCCTCTTCCTACTCCTCCTCTGGCTCCCCGACA |
| | | CGACCGGCGAGATCGTCCTCACCCAGTCCCCCGGCACCCTCAGCCTCAGCCC |
| | | CGGCGAGAGGGCCACCCTCTCGTGCAGGGCCAGCCAATCCGTAGGCAGCAGC |
| | | TACCTAGCCTGGTACCAGCAGAAGCCGGGCCAAGCCCCAAGGCTCCTCATCT |
| | | ACGGGGCCTTTAGCAGGGCCACCGGGATCCCCGACAGGTTCAGCGGGAGCGG |
| | | GAGCGGGACGGACTTCACCCTCACCATCTCCCGCCTCGAGCCCGAGGACTTC |
| | | GCTGTCTACTACTGCCAGCAATACGGCAGCTCCCCCTGGACATTCGGCCAGG |
| | | GGACCAAGGTGGAGATCAAGAGGACCGTGGCGGCCCCCTCCGTGTTCATCTT |
| | | CCCGCCCTCAGACGAGCAGCTGAAAAGCGGCACCGCCTCCGTGGTGTGCCTC |
| | | CTCAACAACTTTTACCCCCGCGAGGCCAAGGTGCAGTGGAAGGTGGACAACG |
| | | CCCTGCAGAGCGGTAACTCGCAGGAGAGCGTGACCGAGCAGGACAGTAAGGA |
| | | CAGCACCTACAGCCTGTCCAGCACCCTCACCCTCAGCAAGGCCGACTACGAG |
| | | AAGCACAAGGTGTACGCCTGCGAGGTGACCCACCAGGGGCTGAGCAGCCCCG |
| | | TGACCAAGAGCTTCAACAGGGGGGAGTGT |
| 418 | IPI_LC-CO02 | ATGGAAACCCCCGCTCAGCTCCTCTTCTTACTCCTCCTCTGGTTGCCCGACA |
| | | CCACGGGCGAGATCGTTCTCACCCAGTCCCCCGGGACCCTTAGCCTCAGCCC |
| | | GGGGGAGAGGGCCACCCTCAGCTGCCGGGCCAGCCAGAGCGTTGGCAGCAGC |
| | | TACCTCGCCTGGTACCAGCAGAAGCCCGGCCAGGCCCCGAGGCTCCTCATAT |
| | | ACGGGGCCTTCTCCAGGGCGACCGGGATCCCCGACAGGTTCAGCGGCTCGGG |
| | | CTCCGGGACCGACTTCACCCTCACCATCTCGAGACTCGAGCCGGAGGACTTC |
| | | GCCGTGTACTATTGCCAGCAGTATGGCTCCTCCCCCTGGACCTTTGGACAGG |
| | | GCACCAAGGTGGAGATCAAGAGGACCGTGGCCGCACCCAGCGTGTTCATCTT |
| | | TCCACCGAGCGACGAGCAGCTGAAGTCCGGCACCGCCAGCGTGGTGTGCCTA |
| | | CTCAACAACTTCTACCCCAGGGAAGCCAAGGTGCAGTGGAAAGTGGACAACG |
| | | CCCTGCAGAGCGGGAACTCCCAGGAGTCCGTGACCGAACAGGACTCCAAGGA |
| | | CAGCACGTACAGCCTCAGCAGCACCCTCACCCTGAGCAAGGCCGACTACGAA |
| | | AAACACAAGGTCTACGCCTGCGAGGTGACCCACCAGGGGCTGTCCTCCCCCG |
| | | TCACCAAAAGCTTTAACAGGGGCGAGTGC |
| 419 | IPI_LC-CO03 | ATGGAGACGCCCGCCCAGCTCCTCTTCCTCCTCCTCCTCTGGCTCCCCGACA |
| | | CCACCGGAGAGATAGTCCTCACGCAAAGCCCCGGCACTCTCTCCTTGAGCCC |
| | | CGGCGAGAGGGCCACCCTCTCCTGCCGGGCCAGCCAGAGCGTCGGTAGCAGC |
| | | TATTTGGCCTGGTACCAACAGAAGCCCGGCCAGGCGCCCCGCCTCTTGATCT |
| | | ACGGGGCCTTCAGCCGGGCGACGGGCATCCCGGACAGGTTTTCCGGGAGCGG |
| | | CAGCGGCACCGACTTCACCCTCACAATCAGCCGACTAGAACCAGAGGATTTT |
| | | GCCGTCTATTATTGCCAGCAGTACGGCTCGAGCCCCTGGACCTTCGGACAGG |
| | | GCACGAAGGTGGAAATCAAGCGTACCGTCGCCGCCCCCTCCGTGTTCATCTT |
| | | CCCGCCCAGCGACGAGCAACTCAAGAGCGGCACGGCCAGCGTGGTGTGCCTG |
| | | CTTAACAACTTCTATCCGCGGGAAGCCAAGGTGCAGTGGAAAGTTGATAACG |
| | | CCCTGCAATCCGGCAATAGCCAGGAGAGCGTCACCGAGCAGGACTCCAAGGA |
| | | CAGCACGTATAGCCTGAGCTCGACCCTGACCCTGAGCAAGGCTGACTACGAG |
| | | AAGCACAAGGTGTACGCCTGTGAGGTGACGCATCAGGGGCTGAGCTCGCCCG |
| | | TGACGAAGTCCTTCAACAGGGGCGAGTGC |
| 420 | IPI_LC-CO04 | ATGGAGACTCCGGCCCAACTCCTCTTCCTACTCCTCCTCTGGCTTCCCGACA |
| | | CCACCGGCGAGATAGTCCTCACCCAGAGCCCCGGCACACTCAGCCTCTCCCC |
| | | CGGCGAGAGGGCCACCCTCTCTTGTCGGGCCTCCCAGAGCGTCGGCTCGAGC |
| | | TACCTCGCCTGGTACCAGCAAAAGCCGGGCCAGGCGCCGAGGCTACTCATCT |
| | | ACGGCGCCTTCAGCCGCGCCACCGGCATCCCCGACCGGTTTAGCGGCAGCGG |
| | | CAGCGGCACCGACTTCACCCTCACCATAAGCAGGCTCGAGCCGGAGGACTTC |
| | | GCCGTGTACTACTGCCAGCAGTACGGCAGCAGCCCCTGGACCTTCGGCCAGG |
| | | GCACCAAGGTGGAGATCAAGCGCACCGTGGCCGCCCCCAGCGTGTTCATCTT |
| | | CCCACCCAGCGATGAGCAGCTCAAGAGCGGGACCGCCAGCGTCGTGTGTCTG |
| | | CTCAACAACTTCTATCCCCGGGAAGCCAAGGTGCAGTGGAAGGTGGACAACG |
| | | CCCTGCAGTCCGGGAATAGCCAGGAGTCCGTGACCGAGCAGGATAGCAAGGA |
| | | CTCCACGTACAGCCTCTCGAGCACCCTGACCCTCTCGAAGGCCGATTACGAA |
| | | AAGCATAAGGTCTACGCCTGTGAGGTGACCCACCAGGGGCTCTCCAGCCCCG |
| | | TGACGAAAAGCTTCAATAGGGGGGAGTGC |
| 421 | IPI_LC-CO05 | ATGGAAACCCCGGCCCAGCTCCTCTTCCTCCTCCTCCTCTGGTTGCCCGACA |
| | | CCACCGGAGAGATCGTTCTCACGCAGAGCCCCGGGACCCTATCGCTCTCGCC |
| | | CGGGGAGAGGGCCACCTTGTCCTGCCGGGCCAGCCAAAGCGTCGGCTCCAGC |
| | | TACCTCGCCTGGTATCAGCAGAAGCCCGGCCAGGCCCCGAGGTTGCTTATCT |
| | | ACGGGGCCTTCAGCCGGGCCACAGGCATACCCGACCGGTTCAGCGGGTCCGG |
| | | CAGCGGCACCGACTTCACCCTCACCATATCGAGGCTCGAGCCCGAGGACTTC |
| | | GCCGTGTATTACTGCCAGCAGTACGGCAGCTCGCCCTGGACCTTCGGCCAGG |
| | | GCACTAAAGTGGAGATCAAGAGGACGGTGGCCGCCCCCTCCGTGTTCATCTT |
| | | CCCGCCCAGCGATGAGCAGCTGAAAAGCGGCACCGCTAGCGTGGTGTGCCTC |
| | | CTCAACAACTTCTACCCCAGGGAGGCAAAGGTGCAATGGAAGGTGGATAACG |
| | | CCCTGCAATCCGGCAACAGCCAGGAGTCCGTGACCGAACAGGATAGCAAGGA |
| | | TTCGACGTACAGTCTGAGCAGCACCCTGACCCTGTCCAAGGCCGACTACGAG |
| | | AAGCACAAGGTGTACGCCTGCGAGGTGACCCACCAGGGCCTGTCGTCGCCCG |
| | | TGACCAAGAGCTTCAACCGGGGCGAGTGC |
| 422 | IPI_LC-CO06 | ATGGAGACGCCCGCCCAGCTCCTCTTCCTCCTCCTCCTCTGGTTGCCCGACA |
| | | CCACCGGCGAGATCGTCCTCACCCAATCCCCCGGGACCCTCTCCCTCTCCCC |
| | | AGGCGAGAGGGCCACGCTTTCCTGCAGGGCCTCGCAGAGCGTCGGCAGCTCC |
| | | TACCTCGCCTGGTATCAGCAGAAGCCCGGCCAGGCCCCGCGGCTATTGATCT |
| | | ACGGGGCCTTTAGCCGGGCCACCGGCATCCCCGACAGGTTCAGCGGCTCCGG |
| | | GAGCGGCACCGACTTCACGCTCACGATCAGCAGGCTCGAGCCGGAGGATTTC |
| | | GCCGTGTACTACTGCCAGCAGTACGGGAGCAGCCCGTGGACCTTCGGGCAAG |
| | | GCACGAAGGTCGAGATAAAGAGGACCGTGGCCGCCCCCAGCGTGTTCATCTT |
| | | CCCGCCCAGCGACGAGCAGCTGAAAAGCGGCACTGCCAGCGTGGTGTGTCTG |
| | | CTGAACAACTTCTACCCCCGGGAGGCCAAGGTCCAGTGGAAGGTGGATAACG |
| | | CCCTGCAGTCCGGCAACAGCCAGGAGAGCGTGACCGAGCAGGACTCCAAGGA |
| | | CTCCACCTACAGCCTGTCCAGCACCCTCACCCTCAGCAAGGCCGACTATGAG |
| | | AAGCATAAGGTCTACGCCTGCGAGGTGACCCACCAGGGCCTGAGCAGCCCAG |
| | | TGACCAAGTCCTTTAACCGCGGGGAGTGC |
| 423 | IPI_LC-CO07 | ATGGAGACTCCCGCCCAGCTCCTCTTCTTGCTACTCCTCTGGCTCCCGGACA |
| | | CCACCGGCGAGATCGTTCTAACGCAAAGCCCCGGCACCCTCAGCCTTAGCCC |
| | | GGGCGAGAGGGCCACCCTCTCCTGTAGGGCCAGCCAGTCCGTAGGGAGCTCC |
| | | TACCTCGCCTGGTACCAACAGAAGCCCGGCCAGGCCCCCAGGTTGCTTATTT |
| | | ACGGGGCCTTCAGCCGCGCCACCGGCATACCCGATAGGTTCAGCGGTAGCGG |
| | | CAGCGGGACCGATTTCACGCTCACCATCAGCAGGCTCGAGCCCGAGGACTTT |
| | | GCCGTGTATTACTGTCAACAGTACGGCAGCAGCCCCTGGACGTTCGGCCAGG |
| | | GCACCAAGGTGGAGATCAAGCGGACCGTGGCCGCCCCCAGCGTGTTCATCTT |
| | | TCCCCCCTCTGACGAGCAGCTGAAAAGCGGCACGGCCAGCGTGGTGTGCCTG |
| | | CTGAACAATTTCTACCCCAGGGAGGCCAAGGTCCAGTGGAAAGTCGATAACG |
| | | CCCTGCAGTCCGGCAACAGCCAGGAGAGCGTCACCGAGCAGGATAGCAAGGA |
| | | CAGCACCTACAGCCTCAGCAGCACCCTGACCCTGAGCAAGGCCGACTACGAG |
| | | AAGCACAAGGTATACGCCTGCGAGGTGACGCACCAGGGGCTCAGCAGCCCCG |
| | | TGACCAAGAGCTTCAACCGGGGCGAGTGC |
| 424 | IPI_LC-CO08 | ATGGAGACACCCGCCCAGCTTTTATTCCTTCTCCTCCTATGGCTCCCCGACA |
| | | CCACCGGGGAGATCGTACTCACCCAGTCCCCGGGCACCCTCAGCCTCAGCCC |
| | | CGGCGAGAGGGCCACACTCTCCTGTCGGGCCTCTCAGAGCGTCGGAAGCTCC |
| | | TACCTGGCCTGGTACCAGCAAAAGCCCGGCCAGGCGCCCCGACTTCTCATCT |
| | | ACGGGGCTTTCTCCAGGGCCACGGGCATCCCCGACAGGTTTTCCGGCAGCGG |
| | | CAGCGGCACCGACTTCACGCTCACCATCTCGAGGCTAGAGCCCGAGGATTTC |
| | | GCCGTGTACTACTGCCAGCAGTACGGCAGCAGCCCGTGGACCTTCGGGCAGG |
| | | GCACCAAGGTGGAGATCAAGCGCACCGTGGCGGCCCCGAGCGTCTTCATCTT |
| | | CCCACCCAGCGACGAGCAGCTGAAAAGCGGGACCGCCAGCGTGGTGTGTCTG |
| | | CTCAACAATTTTTACCCCCGGGAGGCCAAGGTGCAGTGGAAGGTGGACAACG |
| | | CCCTGCAGAGCGGGAACTCGCAGGAGTCGGTCACCGAGCAGGACAGCAAGGA |
| | | CTCCACGTATTCCCTGTCCTCGACCCTGACCCTGTCAAAGGCCGACTATGAG |
| | | AAGCACAAGGTCTACGCCTGCGAGGTGACTCACCAGGGGCTGAGCAGCCCCG |
| | | TTACCAAATCCTTTAACAGGGGGGAGTGC |
| 425 | IPI_LC-CO09 | ATGGAAACCCCCGCCCAGCTACTCTTCCTCCTCCTCCTCTGGCTTCCGGATA |
| | | CAACCGGCGAGATCGTCCTCACCCAGTCCCCCGGGACCCTCAGCCTCTCCCC |
| | | CGGGGAAAGGGCGACCCTCAGCTGTCGGGCCAGCCAAAGCGTCGGGAGCAGC |
| | | TACCTCGCCTGGTACCAGCAGAAGCCCGGACAGGCCCCCCGCCTCCTCATTT |
| | | ACGGGGCGTTCAGCCGGGCCACCGGCATCCCCGACCGCTTCTCCGGGAGCGG |
| | | CAGCGGAACGGACTTCACGCTCACGATCAGCAGGCTCGAGCCGGAGGACTTT |
| | | GCCGTCTATTACTGTCAGCAATACGGTAGCTCCCCCTGGACCTTCGGCCAGG |
| | | GGACCAAGGTGGAAATCAAGCGGACCGTGGCCGCCCCGAGCGTGTTCATCTT |
| | | CCCGCCCAGCGACGAGCAGCTGAAAAGCGGTACCGCCTCCGTGGTGTGCCTG |
| | | CTGAACAACTTCTACCCAAGGGAGGCCAAGGTGCAGTGGAAGGTGGACAACG |
| | | CCCTCCAGAGCGGGAACTCTCAGGAGAGCGTCACCGAGCAGGATTCGAAGGA |
| | | CAGCACCTACAGCCTGTCCTCGACCCTGACCCTGTCGAAGGCCGACTACGAG |
| | | AAGCATAAAGTCTATGCCTGCGAAGTGACCCACCAGGGCCTCAGCAGCCCCG |
| | | TGACGAAGTCCTTCAACAGGGGGGAGTGC |
| 426 | IPI_LC-CO10 | ATGGAGACTCCCGCCCAGCTCCTCTTCCTCCTCCTCTTGTGGCTCCCGGACA |
| | | CCACCGGCGAAATAGTCCTCACCCAGAGCCCCGGCACCCTCAGCCTCTCCCC |
| | | AGGGGAACGGGCCACGCTAAGCTGCAGGGCCTCCCAGTCCGTCGGGAGCAGC |
| | | TATCTCGCGTGGTACCAGCAGAAGCCGGGGCAGGCCCCCCGGCTCCTCATAT |
| | | ACGGGGCCTTCAGTAGGGCCACGGGCATACCCGACAGGTTCAGCGGGTCCGG |
| | | CTCGGGCACGGACTTCACCCTGACCATTAGCCGGTTGGAGCCCGAGGACTTC |
| | | GCCGTATATTACTGCCAGCAGTACGGCTCCAGCCCCTGGACCTTCGGCCAGG |
| | | GGACCAAGGTGGAGATAAAGAGGACCGTCGCCGCCCCCAGCGTTTTCATCTT |
| | | CCCGCCCTCCGACGAGCAGCTGAAGTCCGGGACCGCCTCCGTGGTGTGCCTG |
| | | CTCAACAACTTCTACCCCAGGGAGGCCAAGGTCCAGTGGAAGGTAGACAACG |
| | | CCCTCCAGTCCGGGAACAGCCAGGAGAGCGTGACAGAACAGGACAGCAAGGA |
| | | CTCCACCTATTCCCTGTCTAGCACCCTGACCCTGAGCAAGGCCGATTACGAG |
| | | AAGCACAAGGTGTACGCCTGCGAAGTGACCCACCAGGGCCTCAGCTCCCCCG |
| | | TGACCAAGAGCTTCAACCGGGGCGAGTGC |
| 427 | IPI_LC-CO11 | ATGGAGACTCCCGCCCAGCTCCTCTTCCTCCTCCTCCTCTGGCTACCCGACA |
| | | CCACCGGCGAGATCGTCCTCACGCAGTCCCCCGGCACCCTCAGCTTGAGCCC |
| | | CGGGGAGCGGGCCACCCTCTCTTGCAGGGCCAGCCAGAGCGTCGGCTCCTCC |
| | | TACCTCGCCTGGTATCAGCAGAAACCAGGCCAGGCCCCCCGTCTCCTTATCT |
| | | ACGGCGCCTTCAGCCGCGCTACCGGAATCCCCGACCGGTTCAGCGGCAGCGG |
| | | TTCCGGCACAGATTTCACGCTCACCATTTCCAGGCTCGAGCCCGAGGACTTC |
| | | GCCGTGTACTACTGCCAGCAGTACGGCAGCTCGCCCTGGACCTTCGGACAGG |
| | | GGACCAAGGTGGAAATCAAGAGGACCGTGGCGGCCCCCTCCGTGTTTATCTT |
| | | CCCGCCCTCGGACGAGCAGCTAAAGAGCGGCACCGCCTCCGTGGTGTGCCTG |
| | | CTCAACAACTTCTATCCCCGGGAGGCCAAGGTGCAGTGGAAGGTGGACAACG |
| | | CCCTCCAGAGCGGAAACTCGCAGGAGAGCGTCACCGAGCAGGACTCCAAGGA |
| | | CTCGACTTACAGCCTGAGCTCCACCCTGACCCTCAGCAAGGCCGATTACGAG |
| | | AAGCACAAGGTCTACGCCTGCGAGGTGACCCACCAGGGACTGAGCTCCCCCG |
| | | TGACCAAGAGCTTCAACCGGGGGGAGTGC |
| 428 | IPI_LC-CO12 | ATGGAGACGCCCGCCCAGCTACTCTTCCTCCTCCTCCTCTGGCTCCCCGACA |
| | | CCACCGGGGAGATAGTCTTGACCCAGTCCCCCGGCACGCTTTCCCTCTCCCC |
| | | CGGGGAGAGGGCGACCCTCAGCTGTAGGGCCAGCCAGAGCGTTGGCAGCAGC |
| | | TACCTCGCCTGGTATCAGCAGAAGCCGGGCCAGGCCCCGAGGCTCCTCATCT |
| | | ACGGAGCTTTCTCCAGGGCCACCGGAATCCCCGACCGGTTCTCCGGCAGCGG |
| | | CAGCGGGACCGACTTCACCTTGACCATCTCCAGGCTCGAGCCCGAGGACTTC |
| | | GCCGTGTACTACTGTCAGCAGTACGGCTCATCGCCCTGGACCTTCGGGCAGG |
| | | GCACCAAGGTGGAAATCAAGAGGACGGTGGCCGCCCCTAGCGTGTTCATCTT |
| | | TCCCCCCAGCGACGAGCAGCTGAAAAGCGGCACCGCCTCCGTGGTCTGCCTG |
| | | CTCAATAATTTCTACCCGCGTGAGGCCAAGGTGCAATGGAAAGTCGACAACG |
| | | CCCTCCAGAGCGGCAACAGCCAGGAGAGCGTGACAGAGCAGGACAGCAAGGA |
| | | CTCCACCTACAGCCTGTCCTCCACTCTGACCCTGTCGAAGGCCGACTACGAA |
| | | AAGCACAAAGTCTACGCCTGCGAGGTCACGCACCAGGGGCTGAGTAGCCCCG |
| | | TGACCAAATCCTTCAACAGGGGCGAGTGC |
| 429 | IPI_LC-CO13 | ATGGAGACTCCCGCCCAGCTCCTCTTTCTCCTCCTCCTCTGGCTACCCGACA |
| | | CCACCGGCGAGATCGTCCTCACCCAGAGCCCCGGCACTCTCAGCCTCAGCCC |
| | | CGGGGAGCGGGCCACCTTATCGTGCAGGGCCTCCCAATCCGTGGGAAGCAGC |
| | | TACCTCGCGTGGTACCAGCAGAAGCCCGGCCAGGCCCCGCGGCTTCTCATCT |
| | | ACGGAGCCTTTAGCAGGGCCACCGGCATCCCGGACAGGTTCTCAGGCAGCGG |
| | | CAGCGGCACCGATTTTACCCTCACCATCAGCCGACTAGAACCGGAGGACTTC |
| | | GCCGTGTACTACTGCCAGCAGTACGGCAGCTCACCCTGGACCTTCGGCCAGG |
| | | GCACGAAGGTGGAAATCAAGCGCACCGTGGCCGCGCCCAGCGTGTTCATCTT |
| | | CCCTCCCAGTGACGAACAGCTGAAGTCCGGGACCGCCTCGGTGGTCTGCCTG |
| | | CTGAACAACTTTTATCCCAGGGAGGCCAAAGTGCAGTGGAAGGTGGATAACG |
| | | CGCTGCAAAGCGGCAACAGCCAGGAGAGCGTCACCGAGCAGGACAGCAAGGA |
| | | CAGCACCTACTCGCTGTCCTCGACCCTGACGCTGAGCAAGGCCGACTACGAG |
| | | AAGCACAAGGTGTACGCCTGTGAGGTCACGCATCAGGGCCTCAGCAGCCCCG |
| | | TGACCAAGAGCTTCAACCGGGGCGAGTGC |
| 430 | IPI_LC-CO14 | ATGGAGACGCCCGCACAGCTCCTCTTCCTCCTTCTCCTCTGGCTCCCCGACA |
| | | CCACCGGCGAGATCGTCTTAACCCAGAGCCCCGGCACCCTCAGCCTTAGCCC |
| | | CGGGGAGCGCGCCACCCTCTCCTGCCGCGCCAGCCAAAGCGTCGGCTCGTCC |
| | | TATCTCGCCTGGTATCAACAGAAGCCCGGTCAGGCCCCCAGGCTCCTCATCT |
| | | ACGGCGCCTTCAGCAGGGCCACCGGCATCCCGGACCGGTTCTCCGGCTCCGG |
| | | CAGCGGCACCGACTTCACCTTGACGATCAGCAGGCTCGAGCCGGAGGACTTC |
| | | GCCGTGTACTACTGCCAGCAGTATGGCAGCAGCCCCTGGACCTTCGGCCAGG |
| | | GGACCAAGGTCGAGATCAAGAGGACCGTGGCGGCCCCCAGCGTGTTCATCTT |
| | | CCCTCCCAGCGATGAGCAGCTCAAGAGCGGGACCGCCAGCGTGGTGTGCCTG |
| | | CTGAACAATTTTTACCCCCGGGAGGCCAAGGTGCAGTGGAAAGTAGACAACG |
| | | CCCTGCAGTCCGGGAACTCCCAGGAGTCGGTGACTGAGCAAGACAGCAAGGA |
| | | CAGCACCTACAGCCTGTCCAGCACGCTCACCTTGTCCAAGGCGGACTATGAG |
| | | AAGCACAAGGTGTACGCCTGTGAGGTGACCCATCAGGGCCTCTCCTCTCCCG |
| | | TGACCAAGTCCTTCAATAGGGGGGAGTGT |
| 431 | IPI_LC-CO15 | ATGGAGACGCCCGCCCAGCTACTCTTCCTACTACTCCTCTGGCTCCCCGACA |
| | | CCACCGGCGAGATCGTACTCACGCAGTCGCCGGGGACCCTCAGCCTCAGCCC |
| | | CGGCGAGAGGGCCACCCTCTCCTGCAGGGCATCCCAGAGCGTCGGCTCCAGC |
| | | TACCTCGCCTGGTACCAGCAGAAGCCCGGCCAGGCCCCCAGGCTCCTCATCT |
| | | ACGGGGCGTTCAGCAGGGCCACCGGCATACCCGATAGGTTCTCCGGCTCCGG |
| | | CTCCGGGACCGACTTCACCCTCACAATCAGCCGTCTCGAGCCCGAGGACTTC |
| | | GCGGTGTACTACTGCCAGCAGTATGGGAGCTCCCCCTGGACGTTCGGCCAGG |
| | | GGACGAAGGTCGAGATCAAGCGGACCGTCGCGGCTCCCAGCGTGTTTATCTT |
| | | CCCGCCCAGCGACGAGCAACTGAAAAGCGGCACCGCCAGCGTGGTGTGCCTG |
| | | CTGAACAACTTCTACCCCCGCGAGGCCAAGGTCCAGTGGAAGGTGGATAACG |
| | | CCCTGCAGAGCGGGAACAGCCAGGAGAGCGTGACCGAGCAAGACAGCAAAGA |
| | | CAGCACATACTCCCTGAGCAGCACCCTGACACTGAGCAAGGCCGACTATGAG |
| | | AAGCACAAGGTGTACGCCTGTGAGGTGACGCACCAGGGCCTGAGCTCCCCCG |
| | | TGACCAAGAGCTTCAACAGGGGCGAGTGC |
| 432 | IPI_LC-CO16 | ATGGAGACGCCCGCCCAGCTCCTCTTTCTTCTCCTCTTGTGGCTCCCCGACA |
| | | CCACCGGGGAGATCGTACTCACGCAGTCGCCCGGCACACTCAGCCTCAGCCC |
| | | AGGCGAGAGGGCCACCCTCTCCTGCAGGGCCAGCCAGTCCGTCGGCAGCAGC |
| | | TACCTCGCCTGGTATCAACAGAAACCCGGGCAGGCCCCCCGGCTCCTCATAT |
| | | ACGGGGCCTTCTCCAGGGCCACCGGGATCCCCGATCGTTTCTCCGGCAGCGG |
| | | ATCGGGCACCGACTTCACGCTCACGATCTCCAGGCTCGAGCCAGAGGACTTC |
| | | GCCGTGTACTACTGCCAGCAGTACGGCAGCAGCCCCTGGACCTTCGGTCAGG |
| | | GCACCAAGGTGGAGATCAAGCGCACAGTGGCCGCCCCCTCCGTGTTCATCTT |
| | | TCCGCCCAGCGATGAGCAGCTGAAGTCCGGGACGGCCAGCGTGGTGTGCCTG |
| | | CTCAACAACTTCTACCCACGGGAGGCCAAGGTGCAATGGAAGGTGGACAACG |
| | | CCCTGCAGAGCGGCAACAGCCAGGAATCCGTGACGGAGCAGGACTCCAAAGA |
| | | CAGCACCTATTCCCTGAGCAGCACCCTGACGCTCTCCAAAGCCGACTATGAG |
| | | AAGCACAAGGTGTACGCCTGTGAAGTCACCCACCAGGGGCTGTCGAGCCCGG |
| | | TGACCAAGAGCTTCAACCGGGGCGAATGC |
| 433 | IPI_LC-CO17 | ATGGAGACACCCGCCCAGCTCCTCTTCCTCTTGCTGCTCTGGCTACCCGACA |
| | | CCACCGGGGAGATCGTCCTCACCCAATCGCCCGGCACGCTCAGCCTCTCCCC |
| | | CGGCGAGCGGGCCACCTTGAGCTGCCGGGCCAGCCAGAGCGTCGGATCCTCG |
| | | TACCTTGCCTGGTACCAGCAGAAGCCCGGCCAGGCCCCCCGGTTGCTCATCT |
| | | ACGGGGCGTTCAGCAGGGCCACCGGCATCCCCGACAGGTTCAGCGGCAGCGG |
| | | CTCCGGGACCGACTTCACCCTCACCATCAGCCGTCTCGAGCCTGAGGACTTC |
| | | GCCGTGTACTACTGCCAGCAGTACGGGTCCTCCCCCTGGACCTTCGGCCAGG |
| | | GCACGAAGGTGGAGATCAAGCGGACCGTCGCCGCCCCCAGCGTGTTCATATT |
| | | CCCCCCGAGCGATGAACAGCTGAAGTCCGGGACCGCTAGCGTGGTGTGCCTG |
| | | CTGAATAACTTCTACCCCCGCGAGGCCAAGGTCCAGTGGAAGGTGGACAACG |
| | | CCCTGCAGAGCGGCAACAGCCAGGAGAGCGTGACCGAACAGGATAGCAAGGA |
| | | CAGCACCTACAGCCTGAGCAGCACACTGACCCTGTCCAAGGCGGACTACGAG |
| | | AAGCACAAGGTGTACGCCTGCGAGGTGACCCATCAGGGTCTGTCCAGCCCCG |
| | | TGACCAAAAGCTTCAATCGAGGCGAATGC |
| 434 | IPI_LC-CO18 | ATGGAGACGCCGGCGCAGCTTCTCTTCCTCCTTCTACTCTGGCTCCCAGACA |
| | | CCACAGGCGAGATCGTCCTCACCCAGAGCCCGGGAACCCTCAGCCTTTCCCC |
| | | AGGAGAGCGGGCGACCCTCAGCTGCAGGGCCAGCCAGAGCGTCGGCAGCAGC |
| | | TACCTCGCCTGGTACCAACAGAAGCCGGGCCAGGCGCCCAGGCTCCTCATCT |
| | | ACGGGGCCTTTTCCCGGGCCACCGGCATCCCCGATCGCTTCAGCGGCTCGGG |
| | | GAGCGGGACCGACTTCACCCTCACCATCAGCAGGCTTGAACCCGAGGACTTC |
| | | GCGGTGTACTATTGCCAGCAGTATGGGAGCAGCCCCTGGACCTTCGGCCAGG |
| | | GCACCAAAGTCGAGATCAAGAGAACCGTGGCCGCCCCCTCCGTGTTTATCTT |
| | | CCCGCCCTCGGACGAGCAGCTGAAGAGTGGCACCGCGAGCGTGGTCTGCCTC |
| | | CTGAACAACTTCTACCCGCGGGAGGCCAAGGTACAGTGGAAGGTGGACAATG |
| | | CGCTCCAATCCGGGAACTCCCAGGAGAGCGTGACCGAGCAGGACAGCAAGGA |
| | | TAGCACCTACAGCCTGAGCAGCACCCTGACCCTGAGCAAGGCCGACTACGAG |
| | | AAGCACAAAGTGTACGCGTGCGAGGTGACCCACCAGGGGCTCTCCAGCCCCG |
| | | TGACCAAGTCCTTTAACAGGGGGGAGTGC |
| 435 | IPI_LC-CO19 | ATGGAGACGCCCGCCCAGCTCCTTTTCCTCCTCCTCCTCTGGTTGCCCGACA |
| | | CCACCGGCGAAATCGTGCTCACGCAGAGCCCCGGCACGCTCAGCCTCAGCCC |
| | | CGGGGAGAGGGCCACGCTTAGCTGCCGCGCCAGCCAGAGCGTCGGCAGCAGC |
| | | TACTTAGCCTGGTACCAGCAGAAGCCCGGGCAGGCCCCCCGCCTTCTAATCT |
| | | ACGGCGCCTTTTCCCGCGCCACCGGCATCCCCGACAGGTTCAGCGGCAGCGG |
| | | CTCCGGCACCGACTTCACCTTGACGATCAGCAGGCTCGAGCCCGAGGATTTC |
| | | GCCGTGTACTACTGCCAGCAATACGGCAGCAGCCCCTGGACCTTCGGCCAGG |
| | | GGACCAAGGTGGAGATAAAGAGGACCGTGGCCGCCCCCAGCGTGTTCATCTT |
| | | CCCGCCCAGCGACGAACAGCTGAAAAGCGGCACGGCCTCGGTGGTGTGCCTC |
| | | CTGAACAACTTCTACCCCCGCGAGGCCAAGGTGCAGTGGAAGGTGGACAATG |
| | | CCCTGCAGAGCGGCAATTCGCAGGAGAGCGTGACCGAGCAGGACAGCAAGGA |
| | | TAGCACCTACAGCCTGTCAAGCACACTGACCCTCTCCAAAGCGGACTACGAG |
| | | AAGCACAAGGTGTACGCCTGCGAGGTGACCCACCAGGGCCTCAGCTCGCCCG |
| | | TGACCAAGAGCTTCAACCGCGGCGAGTGT |
| 436 | IPI_LC-CO20 | ATGGAGACTCCCGCCCAACTCCTCTTCCTCCTCCTCTTATGGCTCCCGGACA |
| | | CCACGGGCGAGATCGTCCTTACACAGAGCCCCGGGACCCTCAGCCTCAGCCC |
| | | CGGCGAGAGGGCCACGCTCAGCTGCAGGGCCTCCCAGTCCGTCGGGTCCAGC |
| | | TACCTGGCCTGGTACCAGCAGAAGCCCGGCCAAGCGCCCCGGCTTCTCATCT |
| | | ACGGAGCTTTCAGCCGGGCGACCGGCATACCGGACCGGTTCAGCGGGTCCGG |
| | | CTCGGGCACCGACTTCACCCTCACCATCAGCAGGCTCGAGCCCGAGGACTTC |
| | | GCCGTCTACTACTGCCAGCAGTACGGGTCCTCCCCCTGGACCTTCGGGCAGG |
| | | GCACCAAGGTGGAGATCAAGAGGACCGTCGCCGCCCCCAGCGTCTTCATCTT |
| | | TCCCCCCAGCGACGAGCAGCTGAAAAGCGGCACCGCCAGCGTGGTGTGCTTA |
| | | CTGAACAATTTCTATCCGAGGGAGGCCAAGGTGCAGTGGAAGGTGGACAACG |
| | | CCCTGCAGTCCGGGAACAGCCAGGAGTCAGTAACGGAACAGGACAGCAAGGA |
| | | CAGCACCTACAGCCTGAGCAGCACGCTGACGCTGTCGAAGGCCGACTACGAG |
| | | AAGCACAAGGTGTACGCCTGCGAGGTGACCCACCAGGGCCTGTCCAGCCCCG |
| | | TGACGAAGTCCTTCAATCGAGGAGAGTGC |
| 437 | IPI_LC-CO21 | ATGGAGACGCCGGCCCAGCTCCTATTCCTCCTCCTCCTCTGGCTCCCGGATA |
| | | CTACCGGCGAGATCGTCCTCACCCAGAGCCCCGGCACCTTGAGCTTGAGCCC |
| | | CGGCGAGAGGGCCACCCTCAGCTGCAGGGCAAGCCAGAGCGTCGGCAGCAGC |
| | | TACCTCGCCTGGTACCAGCAAAAGCCCGGGCAGGCCCCTCGTCTCCTAATCT |
| | | ACGGGGCCTTTAGCAGGGCCACCGGGATCCCAGATCGGTTCTCGGGCTCCGG |
| | | GAGCGGCACCGACTTCACCCTCACCATCAGCCGGCTCGAGCCCGAGGACTTC |
| | | GCCGTGTACTACTGCCAGCAGTATGGCAGCAGCCCCTGGACCTTCGGGCAGG |
| | | GCACGAAGGTAGAGATCAAACGGACCGTGGCCGCCCCCTCCGTGTTCATCTT |
| | | CCCGCCCAGCGATGAGCAGCTGAAAAGCGGCACGGCCTCCGTGGTGTGCCTG |
| | | CTTAATAACTTTTACCCGAGGGAGGCAAAGGTACAGTGGAAGGTGGACAACG |
| | | CTCTGCAGTCCGGCAACAGCCAGGAGAGCGTCACCGAGCAGGATAGCAAGGA |
| | | TAGCACCTACTCACTGTCCAGCACGCTGACCCTGAGCAAGGCCGACTACGAG |
| | | AAACACAAGGTGTACGCGTGTGAAGTGACCCACCAGGGGCTGAGCAGCCCTG |
| | | TAACCAAGAGCTTCAACCGGGGCGAATGC |
| 438 | IPI_LC-CO22 | ATGGAGACTCCGGCCCAGCTCCTCTTCCTCCTCCTCCTCTGGCTCCCCGACA |
| | | CCACGGGCGAGATCGTCCTTACCCAGTCCCCCGGAACCCTCAGCCTCAGCCC |
| | | GGGGGAGAGGGCGACCCTCAGCTGCAGAGCCAGCCAGAGCGTAGGTAGCAGC |
| | | TACCTCGCCTGGTACCAGCAGAAGCCCGGGCAGGCCCCCCGCCTCTTGATAT |
| | | ACGGGGCCTTTTCGCGGGCCACGGGGATACCCGACCGCTTCTCCGGATCCGG |
| | | CAGCGGCACCGACTTCACGCTCACGATCTCGAGACTCGAGCCGGAGGACTTC |
| | | GCGGTGTACTACTGCCAGCAGTACGGCAGCAGCCCCTGGACCTTTGGCCAAG |
| | | GCACCAAGGTGGAAATCAAGCGGACCGTGGCGGCCCCCAGCGTCTTTATCTT |
| | | CCCCCCGAGCGATGAGCAGCTGAAAAGCGGGACCGCCAGCGTGGTGTGCCTG |
| | | CTGAATAACTTCTATCCCCGGGAGGCCAAAGTGCAGTGGAAAGTGGACAACG |
| | | CGCTGCAATCCGGGAACTCCCAGGAGTCTGTGACCGAACAGGACAGCAAGGA |
| | | CAGCACCTATAGCCTGTCCTCCACCTTAACGCTCAGCAAGGCCGACTACGAG |
| | | AAACACAAGGTCTACGCCTGCGAGGTGACGCACCAAGGCCTGTCCAGCCCCG |
| | | TGACCAAGAGCTTTAACAGGGGGGAGTGT |
| 439 | IPI_LC-CO23 | ATGGAGACACCGGCCCAGCTACTATTCCTCCTCCTCCTCTGGCTCCCCGACA |
| | | CCACCGGCGAGATCGTCCTCACCCAGAGCCCCGGGACTTTATCCTTGTCCCC |
| | | CGGCGAGCGCGCCACGCTCAGCTGCAGGGCCAGCCAGAGCGTCGGTTCGAGC |
| | | TACCTCGCCTGGTACCAACAGAAGCCCGGCCAGGCCCCCAGGCTCCTAATCT |
| | | ACGGGGCCTTTTCCAGGGCCACCGGCATCCCGGACAGGTTCAGCGGCAGCGG |
| | | ATCCGGGACCGACTTTACCCTCACGATCTCGCGGCTTGAGCCCGAGGACTTC |
| | | GCCGTGTACTACTGTCAGCAGTACGGCTCGAGTCCCTGGACCTTCGGCCAGG |
| | | GGACCAAGGTGGAGATCAAGAGGACCGTGGCCGCCCCCAGCGTCTTCATCTT |
| | | CCCGCCCAGCGACGAGCAACTGAAAAGCGGGACCGCGAGCGTCGTCTGCCTG |
| | | CTGAACAACTTCTATCCCCGGGAAGCCAAGGTGCAGTGGAAGGTGGACAACG |
| | | CGCTGCAAAGCGGGAACTCTCAGGAGTCCGTGACCGAGCAGGACAGCAAGGA |
| | | CAGCACCTACTCCCTGAGCTCGACGCTGACCCTGAGCAAGGCCGACTACGAG |
| | | AAACATAAGGTGTACGCCTGCGAGGTGACCCACCAAGGGCTGAGCTCGCCGG |
| | | TGACCAAGAGCTTCAATAGGGGCGAGTGT |
| 440 | IPI_LC-CO24 | ATGGAAACCCCCGCCCAGCTCCTCTTTCTCCTCCTCCTCTGGCTCCCCGACA |
| | | CCACCGGGGAGATCGTCCTCACCCAGTCCCCCGGCACCCTCAGCCTCAGCCC |
| | | GGGCGAGCGGGCCACCTTATCCTGCAGGGCCAGCCAGAGCGTCGGCTCCAGC |
| | | TATCTCGCCTGGTACCAGCAGAAGCCGGGCCAGGCCCCGCGTCTCCTCATCT |
| | | ACGGGGCCTTCTCGAGGGCCACCGGGATTCCCGACAGGTTCAGCGGCTCGGG |
| | | AAGCGGGACCGATTTCACCCTAACCATCAGCAGGTTAGAGCCCGAGGACTTC |
| | | GCGGTGTACTACTGCCAGCAGTACGGCAGCTCCCCCTGGACCTTCGGACAGG |
| | | GCACCAAAGTGGAGATCAAACGCACCGTGGCCGCCCCGTCCGTGTTCATCTT |
| | | CCCGCCCTCCGACGAGCAGCTGAAATCTGGCACCGCCAGCGTGGTGTGCCTG |
| | | CTAAATAACTTCTACCCCCGGGAGGCCAAGGTGCAGTGGAAGGTGGACAATG |
| | | CCCTGCAGAGCGGGAACAGCCAGGAGAGCGTGACGGAGCAGGACAGCAAGGA |
| | | CAGCACCTACAGCCTGTCCAGCACCCTGACCCTGTCCAAAGCCGATTACGAG |
| | | AAGCACAAGGTGTACGCCTGCGAGGTCACCCACCAAGGCCTGAGCAGCCCCG |
| | | TGACCAAGAGCTTCAACAGGGGCGAATGC |
| 441 | IPI_LC-CO25 | ATGGAGACTCCCGCGCAGCTCCTCTTCCTCCTCCTTCTCTGGCTTCCAGACA |
| | | CCACGGGCGAGATCGTCCTCACCCAGAGCCCGGGCACCCTCAGCCTCTCCCC |
| | | CGGCGAGAGGGCAACCCTAAGCTGCCGCGCGAGCCAGAGCGTAGGCAGCTCC |
| | | TACCTCGCCTGGTACCAGCAGAAACCGGGGCAAGCCCCGCGGCTCCTCATCT |
| | | ACGGGGCTTTCTCCAGAGCCACCGGCATCCCCGACCGCTTCAGCGGCAGCGG |
| | | CAGCGGGACAGACTTTACCCTCACCATCAGCAGGCTCGAACCCGAGGACTTC |
| | | GCCGTGTACTATTGCCAGCAGTACGGCTCCAGCCCCTGGACCTTTGGCCAGG |
| | | GCACCAAGGTGGAGATCAAGAGGACCGTGGCCGCCCCCAGCGTGTTCATCTT |
| | | CCCGCCCAGCGACGAACAGCTGAAAAGCGGGACCGCCAGCGTCGTGTGCCTG |
| | | CTGAATAACTTCTACCCCAGGGAGGCCAAGGTGCAGTGGAAGGTGGACAACG |
| | | CCCTCCAAAGCGGCAACAGCCAAGAGAGCGTCACCGAACAGGACTCCAAGGA |
| | | CTCGACCTACTCCCTGTCCAGCACCCTGACCCTCAGCAAGGCGGACTACGAG |
| | | AAGCACAAGGTGTACGCCTGCGAGGTCACCCACCAGGGCCTGAGCTCGCCCG |
| | | TGACCAAGAGCTTCAACAGGGGTGAGTGC |
| 442 | IPI_HC | METPAQLLFLLLLWLPDTTGQVQLVESGGGVVQPGRSLRLSCAASGFTFSSY |
| | (ipilimumab heavy | TMHWVRQAPGKGLEWVTFISYDGNNKYYADSVKGRFTISRDNSKNTLYLQMN |
| | chain) | SLRAEDTAIYYCARTGWLGPFDYWGQGTLVTVSSASTKGPSVFPLAPSSKST |
| | | SGGTAALGCLVKDYFPEPVTVSWNSGALTSGVHTFPAVLQSSGLYSLSSVVT |
| | | VPSSSLGTQTYICNVNHKPSNTKVDKRVEPKSCDKTHTCPPCPAPELLGGPS |
| | | VFLFPPKPKDTLMISRTPEVTCVVVDVSHEDPEVKFNWYVDGVEVHNAKTKP |
| | | REEQYNSTYRVVSVLTVLHQDWLNGKEYKCKVSNKALPAPIEKTISKAKGQP |
| | | REPQVYTLPPSREEMTKNQVSLTCLVKGFYPSDIAVEWESNGQPENNYKTTP |
| | | PVLDSDGSFFLYSKLTVDKSRWQQGNVFSCSVMHEALHNHYTQKSLSLSPGK |
| 443 | IPI_HC (signal | METPAQLLFLLLLWLPDTTG |
| | peptide) | |
| 444 | IPI_HC (variable | QVQLVESGGGVVQPGRSLRLSCAASGFTFSSYTMHWVRQAPGKGLEWVTFIS |
| | region, VH) | YDGNNKYYADSVKGRFTISRDNSKNTLYLQMNSLRAEDTAIYYCARTGWLGP |
| | | FDYWGQGTLVTVSS |
| 445 | IPI_HC (constant | ASTKGPSVFPLAPSSKSTSGGTAALGCLVKDYFPEPVTVSWNSGALTSGVHT |
| | region) | FPAVLQSSGLYSLSSVVTVPSSSLGTQTYICNVNHKPSNTKVDKRVEPKSCD |
| | | KTHTCPPCPAPELLGGPSVFLFPPKPKDTLMISRTPEVTCVVVDVSHEDPEV |
| | | KFNWYVDGVEVHNAKTKPREEQYNSTYRVVSVLTVLHQDWLNGKEYKCKVSN |
| | | KALPAPIEKTISKAKGQPREPQVYTLPPSREEMTKNQVSLTCLVKGFYPSDI |
| | | AVEWESNGQPENNYKTTPPVLDSDGSFFLYSKLTVDKSRWQQGNVFSCSVMH |
| | | EALHNHYTQKSLSLSPGK |
| 446 | IPI_HC-CO01 | ATGGAGACGCCGGCCCAGCTTCTCTTCCTACTTCTCCTCTGGCTCCCCGACA |
| | | CCACCGGCCAGGTCCAGCTCGTCGAGTCCGGCGGCGGGGTAGTCCAGCCCGG |
| | | GCGGTCACTTAGGCTCTCCTGTGCCGCAAGCGGCTTCACCTTCAGCTCCTAC |
| | | ACCATGCACTGGGTCCGGCAGGCGCCCGGGAAGGGCCTGGAGTGGGTCACCT |
| | | TTATCAGCTACGACGGGAACAACAAGTACTACGCGGATAGCGTCAAGGGGCG |
| | | CTTCACCATTAGCCGGGACAACAGCAAGAACACCCTCTACCTGCAGATGAAC |
| | | AGCCTGAGGGCCGAAGACACCGCGATATACTACTGCGCTAGGACCGGGTGGC |
| | | TGGGCCCCTTCGACTACTGGGGGCAGGGCACCCTGGTGACCGTCTCCAGCGC |
| | | CTCCACGAAGGGCCCCTCCGTGTTCCCCCTGGCCCCCTCCAGCAAGAGCACC |
| | | TCCGGCGGCACCGCCGCCCTGGGGTGTCTCGTCAAGGACTATTTTCCCGAGC |
| | | CCGTGACGGTCAGCTGGAACAGCGGGGCGCTCACCAGCGGCGTGCATACCTT |
| | | CCCCGCCGTGCTGCAGAGCAGCGGCCTGTACTCCCTGTCCAGCGTGGTGACC |
| | | GTCCCCTCGAGCAGCCTGGGCACGCAGACCTACATCTGCAACGTCAACCACA |
| | | AGCCCAGCAACACCAAAGTGGATAAGCGGGTGGAGCCCAAGAGCTGTGACAA |
| | | GACCCACACCTGCCCCCCGTGTCCCGCCCCCGAACTGCTCGGCGGGCCGAGC |
| | | GTGTTCCTGTTCCCTCCCAAGCCCAAGGACACCCTGATGATATCCCGGACGC |
| | | CCGAGGTCACCTGCGTGGTGGTGGACGTGAGCCACGAGGATCCTGAGGTCAA |
| | | GTTTAACTGGTACGTGGACGGCGTCGAGGTGCACAATGCCAAGACCAAGCCA |
| | | CGCGAGGAGCAATACAACAGCACCTACAGGGTGGTCAGCGTGCTGACCGTCC |
| | | TGCACCAGGACTGGCTGAACGGGAAGGAATACAAGTGCAAGGTGTCCAACAA |
| | | GGCCCTGCCCGCCCCGATTGAGAAGACCATCAGCAAGGCCAAGGGCCAGCCC |
| | | AGGGAACCCCAGGTGTATACCCTGCCCCCCAGCCGCGAGGAGATGACGAAGA |
| | | ACCAGGTAAGCCTCACCTGCCTCGTGAAGGGGTTCTACCCCTCCGATATCGC |
| | | CGTGGAGTGGGAGAGCAACGGCCAGCCCGAGAATAACTACAAGACTACCCCG |
| | | CCCGTGCTGGACTCCGACGGGTCCTTTTTCCTGTACTCCAAGCTGACCGTAG |
| | | ACAAGAGCCGGTGGCAGCAGGGCAACGTCTTCAGCTGCAGCGTGATGCACGA |
| | | GGCCCTGCATAACCACTATACCCAGAAAAGCCTGAGCCTGAGCCCCGGCAAG |
| 447 | IPI_HC-CO02 | ATGGAGACACCCGCCCAGCTCCTTTTCCTCCTCCTCCTCTGGCTCCCGGACA |
| | | CCACCGGCCAGGTCCAGCTCGTCGAGAGCGGCGGGGGAGTGGTCCAGCCGGG |
| | | CCGGAGCCTTCGGTTGTCCTGCGCCGCCAGCGGCTTCACGTTCTCCAGCTAC |
| | | ACCATGCACTGGGTCCGACAGGCCCCCGGCAAGGGCCTTGAGTGGGTCACCT |
| | | TCATCAGCTACGACGGCAATAATAAGTACTACGCCGACAGCGTCAAGGGGCG |
| | | GTTTACCATCAGCCGGGATAACAGCAAAAACACCCTCTACCTGCAGATGAAC |
| | | AGCCTGAGGGCCGAGGACACCGCCATCTACTACTGTGCCCGAACGGGGTGGC |
| | | TGGGCCCCTTCGATTACTGGGGCCAGGGGACGCTGGTGACTGTCAGCTCCGC |
| | | AAGCACCAAGGGCCCCAGCGTGTTCCCCCTGGCCCCCAGTTCAAAGTCCACC |
| | | AGCGGCGGCACCGCCGCGCTGGGGTGCCTGGTGAAGGACTACTTTCCGGAGC |
| | | CCGTGACCGTGAGCTGGAACAGCGGCGCCCTGACCAGCGGGGTCCACACCTT |
| | | CCCGGCCGTGCTGCAGAGCAGCGGCCTGTACAGCCTAAGCAGCGTGGTCACC |
| | | GTGCCCTCCAGCTCCCTCGGCACCCAGACCTACATCTGCAACGTCAACCACA |
| | | AGCCCTCAAACACCAAGGTGGACAAGCGGGTGGAGCCAAAGTCCTGCGACAA |
| | | AACCCACACATGCCCTCCCTGCCCCGCCCCTGAGCTGCTGGGCGGCCCCAGC |
| | | GTCTTCCTGTTCCCTCCCAAGCCCAAGGACACCCTGATGATCAGCCGGACCC |
| | | CCGAGGTGACCTGCGTGGTGGTGGACGTGAGCCACGAGGACCCGGAGGTCAA |
| | | GTTCAACTGGTACGTGGACGGCGTGGAGGTGCACAACGCCAAGACCAAGCCC |
| | | AGAGAGGAGCAGTACAACAGCACCTACAGGGTGGTGTCCGTCCTGACCGTGC |
| | | TGCACCAGGACTGGCTGAACGGCAAGGAGTACAAATGCAAGGTGTCGAATAA |
| | | GGCCCTCCCCGCCCCTATCGAAAAGACCATCTCCAAGGCCAAGGGCCAGCCC |
| | | AGGGAGCCCCAGGTGTACACCCTGCCCCCCAGCAGGGAGGAGATGACCAAGA |
| | | ACCAGGTGAGCCTGACCTGCCTGGTGAAGGGCTTCTACCCCTCCGACATCGC |
| | | CGTGGAATGGGAATCCAACGGCCAGCCCGAGAACAACTACAAGACCACACCC |
| | | CCCGTCCTGGACAGCGACGGCAGCTTCTTCCTGTATAGCAAGCTGACCGTCG |
| | | ACAAGAGCAGGTGGCAGCAGGGGAACGTGTTCAGCTGCTCCGTGATGCACGA |
| | | GGCCCTGCACAATCACTACACCCAGAAAAGCCTGAGCCTCAGCCCGGGCAAG |
| 448 | IPI_HC-CO03 | ATGGAGACGCCCGCCCAGTTGCTTTTCCTCCTCCTCCTCTGGCTTCCGGACA |
| | | CCACGGGCCAGGTCCAGTTGGTCGAAAGCGGCGGCGGCGTCGTCCAGCCCGG |
| | | GCGGTCCCTTCGACTCTCCTGCGCCGCCTCCGGCTTCACCTTCAGCTCCTAT |
| | | ACGATGCATTGGGTACGGCAGGCCCCAGGCAAGGGCCTCGAGTGGGTCACCT |
| | | TCATCTCATACGACGGCAACAACAAATACTACGCCGACAGCGTCAAGGGGCG |
| | | CTTCACCATCTCGCGGGACAACAGCAAAAACACCCTATACCTGCAGATGAAC |
| | | TCCCTGCGGGCCGAGGACACCGCCATCTATTACTGCGCCCGTACCGGATGGC |
| | | TGGGACCGTTCGACTACTGGGGCCAGGGGACGCTGGTGACCGTCAGCTCCGC |
| | | CAGCACCAAGGGGCCCAGCGTGTTCCCCCTGGCCCCCAGCTCCAAGAGCACC |
| | | AGCGGGGGCACCGCGGCCCTCGGTTGCCTGGTGAAGGATTACTTCCCCGAGC |
| | | CGGTGACCGTCAGCTGGAACTCCGGCGCCCTCACCAGCGGCGTGCACACCTT |
| | | TCCCGCCGTGCTGCAGAGCAGCGGCCTGTACAGCCTGAGCAGCGTGGTGACA |
| | | GTGCCCAGCAGCAGCCTGGGCACGCAGACCTACATTTGTAACGTGAACCACA |
| | | AACCCAGCAACACTAAGGTGGACAAGCGAGTGGAGCCCAAAAGCTGCGACAA |
| | | GACCCACACCTGCCCGCCCTGCCCGGCGCCCGAGCTGCTGGGGGGTCCCAGC |
| | | GTGTTCCTGTTCCCTCCCAAGCCCAAGGACACCCTGATGATCAGCAGGACGC |
| | | CGGAGGTGACCTGCGTGGTGGTGGATGTCAGCCACGAGGACCCCGAGGTCAA |
| | | GTTCAACTGGTATGTGGACGGGGTGGAGGTCCATAACGCGAAGACCAAGCCC |
| | | AGGGAGGAGCAATACAATAGCACCTACAGGGTGGTCAGCGTGCTGACCGTGC |
| | | TGCACCAGGACTGGCTGAACGGCAAAGAGTACAAGTGCAAGGTGTCGAACAA |
| | | AGCCCTGCCCGCGCCCATCGAGAAGACCATCTCCAAGGCCAAAGGGCAGCCC |
| | | AGGGAACCCCAAGTGTACACCCTCCCGCCCTCCAGGGAGGAAATGACCAAGA |
| | | ACCAGGTCAGCCTGACCTGTCTGGTGAAGGGGTTCTACCCCTCCGACATAGC |
| | | CGTGGAGTGGGAATCCAACGGGCAGCCCGAAAACAACTACAAGACCACCCCG |
| | | CCCGTGCTGGATTCCGATGGCAGCTTCTTCCTCTACTCGAAGCTCACCGTCG |
| | | ACAAGTCCCGGTGGCAGCAGGGCAATGTGTTCAGCTGCAGCGTGATGCACGA |
| | | GGCCCTGCACAACCACTACACACAGAAAAGCCTCAGCCTGTCCCCCGGCAAG |
| 449 | IPI_HC-CO04 | ATGGAGACTCCCGCCCAGCTCCTATTCCTCCTCCTCCTCTGGCTCCCCGACA |
| | | CCACCGGGCAGGTCCAGCTCGTAGAGAGCGGAGGCGGGGTCGTTCAGCCCGG |
| | | CCGGAGCCTCCGGCTCAGCTGCGCCGCCTCCGGGTTTACCTTCTCCTCCTAC |
| | | ACCATGCATTGGGTCCGGCAGGCCCCCGGCAAGGGCCTAGAGTGGGTCACAT |
| | | TCATCAGCTACGACGGCAACAACAAGTATTACGCGGATAGCGTAAAGGGGAG |
| | | GTTCACCATCAGCAGGGATAATAGCAAGAACACCCTCTACCTGCAGATGAAT |
| | | AGTCTGCGAGCCGAGGACACGGCCATCTACTACTGCGCCAGGACTGGCTGGC |
| | | TGGGCCCGTTCGACTACTGGGGCCAGGGCACCCTCGTGACCGTGTCCAGCGC |
| | | CAGCACGAAGGGTCCCTCCGTGTTCCCCCTGGCCCCCTCCAGCAAGTCGACC |
| | | AGCGGGGGCACCGCCGCCCTGGGGTGCCTGGTGAAGGACTACTTCCCCGAGC |
| | | CCGTGACCGTGAGCTGGAACAGTGGCGCGCTGACCAGCGGCGTGCACACCTT |
| | | CCCCGCCGTGCTGCAGAGCAGCGGCCTGTACTCCCTGTCCAGTGTGGTGACC |
| | | GTGCCCAGCAGCAGCCTGGGCACCCAGACCTATATCTGCAACGTGAACCACA |
| | | AGCCCTCCAACACCAAGGTGGATAAGAGGGTGGAGCCCAAGTCCTGCGATAA |
| | | GACCCATACGTGCCCGCCCTGCCCCGCCCCCGAACTGCTGGGGGGCCCCAGC |
| | | GTCTTCCTGTTTCCCCCCAAACCCAAGGACACCCTGATGATCAGCAGGACCC |
| | | CCGAGGTGACCTGCGTGGTGGTGGACGTGAGCCACGAGGACCCCGAGGTAAA |
| | | GTTTAACTGGTACGTGGACGGGGTGGAGGTCCACAACGCCAAGACGAAGCCA |
| | | AGGGAGGAGCAGTACAACAGCACGTACCGGGTCGTGAGCGTCCTGACCGTCC |
| | | TCCATCAAGACTGGCTCAACGGCAAGGAGTACAAGTGCAAGGTGTCCAACAA |
| | | GGCCCTCCCCGCCCCCATCGAGAAGACCATCAGCAAAGCCAAGGGCCAACCC |
| | | CGGGAACCCCAGGTGTACACGCTCCCGCCCAGCAGGGAGGAGATGACCAAAA |
| | | ACCAGGTTAGCCTGACCTGCCTGGTGAAGGGGTTTTACCCCTCCGACATCGC |
| | | CGTTGAGTGGGAGAGCAATGGCCAGCCCGAAAACAACTACAAGACCACCCCG |
| | | CCCGTGCTCGACTCAGACGGTAGCTTCTTCCTGTACAGCAAACTGACCGTGG |
| | | ACAAGAGCCGCTGGCAGCAGGGCAACGTGTTTAGCTGCAGCGTGATGCACGA |
| | | AGCCCTGCACAACCATTACACGCAGAAAAGCCTCAGCCTGTCCCCGGGCAAG |
| 450 | IPI_HC-CO05 | ATGGAAACCCCCGCCCAGCTCCTCTTCCTCCTACTCTTGTGGCTCCCCGACA |
| | | CCACCGGCCAGGTTCAACTCGTGGAGAGCGGGGGCGGAGTCGTCCAGCCCGG |
| | | GAGGAGCTTACGGCTCAGCTGCGCCGCCTCGGGGTTCACGTTCTCAAGCTAC |
| | | ACCATGCACTGGGTCCGCCAGGCCCCCGGGAAGGGGCTCGAGTGGGTCACCT |
| | | TCATCAGCTACGACGGAAACAACAAGTACTACGCCGACTCCGTAAAGGGGAG |
| | | GTTCACGATCTCCAGGGACAATTCCAAGAACACCTTGTACCTGCAGATGAAT |
| | | AGCCTGCGCGCCGAGGACACCGCCATCTATTACTGCGCCAGGACCGGCTGGC |
| | | TGGGCCCATTCGACTACTGGGGGCAGGGGACCCTGGTGACCGTGTCGAGCGC |
| | | CAGCACCAAGGGGCCCAGCGTCTTCCCCCTGGCCCCCTCCAGCAAGAGCACC |
| | | TCCGGCGGCACCGCCGCCCTCGGGTGCCTGGTGAAGGACTACTTCCCCGAGC |
| | | CCGTCACGGTGTCCTGGAACAGCGGCGCCCTGACGAGCGGCGTGCACACCTT |
| | | CCCCGCCGTGCTGCAGTCAAGCGGCCTGTACAGCCTGAGCAGCGTGGTGACT |
| | | GTGCCCAGCTCCAGCCTGGGCACCCAGACCTATATCTGCAACGTGAACCACA |
| | | AACCCTCCAACACGAAGGTGGACAAAAGGGTGGAGCCCAAAAGCTGCGACAA |
| | | GACCCACACCTGTCCGCCGTGTCCCGCGCCCGAGCTGCTGGGGGGCCCCTCC |
| | | GTGTTCCTGTTTCCCCCCAAGCCCAAGGACACCCTGATGATAAGCAGGACGC |
| | | CCGAGGTGACCTGCGTGGTGGTGGACGTGAGCCACGAGGACCCCGAGGTGAA |
| | | GTTCAATTGGTACGTGGACGGCGTGGAGGTGCACAACGCCAAGACCAAGCCG |
| | | CGTGAAGAACAGTATAACTCCACCTACCGGGTGGTCAGCGTCCTGACCGTGC |
| | | TCCACCAGGACTGGCTCAACGGCAAGGAATACAAGTGCAAAGTAAGCAACAA |
| | | GGCTCTGCCCGCCCCCATCGAGAAGACGATCTCCAAAGCCAAAGGCCAGCCC |
| | | AGGGAGCCCCAGGTGTACACCCTCCCTCCCAGCAGGGAGGAGATGACCAAGA |
| | | ACCAGGTGAGCCTGACTTGCCTGGTCAAGGGTTTCTACCCAAGCGACATCGC |
| | | TGTGGAGTGGGAAAGCAACGGCCAGCCCGAGAATAACTACAAGACCACCCCG |
| | | CCCGTGCTGGACTCGGATGGGAGCTTTTTTCTGTACTCCAAGCTGACCGTCG |
| | | ACAAGTCGCGTTGGCAGCAGGGCAACGTGTTCAGCTGCAGCGTGATGCACGA |
| | | GGCCCTGCACAATCACTACACCCAGAAATCGCTGAGCCTGTCGCCGGGCAAG |
| 451 | IPI_HC-CO06 | ATGGAGACTCCCGCCCAATTACTCTTCCTCCTCCTCCTCTGGTTACCCGACA |
| | | CCACCGGGCAGGTTCAGCTCGTAGAGAGCGGCGGGGGAGTCGTCCAGCCCGG |
| | | GCGTAGCCTCAGGCTATCCTGCGCCGCCAGCGGGTTCACCTTCAGCAGCTAC |
| | | ACCATGCACTGGGTCAGGCAGGCGCCCGGCAAGGGCCTCGAGTGGGTCACCT |
| | | TCATCAGCTACGACGGCAACAACAAGTACTACGCCGACTCCGTCAAGGGCAG |
| | | GTTCACCATCAGCCGCGACAACAGCAAGAACACCCTCTACCTGCAGATGAAC |
| | | TCCCTGAGGGCCGAGGACACCGCGATCTATTACTGCGCCAGGACCGGGTGGC |
| | | TGGGGCCCTTCGATTACTGGGGACAGGGGACTCTCGTGACCGTGAGCAGCGC |
| | | CAGCACGAAGGGCCCCAGCGTGTTCCCCCTGGCCCCCTCAAGCAAGAGTACC |
| | | TCCGGCGGGACCGCCGCGCTGGGGTGCCTCGTGAAGGACTACTTCCCCGAGC |
| | | CGGTGACCGTGTCCTGGAACTCTGGCGCCCTGACCAGCGGGGTCCATACCTT |
| | | CCCCGCCGTGCTCCAGAGCAGCGGGCTGTACTCGCTCAGCAGCGTGGTGACC |
| | | GTGCCCAGCAGCAGCCTGGGGACCCAGACCTACATCTGCAACGTCAACCACA |
| | | AACCCAGCAACACCAAGGTGGACAAGCGTGTGGAGCCAAAGAGCTGCGACAA |
| | | GACCCACACCTGCCCGCCCTGCCCCGCCCCCGAGCTGCTGGGCGGCCCCTCG |
| | | GTGTTCCTCTTCCCACCCAAGCCCAAGGACACCCTGATGATCAGCAGGACCC |
| | | CCGAGGTGACCTGCGTGGTGGTGGATGTGAGCCACGAGGACCCGGAGGTGAA |
| | | GTTCAATTGGTACGTGGACGGCGTGGAGGTTCACAACGCCAAAACTAAGCCC |
| | | CGCGAGGAGCAGTATAACAGCACCTACCGGGTGGTGTCCGTGCTGACCGTCC |
| | | TCCATCAGGACTGGCTGAACGGGAAGGAGTACAAGTGCAAGGTGAGCAATAA |
| | | GGCGCTGCCCGCCCCCATCGAGAAGACCATCAGCAAGGCCAAGGGCCAGCCC |
| | | AGGGAGCCCCAGGTGTACACCCTGCCCCCCAGCCGGGAGGAGATGACAAAGA |
| | | ACCAGGTGAGCCTCACCTGCCTGGTCAAAGGCTTCTATCCCAGCGACATAGC |
| | | GGTGGAGTGGGAAAGCAATGGCCAGCCCGAGAACAACTACAAGACCACCCCG |
| | | CCCGTGCTGGACAGCGACGGCAGCTTCTTCCTGTACAGCAAGCTCACGGTGG |
| | | ACAAGAGCAGGTGGCAGCAGGGCAACGTGTTTAGCTGCAGCGTGATGCACGA |
| | | AGCCCTGCACAACCATTACACCCAGAAGAGTCTCAGCCTCTCCCCCGGCAAG |
| 452 | IPI_HC-CO07 | ATGGAGACACCCGCCCAGCTCCTCTTCCTCCTCCTCCTCTGGCTCCCCGACA |
| | | CGACCGGCCAAGTACAGCTCGTCGAGTCCGGGGGAGGCGTCGTTCAGCCCGG |
| | | CCGGAGCCTCAGGCTTAGCTGCGCCGCGAGCGGCTTCACCTTCAGCTCCTAC |
| | | ACCATGCACTGGGTCCGCCAGGCCCCCGGGAAGGGGCTCGAGTGGGTCACGT |
| | | TCATCAGCTACGACGGCAACAATAAGTACTACGCCGATTCCGTCAAGGGGCG |
| | | GTTCACCATCAGCCGGGATAACAGCAAGAACACCCTCTATCTGCAGATGAAC |
| | | AGCCTGAGGGCCGAGGATACCGCAATCTATTACTGCGCCCGCACCGGGTGGC |
| | | TGGGCCCGTTCGACTACTGGGGGCAGGGGACCCTGGTGACGGTGTCCTCCGC |
| | | CTCGACCAAGGGCCCCTCCGTGTTCCCGCTGGCCCCCTCGTCCAAGAGCACC |
| | | AGCGGCGGCACCGCTGCCCTGGGCTGTCTGGTCAAGGACTACTTTCCAGAGC |
| | | CCGTGACCGTGTCCTGGAATAGCGGGGCCCTGACCAGCGGAGTGCACACCTT |
| | | CCCCGCCGTCCTGCAATCCTCGGGCCTGTACTCCCTGAGCTCCGTAGTGACC |
| | | GTCCCCAGCAGCAGCTTAGGGACCCAGACCTATATCTGCAACGTGAACCACA |
| | | AACCCAGCAACACGAAGGTGGACAAGAGGGTAGAGCCCAAAAGCTGCGACAA |
| | | GACCCACACCTGCCCACCCTGCCCGGCCCCAGAGCTGCTCGGGGGCCCCAGC |
| | | GTGTTCCTGTTCCCGCCCAAGCCCAAGGACACACTGATGATCAGCAGGACTC |
| | | CAGAGGTCACCTGCGTGGTGGTGGATGTGTCCCACGAGGACCCGGAGGTGAA |
| | | GTTCAATTGGTATGTGGACGGCGTCGAGGTCCACAACGCCAAGACAAAGCCA |
| | | AGGGAGGAGCAATACAATAGCACCTACCGTGTCGTGAGCGTGCTGACAGTGC |
| | | TGCATCAGGACTGGCTCAACGGAAAGGAGTACAAGTGTAAGGTGTCCAACAA |
| | | GGCCCTGCCCGCCCCGATAGAAAAGACCATCAGCAAAGCCAAGGGCCAGCCC |
| | | AGGGAGCCGCAGGTGTATACCCTCCCGCCCAGCAGGGAGGAGATGACCAAGA |
| | | ACCAGGTGTCCCTGACCTGCCTGGTCAAGGGATTCTACCCCAGCGACATCGC |
| | | CGTGGAGTGGGAGAGCAACGGCCAACCCGAGAACAACTACAAGACCACTCCG |
| | | CCCGTGCTCGACAGCGATGGGAGCTTCTTCCTGTATAGCAAGCTGACCGTCG |
| | | ACAAGAGCAGGTGGCAGCAGGGCAATGTGTTTAGCTGTAGCGTCATGCACGA |
| | | AGCCCTGCACAACCACTATACCCAGAAATCCCTGAGCCTGAGCCCCGGGAAG |
| 453 | IPI_HC-CO08 | ATGGAGACGCCCGCCCAGCTCCTCTTCCTCCTCCTCCTCTGGCTACCCGACA |
| | | CGACCGGCCAGGTCCAGCTGGTGGAGAGCGGCGGCGGCGTAGTCCAGCCCGG |
| | | ACGGAGCCTCCGCCTCAGCTGCGCCGCCAGCGGCTTTACCTTCAGCAGCTAC |
| | | ACCATGCATTGGGTCAGGCAGGCCCCCGGGAAGGGCCTTGAGTGGGTAACAT |
| | | TTATCAGCTACGACGGCAACAACAAGTATTACGCCGACAGCGTCAAGGGCCG |
| | | CTTCACCATTTCCCGAGACAACAGCAAGAACACCCTCTATCTGCAGATGAAC |
| | | AGTCTGCGCGCGGAGGACACCGCGATCTACTACTGCGCCCGCACCGGTTGGC |
| | | TCGGGCCGTTCGATTACTGGGGCCAGGGGACCCTGGTGACCGTGAGTTCCGC |
| | | CAGCACGAAGGGGCCGAGCGTGTTTCCCCTGGCCCCCAGCAGCAAGAGCACG |
| | | AGCGGCGGCACCGCCGCCCTGGGGTGCCTGGTGAAGGACTACTTCCCGGAAC |
| | | CCGTGACCGTGAGCTGGAACAGCGGGGCCCTGACCAGCGGCGTGCACACCTT |
| | | CCCCGCCGTGCTGCAGAGCAGCGGGCTGTACTCCCTGAGCTCTGTGGTGACG |
| | | GTCCCCAGCAGCAGCCTGGGCACCCAGACCTACATCTGCAATGTGAACCACA |
| | | AGCCTAGCAACACCAAGGTGGACAAGCGGGTCGAGCCCAAGAGTTGCGACAA |
| | | GACCCACACCTGCCCTCCCTGCCCAGCCCCCGAACTGCTGGGGGGCCCCAGC |
| | | GTGTTCCTCTTCCCACCCAAGCCCAAGGACACGCTGATGATCAGCAGGACGC |
| | | CCGAGGTGACCTGCGTCGTGGTCGACGTGAGCCACGAGGACCCCGAAGTGAA |
| | | ATTCAACTGGTACGTGGACGGCGTGGAGGTGCATAACGCCAAAACCAAACCC |
| | | CGGGAGGAGCAGTACAACTCCACCTATAGGGTCGTGTCGGTGCTCACCGTGC |
| | | TGCATCAGGATTGGCTGAACGGCAAGGAATATAAGTGCAAAGTGAGCAACAA |
| | | GGCCCTGCCCGCACCGATCGAGAAAACGATCAGCAAAGCCAAGGGCCAGCCC |
| | | AGGGAGCCCCAGGTGTATACGCTGCCGCCCAGCCGGGAAGAGATGACTAAGA |
| | | ACCAGGTGTCCCTGACCTGCCTGGTGAAGGGCTTCTACCCTAGCGACATCGC |
| | | GGTCGAGTGGGAGAGCAACGGCCAGCCCGAGAACAACTATAAGACGACTCCC |
| | | CCCGTGCTGGACAGCGACGGCTCCTTTTTCCTGTATAGCAAACTGACCGTGG |
| | | ACAAGAGCAGGTGGCAGCAGGGGAACGTGTTCTCGTGCAGCGTGATGCATGA |
| | | GGCCCTGCATAACCACTACACCCAGAAGTCGCTGAGCCTGTCCCCCGGCAAG |
| 454 | IPI_HC-CO09 | ATGGAGACACCCGCCCAGTTGCTGTTCCTCCTCCTCCTCTGGCTCCCGGATA |
| | | CCACGGGGCAGGTACAACTAGTCGAGAGCGGGGGCGGCGTCGTCCAGCCCGG |
| | | CAGGAGCCTCCGGCTCAGCTGCGCCGCCTCCGGGTTCACCTTCAGCTCCTAC |
| | | ACCATGCACTGGGTCAGGCAGGCCCCCGGGAAAGGGTTGGAGTGGGTCACCT |
| | | TTATCAGCTACGACGGGAACAACAAGTACTACGCCGACAGCGTCAAGGGCCG |
| | | GTTCACCATTAGCCGGGACAACTCCAAGAACACCCTTTACCTGCAGATGAAC |
| | | TCCCTGCGGGCCGAGGACACCGCAATCTACTACTGCGCCAGGACCGGCTGGC |
| | | TGGGGCCCTTCGATTACTGGGGACAGGGCACCCTCGTGACCGTGTCCAGCGC |
| | | CAGCACCAAGGGCCCCAGCGTCTTTCCCCTGGCCCCCAGCAGCAAGAGCACC |
| | | AGCGGCGGCACGGCCGCCCTGGGCTGCCTGGTCAAGGACTACTTCCCCGAGC |
| | | CCGTGACCGTGTCCTGGAACAGCGGCGCCCTGACCTCCGGCGTGCACACCTT |
| | | CCCGGCCGTGCTGCAGAGCAGCGGCCTCTACTCCCTCTCCTCCGTGGTGACC |
| | | GTGCCCAGCAGCAGCCTGGGCACCCAGACCTATATCTGCAACGTGAACCACA |
| | | AGCCATCGAACACCAAAGTGGATAAAAGGGTGGAGCCCAAAAGCTGCGATAA |
| | | GACCCACACCTGTCCCCCCTGCCCGGCCCCCGAGCTGCTGGGCGGGCCCTCA |
| | | GTGTTCCTGTTCCCACCCAAGCCCAAGGACACCCTGATGATCAGCAGGACCC |
| | | CCGAAGTCACATGCGTGGTGGTCGACGTGTCCCACGAAGACCCCGAGGTGAA |
| | | ATTCAATTGGTACGTGGACGGCGTGGAGGTCCACAACGCCAAGACCAAGCCC |
| | | CGTGAAGAACAATATAACTCCACGTATAGGGTGGTGTCCGTGCTGACGGTGC |
| | | TGCATCAGGACTGGCTGAACGGCAAGGAGTACAAGTGCAAGGTGAGCAACAA |
| | | GGCCCTGCCGGCCCCCATCGAGAAAACCATCTCCAAAGCCAAGGGGCAGCCC |
| | | CGCGAGCCCCAGGTCTATACGCTGCCCCCCAGCAGGGAAGAGATGACCAAGA |
| | | ACCAGGTCAGCCTGACCTGCCTGGTGAAGGGCTTTTACCCCAGCGACATCGC |
| | | CGTCGAATGGGAGTCGAACGGGCAACCGGAGAACAACTACAAGACCACCCCT |
| | | CCCGTGCTGGACAGTGACGGGAGCTTCTTTCTCTACTCCAAGCTGACCGTCG |
| | | ACAAGTCCCGGTGGCAACAGGGAAACGTGTTTTCCTGCAGCGTGATGCATGA |
| | | GGCCCTCCATAATCACTACACCCAGAAGTCCCTGAGCCTGAGCCCTGGGAAG |
| 455 | IPI_HC-CO10 | ATGGAAACCCCGGCCCAGCTCCTCTTCCTCTTACTCTTGTGGCTCCCCGACA |
| | | CCACCGGGCAGGTCCAGCTCGTTGAGAGCGGGGGCGGCGTCGTACAGCCGGG |
| | | GCGAAGCCTCCGGCTCTCCTGTGCCGCGAGCGGCTTCACCTTCAGCAGCTAC |
| | | ACGATGCACTGGGTCAGGCAGGCCCCCGGGAAGGGTCTGGAGTGGGTAACGT |
| | | TCATCAGCTACGACGGAAACAATAAGTACTACGCGGATTCCGTGAAGGGCCG |
| | | CTTCACCATAAGCAGGGATAACTCCAAGAACACCCTCTACCTGCAGATGAAT |
| | | TCCCTGCGCGCCGAGGACACCGCCATCTACTACTGCGCCAGGACAGGCTGGC |
| | | TGGGCCCCTTCGACTATTGGGGCCAAGGCACCCTGGTGACGGTGTCCAGCGC |
| | | GAGCACCAAGGGCCCCTCCGTGTTCCCGCTGGCGCCCAGCTCCAAAAGCACC |
| | | AGCGGGGGCACCGCCGCCCTGGGCTGCTTGGTGAAGGACTACTTCCCCGAGC |
| | | CCGTGACCGTAAGCTGGAACAGCGGCGCCCTGACCTCCGGCGTGCACACGTT |
| | | CCCCGCGGTGCTCCAAAGCTCCGGCCTCTATTCCCTGAGCAGCGTGGTGACC |
| | | GTGCCCAGCAGCTCGCTGGGCACCCAGACTTACATCTGCAATGTGAACCACA |
| | | AGCCCAGCAACACGAAGGTGGACAAGAGGGTCGAGCCCAAGAGCTGCGACAA |
| | | GACCCATACCTGTCCCCCCTGTCCCGCCCCCGAACTGCTCGGCGGCCCCTCC |
| | | GTGTTCCTGTTCCCTCCTAAACCCAAGGACACCCTGATGATCAGCAGGACGC |
| | | CCGAAGTGACCTGTGTGGTGGTGGATGTGAGCCACGAGGATCCCGAGGTGAA |
| | | GTTCAACTGGTACGTCGACGGGGTGGAGGTCCACAACGCCAAGACCAAGCCC |
| | | CGGGAGGAGCAATACAATAGCACCTACAGGGTGGTCAGCGTGCTGACCGTGC |
| | | TGCATCAGGACTGGCTGAATGGCAAGGAGTACAAGTGCAAGGTGAGCAACAA |
| | | GGCCCTGCCCGCCCCCATCGAGAAGACGATCTCAAAGGCCAAGGGCCAACCC |
| | | AGAGAGCCCCAGGTGTACACCCTGCCGCCCTCCAGAGAGGAGATGACGAAGA |
| | | ATCAGGTGTCCCTGACCTGCCTGGTGAAGGGATTCTACCCCAGCGACATCGC |
| | | CGTGGAGTGGGAGAGCAACGGCCAGCCCGAGAACAACTACAAGACCACCCCG |
| | | CCCGTCCTGGACAGCGACGGCTCCTTCTTCCTGTACAGCAAGCTGACCGTGG |
| | | ATAAGTCCCGGTGGCAACAGGGCAACGTGTTTAGCTGTAGCGTGATGCATGA |
| | | GGCCCTGCACAACCACTACACCCAGAAAAGCTTGTCCCTGTCCCCCGGGAAG |
| 456 | IPI_HC-CO11 | ATGGAGACACCCGCCCAGCTCCTCTTCCTCCTCCTCCTCTGGCTTCCGGACA |
| | | CCACCGGGCAGGTCCAGCTCGTTGAGAGCGGGGGAGGAGTCGTCCAGCCGGG |
| | | AAGGAGCCTAAGGCTCTCCTGTGCGGCCAGCGGGTTCACCTTCAGCTCCTAT |
| | | ACCATGCACTGGGTCCGGCAGGCCCCCGGCAAGGGCTTGGAGTGGGTCACGT |
| | | TCATCTCCTACGACGGCAACAACAAGTACTACGCCGACAGCGTCAAGGGCCG |
| | | GTTTACCATCAGCCGCGACAATTCCAAGAACACCCTCTACCTGCAAATGAAC |
| | | TCCCTGCGGGCCGAGGATACAGCCATCTATTATTGTGCGAGAACCGGCTGGC |
| | | TGGGGCCCTTCGACTACTGGGGCCAGGGAACCCTGGTGACCGTGAGCAGCGC |
| | | CTCCACCAAGGGCCCATCCGTGTTTCCCCTGGCCCCCAGTAGCAAGAGCACG |
| | | TCCGGCGGCACCGCCGCCCTGGGCTGCCTGGTAAAGGACTACTTCCCCGAGC |
| | | CCGTCACCGTGAGCTGGAACAGCGGGGCCCTGACCTCCGGCGTACACACCTT |
| | | CCCCGCCGTCTTACAGTCCTCGGGCCTGTATAGCCTGAGCTCCGTTGTGACG |
| | | GTGCCCAGCTCCTCACTGGGCACCCAGACATACATCTGCAATGTGAATCACA |
| | | AACCCAGCAACACCAAAGTGGACAAGCGGGTGGAGCCCAAGTCCTGCGACAA |
| | | AACCCACACGTGCCCGCCCTGCCCGGCCCCCGAGCTGCTGGGTGGGCCCAGC |
| | | GTGTTTCTGTTCCCACCCAAGCCCAAGGATACCCTCATGATAAGCCGCACCC |
| | | CCGAGGTGACCTGCGTGGTGGTGGACGTGAGCCACGAGGACCCCGAGGTGAA |
| | | GTTCAACTGGTACGTGGACGGCGTGGAGGTCCACAACGCCAAGACCAAGCCC |
| | | AGAGAAGAACAGTACAACAGCACGTACCGTGTGGTCAGCGTGCTGACCGTGC |
| | | TGCACCAGGACTGGCTGAACGGCAAGGAATACAAATGCAAGGTGAGCAATAA |
| | | GGCCCTGCCCGCCCCCATCGAAAAGACCATCAGCAAAGCCAAGGGACAGCCC |
| | | CGGGAGCCCCAGGTGTACACCCTGCCTCCCAGCAGGGAGGAGATGACCAAAA |
| | | ACCAAGTCTCCCTGACCTGCCTGGTGAAAGGGTTTTACCCCAGCGACATCGC |
| | | CGTAGAGTGGGAGAGCAACGGCCAGCCCGAGAACAATTATAAGACCACCCCG |
| | | CCCGTGCTGGATAGCGACGGGAGTTTCTTCCTGTACAGCAAGCTGACGGTGG |
| | | ATAAGAGCCGTTGGCAGCAGGGCAACGTGTTCTCCTGCTCCGTGATGCACGA |
| | | GGCCCTGCACAACCACTACACCCAGAAAAGCCTGAGCCTTAGCCCCGGAAAG |
| 457 | IPI_HC-CO12 | ATGGAAACCCCCGCCCAGCTCCTCTTCCTCTTGCTCCTATGGCTCCCGGACA |
| | | CAACCGGGCAGGTCCAGCTCGTCGAGAGCGGGGGCGGGGTCGTCCAGCCCGG |
| | | GCGGAGCCTCCGTTTGAGTTGCGCCGCCAGCGGCTTCACCTTCAGCAGCTAC |
| | | ACCATGCACTGGGTCCGTCAGGCCCCGGGGAAGGGCCTCGAGTGGGTTACCT |
| | | TCATCAGCTACGACGGCAACAACAAGTACTACGCCGATTCCGTCAAGGGGCG |
| | | TTTCACGATTTCCCGGGACAATTCCAAGAACACCCTCTACCTGCAGATGAAC |
| | | AGCCTGAGGGCGGAGGACACCGCCATCTACTACTGCGCCCGGACCGGCTGGC |
| | | TGGGCCCGTTTGACTATTGGGGCCAGGGCACCCTGGTGACCGTTAGCAGCGC |
| | | CAGCACCAAGGGTCCCAGCGTCTTCCCGCTGGCCCCCAGCTCCAAGAGCACC |
| | | AGCGGCGGCACCGCCGCGCTGGGCTGCCTGGTCAAGGACTACTTCCCCGAGC |
| | | CCGTGACCGTCAGCTGGAACAGCGGGGCCCTGACCAGCGGCGTCCACACCTT |
| | | CCCGGCCGTGCTGCAGAGCAGCGGGCTGTACAGCCTGAGCAGCGTGGTGACC |
| | | GTGCCAAGCAGCAGCCTGGGTACCCAAACGTACATCTGTAACGTGAACCACA |
| | | AGCCCAGCAACACCAAGGTGGATAAGAGGGTGGAGCCGAAAAGCTGCGACAA |
| | | GACCCATACCTGCCCTCCCTGCCCCGCCCCCGAGCTTCTGGGCGGCCCGTCG |
| | | GTCTTCCTGTTCCCGCCCAAACCCAAGGACACCCTCATGATCTCCCGGACAC |
| | | CCGAGGTGACCTGCGTCGTCGTGGACGTGTCACATGAGGACCCCGAGGTCAA |
| | | GTTCAACTGGTACGTGGACGGCGTGGAAGTGCATAACGCCAAGACCAAGCCC |
| | | CGAGAGGAGCAGTACAACAGCACCTACCGCGTGGTGAGCGTGCTCACCGTGC |
| | | TGCACCAGGATTGGCTCAACGGAAAGGAGTACAAATGCAAGGTGTCCAATAA |
| | | GGCCCTCCCCGCGCCCATCGAGAAGACAATCTCAAAGGCAAAGGGACAGCCC |
| | | CGGGAGCCCCAGGTATACACCCTGCCCCCCTCCCGCGAGGAGATGACAAAGA |
| | | ACCAAGTGAGCCTGACCTGCCTCGTGAAGGGCTTCTACCCCTCCGACATAGC |
| | | CGTGGAGTGGGAGAGCAACGGCCAGCCCGAGAACAACTACAAGACCACCCCG |
| | | CCCGTGCTGGACTCCGACGGCAGCTTCTTCCTGTACAGCAAGCTGACCGTGG |
| | | ACAAGTCCAGGTGGCAGCAAGGCAACGTGTTCAGCTGCAGCGTGATGCACGA |
| | | GGCCCTGCACAATCACTACACCCAGAAAAGCCTGTCCCTGAGCCCCGGCAAG |
| 458 | IPI_HC-CO13 | ATGGAGACACCCGCCCAGCTACTCTTCCTCCTCCTTCTCTGGCTTCCGGACA |
| | | CCACCGGCCAGGTCCAGCTGGTGGAGAGCGGCGGCGGCGTCGTACAGCCCGG |
| | | GAGGTCCCTCCGGTTGAGCTGTGCCGCCAGCGGCTTCACATTTTCCAGCTAC |
| | | ACCATGCACTGGGTCAGGCAGGCCCCGGGCAAGGGCCTCGAGTGGGTCACCT |
| | | TTATCTCCTACGACGGCAACAACAAGTACTACGCCGACAGCGTCAAAGGGCG |
| | | GTTCACCATCAGCAGGGACAACAGCAAGAACACCCTCTACCTGCAGATGAAC |
| | | AGCCTGAGGGCCGAGGATACGGCCATCTACTACTGCGCCCGGACCGGCTGGC |
| | | TGGGCCCCTTCGACTACTGGGGGCAGGGCACCCTCGTCACCGTGAGCAGCGC |
| | | CAGCACAAAAGGGCCCTCCGTGTTTCCCCTCGCCCCCTCGTCCAAATCCACC |
| | | AGCGGCGGCACCGCTGCCCTGGGGTGCCTGGTGAAGGACTACTTTCCCGAGC |
| | | CCGTGACCGTGAGCTGGAATAGCGGCGCCCTGACCTCCGGCGTGCACACATT |
| | | CCCCGCCGTGCTGCAGAGCAGCGGCCTGTACAGCCTGAGCAGCGTGGTCACC |
| | | GTGCCCTCCAGTAGCCTGGGGACCCAGACCTACATCTGTAACGTGAACCACA |
| | | AGCCCAGCAACACCAAGGTGGATAAAAGGGTGGAGCCAAAGTCCTGCGACAA |
| | | GACCCATACCTGCCCCCCGTGCCCCGCCCCCGAACTCCTGGGCGGGCCCAGC |
| | | GTGTTCCTCTTCCCACCCAAGCCCAAGGACACGCTGATGATCAGCCGGACCC |
| | | CCGAGGTGACCTGCGTGGTGGTGGACGTGAGCCACGAGGATCCCGAGGTGAA |
| | | GTTCAACTGGTACGTGGATGGCGTGGAGGTGCATAACGCCAAGACCAAGCCG |
| | | AGGGAGGAGCAGTATAACAGCACCTATAGGGTGGTCAGCGTGCTCACGGTCC |
| | | TGCACCAGGATTGGCTGAACGGCAAAGAGTACAAGTGCAAGGTGTCCAATAA |
| | | GGCCCTGCCCGCCCCCATAGAGAAGACCATCTCCAAGGCCAAGGGCCAGCCC |
| | | AGGGAGCCCCAGGTGTACACGCTGCCCCCCTCCAGGGAGGAGATGACCAAAA |
| | | ATCAGGTGAGCCTGACCTGCCTGGTGAAGGGGTTCTACCCCAGCGATATCGC |
| | | CGTCGAGTGGGAGTCCAATGGGCAACCGGAAAACAACTACAAGACTACCCCG |
| | | CCCGTGCTGGACTCGGACGGCAGCTTCTTCCTGTACTCCAAGCTGACCGTCG |
| | | ACAAGTCAAGGTGGCAGCAGGGCAATGTGTTCAGCTGTAGCGTGATGCATGA |
| | | GGCCCTCCACAACCACTATACCCAAAAGAGCCTTTCGCTCTCCCCCGGCAAG |
| 459 | IPI_HC-CO14 | ATGGAGACGCCCGCCCAGCTCCTCTTTTTACTCCTCCTCTGGCTCCCCGACA |
| | | CCACCGGCCAGGTCCAGCTCGTCGAGTCCGGGGGAGGCGTCGTCCAGCCGGG |
| | | CAGGAGCCTCAGGCTCAGCTGCGCCGCCTCCGGCTTCACGTTCAGCAGCTAC |
| | | ACAATGCATTGGGTCAGGCAGGCGCCCGGTAAAGGGCTCGAGTGGGTAACCT |
| | | TCATCAGCTACGACGGCAACAACAAATACTACGCGGACAGCGTCAAGGGCAG |
| | | ATTTACCATCTCCCGGGATAACTCCAAGAATACCCTCTACCTCCAGATGAAC |
| | | AGCCTGAGGGCCGAGGACACCGCCATCTACTACTGCGCCAGGACGGGGTGGC |
| | | TGGGACCCTTTGACTACTGGGGCCAGGGCACCCTGGTCACCGTGAGCAGCGC |
| | | CAGCACCAAAGGCCCCAGCGTGTTCCCCCTGGCACCCAGCAGCAAGAGCACC |
| | | AGCGGTGGCACCGCCGCCCTCGGCTGCCTGGTGAAGGACTACTTCCCGGAGC |
| | | CCGTGACCGTGAGCTGGAACAGCGGGGCCCTGACGTCCGGCGTCCACACCTT |
| | | TCCAGCCGTGCTGCAAAGCAGCGGCCTGTACTCCCTGAGCAGCGTGGTGACC |
| | | GTGCCGAGCAGCAGCCTGGGCACCCAGACCTACATCTGTAACGTGAACCACA |
| | | AGCCAAGCAATACCAAGGTGGACAAAAGGGTGGAGCCCAAGTCCTGTGACAA |
| | | AACCCACACCTGCCCGCCCTGCCCCGCCCCCGAACTGCTGGGCGGGCCCTCG |
| | | GTATTTCTGTTCCCGCCCAAGCCCAAGGATACCCTGATGATCTCCCGGACCC |
| | | CCGAAGTGACCTGCGTAGTGGTGGACGTGAGCCACGAGGACCCCGAGGTGAA |
| | | GTTCAACTGGTACGTGGATGGCGTGGAGGTGCACAACGCCAAGACCAAGCCC |
| | | CGGGAGGAGCAGTATAACAGCACGTACAGGGTGGTGTCCGTGCTCACCGTAC |
| | | TGCATCAGGACTGGCTCAACGGCAAGGAGTATAAGTGTAAGGTGAGCAACAA |
| | | GGCCCTGCCCGCCCCCATCGAAAAGACGATCAGCAAGGCAAAAGGCCAGCCC |
| | | AGGGAACCCCAGGTGTACACCCTGCCCCCCAGCAGGGAGGAGATGACCAAGA |
| | | ACCAGGTGAGCCTGACCTGCCTGGTGAAGGGCTTTTATCCAAGCGACATCGC |
| | | GGTCGAGTGGGAGTCGAATGGCCAGCCCGAGAACAACTATAAGACCACCCCA |
| | | CCCGTGCTCGACTCCGACGGCAGCTTCTTCCTGTATAGCAAGCTGACCGTCG |
| | | ACAAGAGCAGGTGGCAACAGGGCAACGTGTTCAGCTGCAGCGTGATGCACGA |
| | | GGCGCTGCATAATCACTATACCCAGAAAAGCCTGAGCCTGAGCCCCGGCAAG |
| 460 | IPI_HC-CO15 | ATGGAGACGCCCGCCCAGCTCCTATTCCTCCTCCTCCTCTGGCTACCCGACA |
| | | CGACCGGCCAGGTCCAGCTCGTCGAGAGCGGCGGCGGAGTCGTCCAGCCCGG |
| | | CAGGAGCCTCAGGCTCAGCTGTGCCGCCAGCGGCTTTACCTTCAGCTCGTAC |
| | | ACCATGCACTGGGTAAGGCAGGCGCCAGGCAAGGGCCTCGAGTGGGTCACCT |
| | | TCATCTCCTACGACGGGAACAATAAATACTACGCCGACAGCGTCAAGGGCAG |
| | | GTTCACCATAAGCAGGGACAACAGCAAGAACACCCTCTACCTGCAGATGAAC |
| | | AGCCTGCGGGCCGAGGACACCGCTATTTATTACTGCGCCAGGACGGGTTGGC |
| | | TGGGCCCCTTCGACTACTGGGGCCAGGGTACCCTGGTGACAGTGTCCAGCGC |
| | | GAGCACCAAGGGCCCCAGCGTGTTCCCCCTGGCTCCCAGCTCCAAGAGCACC |
| | | TCAGGGGGGACCGCCGCCCTGGGGTGCCTGGTGAAAGATTATTTCCCCGAGC |
| | | CCGTAACGGTGAGCTGGAACAGCGGGGCCCTGACCAGCGGCGTGCACACCTT |
| | | CCCCGCGGTGCTGCAGAGCAGCGGCCTGTACAGCCTCTCCAGCGTGGTGACG |
| | | GTGCCCAGCTCCAGCCTGGGCACCCAGACCTATATCTGCAACGTGAACCACA |
| | | AGCCCTCCAACACCAAGGTGGATAAGCGGGTGGAGCCCAAGAGCTGCGACAA |
| | | GACGCACACCTGCCCGCCCTGCCCCGCGCCCGAGCTGCTGGGGGGACCGTCC |
| | | GTGTTTCTGTTCCCCCCGAAACCCAAGGATACCCTGATGATCAGCCGGACCC |
| | | CCGAAGTGACCTGCGTGGTGGTGGACGTGAGCCACGAGGATCCCGAGGTGAA |
| | | GTTCAATTGGTACGTGGACGGCGTGGAGGTGCATAACGCGAAAACCAAGCCC |
| | | CGGGAGGAGCAGTACAACAGTACCTATAGGGTGGTGAGCGTGCTGACCGTCC |
| | | TGCACCAGGACTGGCTGAACGGCAAGGAGTACAAATGCAAGGTGAGCAACAA |
| | | GGCGCTGCCCGCCCCCATCGAGAAGACCATCTCGAAGGCCAAGGGCCAACCC |
| | | CGGGAACCCCAGGTGTATACCCTGCCCCCAAGCAGGGAAGAGATGACCAAAA |
| | | ACCAGGTCAGCCTGACCTGTCTGGTTAAGGGATTCTACCCCTCCGACATCGC |
| | | GGTGGAGTGGGAGAGCAACGGCCAGCCCGAGAATAACTACAAGACGACCCCG |
| | | CCCGTCCTGGACAGCGACGGATCCTTCTTCCTCTACAGCAAGCTGACTGTGG |
| | | ACAAGAGCAGGTGGCAACAGGGCAACGTCTTTTCGTGCTCCGTGATGCATGA |
| | | GGCCCTGCACAACCACTACACCCAGAAGTCCCTGAGCCTCTCCCCCGGCAAG |
| 461 | IPI_HC-CO16 | ATGGAGACACCCGCCCAGCTCCTCTTCCTCCTCCTCCTCTGGCTCCCCGACA |
| | | CCACCGGTCAGGTACAGCTCGTCGAGTCCGGCGGCGGGGTCGTTCAGCCCGG |
| | | CAGGAGCCTCAGGTTATCCTGCGCCGCCAGCGGGTTTACGTTCAGCTCCTAC |
| | | ACCATGCACTGGGTCCGGCAGGCGCCCGGCAAGGGCCTCGAGTGGGTCACCT |
| | | TCATCAGCTACGACGGCAACAACAAGTACTACGCCGATAGCGTTAAGGGCAG |
| | | GTTCACCATCAGCAGGGACAATTCCAAGAATACCCTCTATCTGCAGATGAAT |
| | | AGCCTGAGGGCGGAAGACACGGCAATCTATTATTGTGCACGGACCGGCTGGC |
| | | TGGGGCCCTTCGACTATTGGGGGCAGGGTACCCTGGTGACCGTCAGCAGCGC |
| | | CTCCACCAAGGGGCCCAGCGTGTTCCCCCTGGCCCCCAGCAGCAAGTCCACC |
| | | AGCGGCGGCACAGCCGCCCTGGGCTGCCTGGTCAAGGATTACTTTCCCGAGC |
| | | CCGTCACCGTGAGCTGGAACAGCGGGGCACTGACGAGCGGGGTGCATACCTT |
| | | TCCCGCCGTGCTGCAAAGCAGCGGCCTCTACAGCCTGTCGAGCGTGGTGACC |
| | | GTGCCCAGTAGCAGCCTCGGCACCCAGACCTACATCTGCAACGTCAACCATA |
| | | AGCCCTCCAACACCAAGGTGGACAAGAGGGTGGAGCCCAAGAGCTGCGACAA |
| | | GACCCACACGTGCCCACCCTGCCCGGCCCCCGAGCTGCTGGGCGGACCCTCC |
| | | GTGTTCCTGTTTCCCCCGAAGCCGAAAGACACCCTAATGATCTCGAGGACGC |
| | | CAGAAGTGACCTGTGTGGTGGTCGACGTGAGCCACGAGGACCCGGAGGTGAA |
| | | GTTCAATTGGTACGTGGACGGCGTGGAGGTGCATAATGCGAAGACCAAGCCC |
| | | CGGGAGGAGCAGTACAACAGCACCTACCGGGTGGTGTCCGTGCTGACCGTGC |
| | | TGCACCAGGACTGGCTGAACGGCAAGGAGTACAAGTGCAAGGTGTCCAACAA |
| | | GGCCCTGCCTGCCCCCATCGAGAAGACCATCTCCAAGGCCAAGGGGCAACCC |
| | | CGGGAGCCTCAAGTGTACACCCTTCCCCCCAGCAGGGAGGAGATGACCAAGA |
| | | ACCAGGTGTCCCTTACCTGCCTGGTGAAGGGGTTCTACCCCTCCGACATCGC |
| | | CGTGGAGTGGGAGAGCAACGGTCAGCCCGAGAACAACTACAAGACCACCCCG |
| | | CCCGTGCTGGACAGCGACGGCAGCTTTTTCCTGTATAGCAAGCTTACCGTGG |
| | | ACAAGAGCAGGTGGCAGCAGGGCAACGTGTTCAGCTGCAGCGTCATGCACGA |
| | | GGCCCTGCACAACCATTATACCCAGAAGTCTCTCAGCCTGTCCCCCGGCAAA |
| 462 | IPI_HC-CO17 | ATGGAGACGCCCGCCCAGCTCCTATTTCTCCTACTCTTGTGGCTCCCCGACA |
| | | CGACCGGGCAGGTCCAGCTGGTGGAGTCCGGGGGCGGGGTCGTACAGCCCGG |
| | | CAGGAGCCTCCGATTAAGCTGCGCCGCCAGCGGATTTACCTTCAGCAGCTAT |
| | | ACCATGCACTGGGTCAGGCAGGCCCCCGGCAAGGGCCTCGAGTGGGTCACCT |
| | | TCATCAGCTACGACGGAAACAACAAGTATTACGCCGACTCCGTCAAAGGGAG |
| | | GTTCACCATCAGCAGGGACAACTCGAAGAACACCCTCTACCTGCAAATGAAC |
| | | TCCCTGCGCGCCGAAGACACCGCCATATACTACTGCGCCAGGACCGGGTGGC |
| | | TGGGGCCCTTCGACTACTGGGGCCAGGGCACCCTGGTGACCGTGTCCTCAGC |
| | | CTCAACTAAGGGCCCCTCCGTGTTCCCGCTGGCCCCCAGCAGCAAGAGCACC |
| | | AGCGGCGGTACCGCGGCCCTGGGCTGCCTGGTGAAGGACTACTTCCCCGAGC |
| | | CCGTGACGGTGAGCTGGAACTCTGGCGCCCTGACCAGCGGAGTGCACACCTT |
| | | CCCCGCGGTGCTGCAGAGCAGCGGGCTGTACTCCCTGAGCAGCGTGGTGACT |
| | | GTGCCCTCCAGCTCCCTGGGCACCCAGACCTACATCTGCAACGTCAACCACA |
| | | AGCCGAGCAACACCAAGGTGGACAAACGGGTCGAGCCCAAGAGCTGCGACAA |
| | | GACCCACACCTGCCCGCCCTGCCCCGCCCCCGAACTCCTGGGTGGCCCATCG |
| | | GTGTTCCTCTTCCCCCCGAAGCCCAAGGACACCCTGATGATCAGCCGCACCC |
| | | CCGAGGTCACCTGCGTCGTGGTGGACGTGAGCCACGAGGACCCCGAAGTCAA |
| | | GTTCAACTGGTACGTTGACGGGGTGGAGGTCCACAACGCCAAGACCAAGCCC |
| | | AGGGAGGAGCAATACAACAGCACCTACCGGGTGGTGAGCGTGCTGACCGTCC |
| | | TGCACCAGGACTGGCTGAACGGGAAGGAGTACAAGTGCAAAGTGAGCAATAA |
| | | GGCCCTGCCCGCCCCCATCGAGAAGACCATCTCCAAGGCCAAGGGCCAGCCC |
| | | AGGGAGCCCCAAGTGTACACGCTGCCCCCCAGCAGGGAAGAGATGACCAAGA |
| | | ACCAGGTGTCTCTGACCTGCCTGGTGAAGGGCTTCTACCCCAGCGACATCGC |
| | | CGTCGAGTGGGAGAGCAACGGCCAGCCCGAGAACAACTACAAGACCACCCCG |
| | | CCCGTGCTGGACAGCGACGGCAGCTTCTTCCTCTACAGCAAGCTGACCGTGG |
| | | ACAAGAGCAGGTGGCAGCAGGGCAACGTATTCTCCTGCTCCGTGATGCACGA |
| | | AGCCCTGCACAACCACTACACGCAGAAGTCACTGAGCCTGAGCCCCGGGAAG |
| 463 | IPI_HC-CO18 | ATGGAGACACCCGCGCAGCTTCTATTCCTCCTCCTCCTCTGGCTACCCGACA |
| | | CCACGGGTCAGGTCCAGCTCGTCGAGAGCGGGGGCGGAGTGGTCCAGCCCGG |
| | | CAGGTCACTCCGGCTCTCCTGCGCCGCCTCCGGCTTTACCTTTAGCAGCTAT |
| | | ACCATGCACTGGGTCAGGCAGGCCCCCGGGAAGGGCCTCGAGTGGGTCACCT |
| | | TCATCAGCTACGACGGAAACAACAAGTATTACGCGGATTCCGTAAAAGGCAG |
| | | GTTCACCATCTCCAGGGACAATAGCAAGAACACCCTCTACCTGCAGATGAAC |
| | | TCCCTGCGAGCCGAAGACACCGCCATATACTACTGCGCCAGGACCGGGTGGC |
| | | TCGGGCCCTTCGACTATTGGGGCCAGGGGACCCTGGTGACCGTCAGCAGCGC |
| | | CAGCACCAAGGGGCCCTCCGTGTTCCCCCTGGCCCCCTCATCCAAGAGCACC |
| | | AGCGGCGGGACCGCAGCCCTGGGGTGCCTCGTGAAGGACTACTTCCCCGAGC |
| | | CCGTGACCGTGAGCTGGAACAGCGGCGCGCTCACCAGCGGCGTGCACACCTT |
| | | CCCCGCCGTGCTGCAGTCCAGCGGGCTGTACTCCCTGTCCTCGGTGGTCACC |
| | | GTCCCCAGCAGCAGCCTGGGCACCCAGACCTACATCTGCAACGTGAACCACA |
| | | AGCCCAGCAACACCAAGGTGGATAAGAGGGTCGAGCCCAAAAGCTGCGACAA |
| | | AACCCACACCTGCCCGCCCTGCCCCGCCCCCGAGCTGCTGGGCGGCCCAAGC |
| | | GTGTTCCTGTTCCCTCCCAAACCCAAGGACACGCTCATGATATCCAGGACCC |
| | | CCGAGGTCACGTGCGTGGTGGTGGACGTGTCCCACGAGGACCCCGAGGTCAA |
| | | ATTCAACTGGTACGTGGACGGCGTGGAGGTGCACAACGCCAAGACCAAGCCC |
| | | AGGGAGGAGCAGTACAACTCCACGTACCGGGTGGTGTCCGTCCTGACGGTGC |
| | | TCCACCAAGACTGGCTGAACGGGAAGGAGTACAAGTGCAAGGTGTCCAACAA |
| | | GGCCCTGCCGGCCCCCATCGAGAAGACGATCAGCAAGGCCAAGGGGCAACCC |
| | | AGGGAGCCCCAGGTTTACACCCTGCCCCCCAGCAGGGAGGAAATGACCAAGA |
| | | ATCAGGTGAGCCTGACCTGTCTGGTCAAAGGCTTCTACCCGAGCGACATAGC |
| | | CGTGGAATGGGAGAGCAACGGCCAGCCCGAGAACAACTACAAAACCACCCCT |
| | | CCCGTTCTCGACAGCGACGGCAGCTTCTTCCTCTACAGCAAGCTCACCGTAG |
| | | ACAAGAGCCGGTGGCAGCAGGGCAATGTGTTCTCCTGCAGCGTGATGCACGA |
| | | GGCCCTGCACAATCATTACACTCAGAAAAGCCTGAGCCTCAGCCCCGGCAAG |
| 464 | IPI_HC-CO19 | ATGGAGACTCCCGCCCAGCTCCTCTTCCTCCTCCTCCTTTGGCTCCCCGACA |
| | | CCACCGGTCAGGTCCAGCTCGTCGAGAGCGGGGGCGGCGTCGTCCAGCCCGG |
| | | CAGGAGCCTCAGGCTCAGCTGCGCCGCCAGCGGCTTCACCTTCTCCAGCTAC |
| | | ACGATGCACTGGGTCAGGCAAGCGCCCGGCAAAGGGCTCGAGTGGGTAACCT |
| | | TCATCTCATACGACGGCAACAACAAGTACTACGCGGACAGCGTCAAGGGCCG |
| | | GTTCACCATCAGCAGGGATAACAGCAAGAACACCCTTTACCTGCAGATGAAC |
| | | TCACTGCGCGCCGAGGACACCGCCATATACTATTGCGCAAGGACCGGCTGGC |
| | | TGGGCCCCTTCGACTACTGGGGCCAGGGAACGCTGGTCACCGTGAGCTCTGC |
| | | CAGCACCAAGGGCCCCTCCGTCTTCCCCCTGGCCCCCTCCTCCAAGAGCACG |
| | | TCCGGGGGCACGGCGGCCCTGGGGTGCCTGGTGAAGGACTACTTCCCCGAGC |
| | | CCGTGACCGTGTCATGGAACAGTGGCGCGCTGACGAGCGGGGTGCATACATT |
| | | TCCCGCCGTGCTCCAGAGCTCCGGCCTGTACTCGCTGTCCAGCGTGGTGACC |
| | | GTGCCGTCCAGCAGCCTGGGCACCCAGACATACATATGCAATGTGAATCACA |
| | | AGCCCTCCAACACCAAGGTGGACAAAAGGGTGGAGCCGAAAAGCTGTGACAA |
| | | GACGCACACCTGCCCACCCTGCCCCGCCCCCGAGCTGCTGGGTGGCCCGAGC |
| | | GTGTTCCTGTTCCCGCCAAAACCCAAGGACACCCTGATGATCAGCCGGACCC |
| | | CCGAGGTGACCTGCGTGGTGGTGGACGTGAGCCACGAAGACCCCGAAGTCAA |
| | | GTTCAACTGGTATGTGGACGGCGTGGAGGTCCACAACGCCAAGACCAAGCCC |
| | | CGCGAGGAGCAGTACAACTCGACCTACAGGGTGGTGAGCGTGCTGACAGTGC |
| | | TCCACCAGGACTGGCTGAATGGCAAGGAGTATAAGTGCAAGGTGAGCAACAA |
| | | AGCGCTGCCCGCCCCCATCGAGAAGACCATCAGCAAGGCCAAGGGCCAACCC |
| | | AGGGAGCCCCAGGTCTATACCCTCCCCCCTAGCAGGGAGGAGATGACCAAAA |
| | | ACCAGGTGAGCCTCACCTGCCTGGTGAAGGGGTTCTATCCCAGCGACATCGC |
| | | CGTGGAGTGGGAAAGCAACGGGCAGCCCGAGAACAATTACAAGACCACCCCA |
| | | CCCGTGCTGGATTCCGACGGCTCGTTTTTCCTGTACAGCAAGCTGACCGTCG |
| | | ACAAGAGCAGGTGGCAACAGGGGAATGTGTTCAGCTGCAGCGTGATGCACGA |
| | | AGCCCTCCACAATCATTATACCCAGAAAAGCCTGAGCCTCAGCCCCGGCAAG |
| 465 | IPI_HC-CO20 | ATGGAGACACCCGCCCAGCTTTTGTTCCTCCTCCTCCTTTGGCTCCCCGACA |
| | | CCACCGGGCAGGTCCAGCTCGTCGAGTCCGGCGGCGGCGTCGTACAGCCCGG |
| | | CCGGAGCCTCAGGCTCAGCTGCGCCGCCTCCGGCTTCACCTTTAGCTCCTAC |
| | | ACCATGCACTGGGTCAGGCAAGCCCCAGGCAAGGGACTCGAGTGGGTCACCT |
| | | TTATTTCCTACGACGGGAATAATAAGTACTACGCAGACAGCGTAAAGGGCAG |
| | | GTTCACCATCTCCAGGGACAACTCGAAGAACACCCTCTACCTCCAGATGAAT |
| | | AGCCTGAGGGCGGAGGACACCGCCATCTATTACTGCGCGCGCACGGGCTGGC |
| | | TGGGCCCCTTCGACTACTGGGGCCAGGGCACACTGGTGACAGTGAGCAGCGC |
| | | CAGCACCAAGGGCCCAAGCGTGTTCCCCCTGGCCCCCAGCAGCAAGTCAACC |
| | | AGCGGCGGCACAGCGGCCCTGGGCTGCCTGGTGAAGGACTACTTCCCCGAGC |
| | | CCGTGACCGTGAGCTGGAACTCTGGCGCCCTGACCAGCGGCGTGCACACGTT |
| | | TCCCGCGGTACTGCAGAGCAGCGGACTCTACAGCCTGAGCTCCGTGGTGACG |
| | | GTGCCCAGCAGCTCCCTGGGCACCCAGACCTACATCTGCAACGTGAACCACA |
| | | AGCCCTCCAACACCAAGGTGGACAAAAGGGTGGAGCCGAAATCCTGTGACAA |
| | | GACCCACACGTGCCCGCCCTGCCCGGCCCCGGAGCTCCTGGGCGGCCCCTCC |
| | | GTGTTTCTGTTCCCGCCCAAGCCCAAGGACACCCTTATGATCAGCCGGACGC |
| | | CCGAGGTGACCTGCGTGGTGGTGGACGTGAGCCACGAAGACCCCGAGGTGAA |
| | | GTTCAACTGGTACGTCGACGGCGTAGAGGTGCACAATGCCAAGACGAAGCCC |
| | | CGGGAGGAGCAATACAACTCCACCTACCGCGTGGTGAGCGTGCTGACGGTCC |
| | | TCCACCAGGACTGGCTCAACGGTAAGGAGTATAAGTGTAAGGTGAGCAACAA |
| | | GGCCCTGCCCGCGCCCATAGAGAAGACCATTTCCAAGGCCAAGGGCCAGCCC |
| | | AGAGAGCCCCAAGTGTACACCCTGCCGCCAAGCCGGGAGGAGATGACAAAGA |
| | | ATCAGGTGTCCCTCACGTGCCTGGTGAAGGGATTCTACCCCTCCGACATCGC |
| | | CGTGGAGTGGGAGAGCAACGGGCAGCCGGAAAACAATTACAAAACCACCCCT |
| | | CCAGTGCTGGACAGTGACGGCAGCTTCTTTCTGTACTCCAAGCTGACCGTCG |
| | | ATAAGAGCCGGTGGCAGCAGGGCAACGTCTTTTCGTGCAGCGTGATGCACGA |
| | | GGCCCTGCACAACCACTACACCCAGAAAAGCCTGAGCCTGAGCCCGGGCAAG |
| 466 | IPI_HC-CO21 | ATGGAGACGCCGGCCCAGCTCCTCTTTCTCCTCCTCCTCTGGCTCCCCGACA |
| | | CCACCGGCCAGGTTCAGCTCGTCGAGAGCGGCGGAGGCGTCGTACAGCCCGG |
| | | GCGGAGCCTCAGGCTCAGCTGTGCCGCGAGCGGCTTCACCTTCAGCAGCTAC |
| | | ACCATGCACTGGGTCCGGCAGGCCCCCGGCAAGGGCCTCGAGTGGGTAACAT |
| | | TCATCTCCTACGACGGTAATAACAAGTACTACGCCGACAGCGTCAAGGGCAG |
| | | GTTCACCATCAGCAGGGATAACTCCAAGAACACCCTCTACCTGCAGATGAAC |
| | | AGCCTGCGGGCCGAAGACACCGCCATCTATTATTGCGCGAGGACCGGCTGGC |
| | | TGGGCCCCTTCGACTATTGGGGCCAGGGCACCCTGGTGACCGTGTCGAGCGC |
| | | CAGCACCAAGGGCCCCAGCGTGTTCCCCCTGGCCCCCAGCAGCAAGTCCACC |
| | | AGCGGCGGGACCGCCGCGCTGGGCTGTCTAGTGAAGGACTACTTCCCCGAGC |
| | | CCGTGACCGTGTCCTGGAACAGCGGTGCCCTGACCTCCGGCGTGCATACCTT |
| | | TCCGGCCGTGCTGCAGAGCAGCGGTCTGTACTCCCTCTCCAGCGTGGTGACC |
| | | GTCCCCAGCAGCAGCCTGGGGACTCAGACCTACATCTGCAACGTGAATCACA |
| | | AACCCTCCAACACCAAGGTGGATAAGAGGGTCGAGCCAAAGAGCTGTGACAA |
| | | GACCCACACCTGCCCGCCCTGCCCCGCCCCCGAGCTGCTGGGGGGCCCCAGC |
| | | GTCTTCCTGTTCCCGCCCAAGCCCAAGGACACGCTGATGATCAGCCGCACCC |
| | | CCGAGGTGACGTGCGTGGTGGTCGACGTGAGCCACGAGGACCCCGAGGTAAA |
| | | GTTCAACTGGTACGTGGACGGGGTGGAGGTGCATAACGCCAAGACCAAACCC |
| | | CGGGAGGAGCAGTACAATTCAACCTACCGGGTGGTGTCGGTCCTGACAGTGC |
| | | TGCACCAGGACTGGCTCAACGGCAAGGAATACAAGTGTAAAGTGAGCAATAA |
| | | GGCCCTCCCCGCGCCCATCGAGAAGACCATCTCCAAGGCCAAAGGCCAGCCC |
| | | AGGGAGCCCCAGGTGTACACCCTGCCCCCCAGCAGGGAGGAGATGACCAAGA |
| | | ACCAGGTGTCCCTGACTTGCCTCGTGAAAGGCTTCTACCCCAGCGATATAGC |
| | | CGTCGAGTGGGAAAGCAACGGCCAGCCCGAGAACAACTATAAGACCACGCCG |
| | | CCCGTGCTCGACTCTGACGGCAGCTTCTTTCTGTATAGCAAGCTGACCGTGG |
| | | ACAAGAGCAGGTGGCAGCAGGGCAACGTGTTCTCGTGCTCCGTGATGCATGA |
| | | GGCCCTGCATAATCATTACACCCAGAAAAGCCTGAGCCTGTCCCCCGGGAAG |
| 467 | IPI_HC-CO22 | ATGGAAACCCCAGCCCAACTCCTCTTCCTCCTCCTCCTATGGCTCCCGGACA |
| | | CCACAGGCCAGGTACAGCTCGTAGAGTCGGGCGGCGGCGTAGTCCAGCCCGG |
| | | AAGGAGCCTCCGGCTTAGCTGCGCCGCCTCCGGCTTCACCTTCTCGAGCTAC |
| | | ACCATGCACTGGGTCCGACAGGCCCCCGGCAAGGGGCTCGAGTGGGTCACCT |
| | | TCATCAGCTACGACGGGAACAACAAGTACTACGCCGACAGCGTCAAGGGCCG |
| | | GTTCACCATCTCGAGAGACAACAGCAAGAACACTCTCTACCTGCAGATGAAC |
| | | AGCCTGCGAGCCGAGGACACCGCCATCTACTACTGTGCCAGGACAGGATGGC |
| | | TGGGCCCCTTCGACTATTGGGGCCAAGGCACCCTCGTGACCGTGTCCAGCGC |
| | | GAGCACCAAGGGCCCCAGCGTGTTCCCCCTTGCCCCCAGCAGTAAATCCACA |
| | | AGCGGGGGCACGGCCGCCCTCGGATGCCTGGTGAAAGACTACTTCCCCGAGC |
| | | CCGTGACTGTGAGCTGGAACAGCGGGGCCCTTACCAGCGGCGTGCACACCTT |
| | | CCCCGCCGTGCTGCAGTCCAGCGGCCTGTACAGCCTGAGCAGCGTCGTGACC |
| | | GTGCCCTCTTCGTCTCTGGGCACCCAGACCTACATCTGCAACGTCAACCACA |
| | | AACCCAGCAATACTAAGGTGGACAAGCGAGTTGAGCCCAAAAGCTGCGACAA |
| | | GACCCACACCTGCCCGCCCTGCCCGGCCCCCGAGCTCCTGGGCGGGCCGAGC |
| | | GTCTTCCTGTTTCCCCCGAAGCCGAAGGATACCCTGATGATTAGCAGGACCC |
| | | CCGAGGTCACCTGCGTGGTGGTCGACGTGAGCCATGAGGACCCCGAGGTGAA |
| | | ATTTAACTGGTACGTGGATGGGGTGGAGGTGCATAACGCCAAGACCAAGCCC |
| | | AGGGAGGAGCAGTACAACAGCACGTATCGCGTGGTGTCGGTGCTGACCGTGC |
| | | TGCACCAGGACTGGCTGAACGGCAAGGAGTACAAGTGCAAGGTCAGCAACAA |
| | | GGCCCTGCCGGCCCCCATCGAGAAAACCATCAGCAAGGCCAAGGGGCAGCCC |
| | | CGGGAGCCCCAGGTCTATACTCTCCCTCCCTCCAGGGAAGAAATGACCAAGA |
| | | ACCAGGTGTCGCTGACTTGCCTGGTGAAGGGGTTCTACCCCTCCGACATCGC |
| | | GGTGGAGTGGGAGTCCAACGGTCAGCCCGAAAACAACTACAAGACGACCCCA |
| | | CCCGTGCTGGACAGCGACGGCTCCTTCTTCCTGTACTCGAAGCTGACTGTGG |
| | | ACAAGTCCCGCTGGCAGCAGGGGAACGTCTTTTCCTGCAGCGTGATGCACGA |
| | | GGCCCTACACAACCACTACACCCAGAAAAGCCTGTCGCTGTCCCCCGGGAAG |
| 468 | IPI_HC-CO23 | ATGGAGACACCCGCACAGCTCCTCTTCCTCCTCCTCCTTTGGCTCCCGGACA |
| | | CCACGGGGCAGGTCCAGCTCGTCGAGAGCGGGGGCGGCGTCGTACAGCCCGG |
| | | TAGGTCCCTTAGGCTCTCCTGCGCCGCCTCCGGCTTTACGTTTTCGAGCTAC |
| | | ACCATGCACTGGGTCCGCCAGGCCCCCGGCAAGGGCCTTGAGTGGGTCACCT |
| | | TCATCAGCTACGACGGCAACAACAAGTACTACGCCGATAGCGTCAAGGGCCG |
| | | CTTCACCATAAGCAGGGACAACTCCAAGAACACCCTCTACCTGCAGATGAAC |
| | | AGCCTCAGGGCGGAGGACACCGCCATCTACTACTGTGCCAGGACCGGCTGGC |
| | | TGGGCCCCTTCGACTACTGGGGCCAGGGGACGCTGGTGACGGTGAGCAGCGC |
| | | CTCCACCAAGGGCCCCAGCGTCTTCCCGCTGGCACCCAGCTCCAAGTCCACT |
| | | AGCGGCGGCACCGCCGCCCTGGGCTGCCTAGTGAAAGATTACTTTCCCGAAC |
| | | CCGTGACGGTGAGCTGGAACAGCGGCGCCCTGACCAGCGGAGTGCACACGTT |
| | | CCCCGCCGTCCTGCAGTCCTCGGGCCTGTACAGCCTGAGCTCCGTGGTCACC |
| | | GTGCCCTCCTCGAGCCTGGGCACCCAGACGTATATCTGCAACGTGAACCATA |
| | | AGCCATCGAATACCAAGGTGGATAAGAGGGTGGAACCGAAAAGCTGCGACAA |
| | | GACCCACACTTGCCCGCCCTGCCCGGCCCCCGAGCTGCTGGGCGGGCCCTCG |
| | | GTCTTTCTGTTCCCACCCAAGCCCAAGGACACCCTTATGATCAGCCGGACCC |
| | | CCGAGGTCACCTGCGTGGTGGTTGACGTGAGCCACGAGGATCCAGAGGTGAA |
| | | GTTCAATTGGTACGTGGATGGAGTCGAGGTGCACAACGCCAAAACCAAGCCC |
| | | CGCGAGGAGCAGTATAACAGCACCTATCGAGTGGTGAGCGTGCTTACCGTGC |
| | | TCCACCAGGACTGGCTGAACGGGAAGGAGTACAAGTGCAAGGTGTCCAACAA |
| | | GGCCCTGCCCGCCCCCATCGAGAAGACCATTTCCAAGGCCAAGGGGCAACCC |
| | | AGGGAGCCCCAAGTGTACACCCTGCCCCCCAGCCGCGAGGAGATGACGAAAA |
| | | ACCAGGTGTCCCTGACCTGCCTGGTCAAGGGCTTCTACCCCTCCGACATCGC |
| | | CGTGGAGTGGGAATCCAACGGCCAGCCCGAGAACAATTACAAGACAACCCCG |
| | | CCCGTGCTCGACTCCGACGGCAGCTTTTTCCTGTACAGCAAGCTGACCGTCG |
| | | ACAAGAGCCGTTGGCAGCAGGGGAACGTGTTCAGCTGCAGCGTCATGCACGA |
| | | GGCCCTGCACAACCATTATACTCAGAAAAGCCTGAGCCTGAGCCCCGGCAAG |
| 469 | IPI_HC-CO24 | ATGGAGACGCCGGCCCAACTCCTCTTCCTCCTCCTCCTCTGGCTCCCCGACA |
| | | CCACCGGCCAGGTTCAACTGGTCGAGTCGGGCGGGGGCGTCGTCCAGCCCGG |
| | | CCGGAGCCTCAGGCTCTCGTGCGCCGCCAGCGGTTTCACCTTCAGCAGCTAC |
| | | ACCATGCACTGGGTCCGACAGGCCCCCGGCAAGGGCCTCGAGTGGGTCACCT |
| | | TCATCAGCTACGACGGCAACAACAAATATTACGCCGACAGCGTAAAGGGCCG |
| | | GTTTACCATCAGCAGGGACAACTCCAAGAACACCCTCTACCTCCAGATGAAC |
| | | AGCCTGCGCGCCGAAGACACCGCCATCTACTACTGTGCCAGGACCGGCTGGC |
| | | TCGGCCCCTTCGACTACTGGGGGCAGGGGACCCTGGTGACCGTGTCATCGGC |
| | | CAGCACGAAGGGCCCCAGCGTCTTCCCCCTGGCGCCCTCCAGCAAGAGCACC |
| | | TCCGGCGGCACCGCCGCCCTGGGATGCCTGGTGAAGGATTACTTCCCGGAGC |
| | | CCGTGACAGTGTCCTGGAACTCCGGCGCACTGACCAGCGGCGTGCATACCTT |
| | | TCCCGCCGTGCTGCAGAGCAGCGGCCTGTATTCCCTGAGTAGCGTGGTGACC |
| | | GTGCCCTCCAGCAGCCTCGGGACCCAAACCTACATCTGCAATGTGAATCACA |
| | | AGCCGAGCAACACCAAGGTGGACAAGCGGGTGGAACCCAAGTCCTGCGATAA |
| | | GACCCACACCTGCCCGCCGTGCCCGGCCCCCGAGCTGCTGGGGGGTCCGAGC |
| | | GTGTTCCTGTTCCCGCCAAAGCCCAAGGACACGCTGATGATCTCGCGCACGC |
| | | CAGAGGTGACCTGCGTCGTGGTGGACGTGAGCCACGAGGACCCCGAGGTGAA |
| | | GTTCAACTGGTATGTCGACGGGGTCGAGGTGCACAACGCCAAGACCAAGCCC |
| | | CGGGAGGAGCAGTACAATTCCACCTACAGGGTGGTGTCCGTGCTGACCGTGC |
| | | TGCACCAGGACTGGCTCAATGGCAAGGAGTACAAGTGCAAGGTGAGCAACAA |
| | | GGCCCTGCCCGCCCCCATTGAGAAGACAATCTCCAAGGCCAAGGGTCAGCCA |
| | | AGGGAGCCCCAGGTGTACACGCTCCCGCCCAGCAGGGAGGAAATGACCAAGA |
| | | ACCAGGTGAGCCTGACCTGTCTGGTGAAGGGCTTCTACCCAAGCGACATCGC |
| | | CGTGGAATGGGAGTCCAACGGGCAGCCGGAGAACAACTACAAGACTACCCCG |
| | | CCCGTGCTGGACAGCGACGGCTCGTTCTTCCTGTACAGCAAGCTGACCGTGG |
| | | ACAAGAGCAGGTGGCAGCAGGGGAACGTATTTAGCTGCTCCGTGATGCACGA |
| | | GGCCCTGCACAACCATTACACCCAGAAGTCACTGAGCCTGAGCCCCGGAAAG |
| 470 | IPI_HC-CO25 | ATGGAGACTCCCGCCCAGCTACTCTTCCTCCTCCTCCTCTGGCTCCCGGACA |
| | | CCACCGGCCAGGTCCAGCTCGTCGAGAGCGGCGGCGGAGTCGTCCAGCCCGG |
| | | GCGCAGCCTTAGGCTCAGCTGCGCCGCCTCCGGCTTCACGTTCTCCTCCTAC |
| | | ACCATGCACTGGGTCAGGCAGGCCCCCGGCAAGGGCCTCGAGTGGGTTACGT |
| | | TTATCTCCTACGACGGGAACAACAAATACTACGCCGACTCCGTAAAGGGCAG |
| | | GTTCACCATCTCCAGGGACAACAGCAAAAACACGCTCTACCTGCAGATGAAC |
| | | AGCCTGCGGGCCGAGGACACGGCCATCTACTACTGCGCCAGGACGGGGTGGC |
| | | TGGGTCCCTTCGACTACTGGGGCCAGGGCACCCTGGTGACCGTGTCATCCGC |
| | | CTCCACCAAGGGGCCCTCAGTGTTCCCCCTGGCCCCCAGCAGCAAGAGCACC |
| | | TCCGGGGGGACCGCCGCCCTGGGCTGCCTCGTGAAAGACTACTTTCCCGAGC |
| | | CGGTCACCGTGTCCTGGAACAGCGGAGCCCTGACCTCGGGCGTGCACACCTT |
| | | CCCCGCCGTCCTCCAGTCCTCAGGCCTCTACAGCCTGTCAAGCGTGGTGACC |
| | | GTGCCCAGCAGCAGCCTGGGGACCCAGACTTACATCTGCAATGTGAACCACA |
| | | AGCCCAGCAATACCAAAGTGGACAAGAGGGTGGAGCCCAAATCCTGCGACAA |
| | | GACCCACACGTGTCCCCCTTGCCCCGCCCCTGAGCTGCTGGGCGGGCCCAGC |
| | | GTGTTCCTGTTTCCCCCCAAGCCGAAGGACACGCTCATGATCTCACGAACCC |
| | | CCGAAGTGACCTGCGTGGTGGTGGACGTGAGCCACGAGGACCCCGAGGTGAA |
| | | GTTCAACTGGTACGTGGATGGCGTGGAGGTGCACAACGCCAAGACCAAGCCC |
| | | CGAGAGGAGCAGTACAATTCCACCTACCGGGTGGTGTCCGTGCTAACCGTGC |
| | | TGCATCAGGATTGGCTGAATGGCAAGGAGTATAAATGCAAGGTGAGCAACAA |
| | | GGCCCTCCCCGCCCCCATCGAGAAGACCATCAGTAAGGCCAAAGGACAACCC |
| | | AGGGAGCCCCAGGTGTACACGCTGCCCCCAAGCAGGGAGGAAATGACCAAAA |
| | | ACCAGGTGAGCCTCACCTGCCTGGTGAAGGGTTTTTACCCCAGCGATATCGC |
| | | AGTGGAGTGGGAGAGCAACGGCCAGCCCGAGAACAATTACAAGACGACCCCT |
| | | CCCGTGCTGGACAGCGACGGGAGCTTCTTTCTCTACAGCAAGCTGACCGTGG |
| | | ACAAGAGCAGGTGGCAGCAGGGTAATGTGTTTAGCTGCAGCGTGATGCACGA |
| | | GGCGCTGCACAACCACTACACCCAGAAAAGCCTGAGCCTGTCCCCCGGGAAG |

[1209] Polynucleotide comprising one or more mRNAs encoding an antibody or an antigen binding portion thereof which specifically binds to CTLA-4: In certain embodiments, an anti-CTLA-4 polynucleotide of the present disclosure (e.g., one or more mRNAs encoding an antibody or an antigen binding portion thereof which specifically binds to CTLA-4) comprises
[1210] (i) a 5′ UTR, such as one of the 5′ UTR sequences disclosed below, comprising a 5′ cap provided below;
[1211] (ii) an ORF encoding an antibody or an antigen binding portion thereof which specifically binds to CTLA-4, e.g., an ORF disclosed in TABLE 1, TABLE 2 or TABLE 3 or a polynucleotide sequence encoding any of the protein sequences provided in TABLE 1 or TABLE 2 above or a combination thereof;
[1212] (iii) a stop codon,
[1213] (iv) a 3′ UTR, such as one of the 3′ UTR sequences disclosed below; and,
[1214] (v) a poly-A tail provided below.

[1215] In some embodiments, the anti-CTLA-4 polynucleotide further comprises a miRNA binding site, e.g., a miRNA binding site that binds to miRNA122. In some embodiments, the 3′UTR comprises the miRNA binding site.

[1216] In some embodiments, an anti-CTLA-4 polynucleotide of the present disclosure (e.g., a polynucleotide comprising one or more mRNAs encoding an antibody or an antigen binding portion thereof which specifically binds to CTLA-4) encodes a polypeptide sequence at least 80%, at least 81%, at least 82%, at least 83%, at least 84%, at least 85%, at least 86%, at least 87%, at least 88%, at least 89%, at least 90%, at least 91%, at least 92%, at least 93%, at least 94%, at least 95%, at least 96%, at least 97%, at least 98%, at least 99%, or 100% identical to any of the antibody heavy chains (HC) or light chains (LC) of TABLE 1, or to a subsequence thereof comprising, consisting, or consisting essentially of:
[1217] (i) one, two or three VH-CDRs;
[1218] (ii) one, two or three VL-CDRs;
[1219] (iii) a VH;
[1220] (iv) a VL;
[1221] (v) a HC;
[1222] (vi) a LC;
[1223] (vii) a fragment thereof; or,
[1224] (viii) a combination thereof.

### B. Cluster of Differentiation 80 (Cd80)

[1225] In some embodiments, the combination therapies disclosed herein comprise one or more CD80 polynucleotides (e.g., mRNAs), i.e., polynucleotides comprising one or more ORFs encoding a CD80 polypeptide (e.g., a CD80Fc fusion protein).

[1226] Cluster of Differentiation 80 (CD80), also known as B7-1, is a cell surface protein present on most antigen-presenting cells and it is involved in the costimulatory signal essential for T-lymphocyte activation. CD80 bind two receptors on the surface of T-cell: cluster of differentiation 28 (CD28) and cytotoxic T-lymphocyte antigen-4 (CTLA-4). CD80 provides critical costimulatory or inhibitory input to T cells via interaction with either CD28 (a T cell-expressed receptor providing a costimulatory response) or CTLA-4 (a T cell-expressed receptor providing an inhibitory response).

[1227] Binding of CD80 to CD28 promotes T cell activation and survival, whereas binding of CD80 to CTLA-4 acts to negatively regulate T-cell activation. Because of its important role in regulating T cell activity, the CD80 protein have been considered as drug targets in oncology. See, e.g., Brzostek J et al., Front. Immunol. 7(24) (2016). For example, researchers have investigated the antitumor effectiveness of administering a therapeutic comprising a fusion protein combining CD80's extracellular domain with IgG Fc. See Liu A et al., Clin. Cancer Res. 11(23):8492-8502 (2005).

[1228] CD80 is a member of the immunoglobulin superfamily, and is expressed as a dimer. The structure of CD80 comprises an extracellular domain (208 residues), a single transmembrane domain (21 residues), and an intracellular domain (25 residues). There are at least three isoforms of CD80, isoforms 1, 2, and 3.

[1229] The coding sequence (CDS) for wild type human CD80 canonical mRNA sequence, is described at the NCBI Reference Sequence database (RefSeq) under accession number NM_005191.3 (“Homo sapiens CD80 molecule (CD80), mRNA”). The wild type CD80 canonical protein sequence, isoform 1, is described at the RefSeq database under accession number NP_005182.1 (“T-lymphocyte activation antigen CD80 precursor [Homo sapiens]”). The CD80 isoform 2 (UniProtKB identifier P33681-2) comprises a substitution of a single Ser residue in place of amino acid residues 234-266 of the full length CD80 isoform 1, resulting in a soluble isoform of CCD8o. The CD8 isoform 3 (UnProtKB identifier P33681-3) comprises an A140G substitution and a deletion of amino acids 141-266, resulting in a soluble isoform of CD8. It is noted that the specific nucleic acid sequences encoding the reference protein sequence in the RefSeq sequences are the coding sequence (CDS) as indicated in the respective RefSeq database entry. The precursor form of CD80, isoform 1, is 288 amino acids in length, while its mature form (processed by removal of it signal peptide) is 254 amino acids long. See TABLE 4.

TABLE 4

| SEQ | | | |
|---|---|---|---|
| ID NO | Description | Sequence | Comments |
| 471 | Human CD80, | MGHTRRQGTSPSKCPYLNFFQLLVLAGLSHFCSGVIH | Isoform 1 |
| | isoform 1. | VTKEVKEVATLSCGHNVSVEELAQTRIYWQKEKKMVL | has been |
| | Protein | TMMSGDMNIWPEYKNRTIFDITNNLSIVILALRPSDE | chosen as |
| | sequence. | GTYECVVLKYEKDAFKREHLAEVTLSVKADFPTPSIS | the |
| | Signal peptide | DFEIPTSNIRRIICSTSGGFPEPHLSWLENGEELNAI | ‘canonical’ |
| | from position 1 | NTTVSQDPETELYAVSSKLDFNMTTNHSFMCLIKYGH | sequence. |
| | to 34 | LRVNQTFNWNTTKQEHFPDNLLPSWAITLISVNGIFV | All |
| | (underlined). | ICCLTYCFAPRCRERRRNERLRRESVRPV | positional |
| | EC from | | information |
| | position 35 to | | refers to the |
| | 242. | | positions in |
| | Cytoplasmic | | the |
| | domain from | | canonical |
| | position 264 to | | sequence. |
| | 288. TM helix | | |
| | from position | | |
| | 243 to 263. | | |
| 472 | Human CD80, | ATGGGCCACACACGGAGGCAGGGAACATCACCATCCA | |
| | isoform 1. | AGTGTCCATACCTCAATTTCTTTCAGCTCTTGGTGCT | |
| | Nucleic acid | GGCTGGTCTTTCTCACTTCTGTTCAGGTGTTATCCAC | |
| | sequence. | GTGACCAAGGAAGTGAAAGAAGTGGCAACGCTGTCCT | |
| | Underlined | GTGGTCACAATGTTTCTGTTGAAGAGCTGGCACAAAC | |
| | nucleobases | TCGCATCTACTGGCAAAAGGAGAAGAAAATGGTGCTG | |
| | indicate region | ACTATGATGTCTGGGGACATGAATATATGGCCCGAGT | |
| | encoding the | ACAAGAACCGGACCATCTTTGATATCACTAATAACCT | |
| | signal peptide; | CTCCATTGTGATCCTGGCTCTGCGCCCATCTGACGAG | |
| | Bold | GGCACATACGAGTGTGTTGTTCTGAAGTATGAAAAAG | |
| | nucleobases | ACGCTTTCAAGCGGGAACACCTGGCTGAAGTGACGTT | |
| | indicate region | ATCAGTCAAAGCTGACTTCCCTACACCTAGTATATCT | |
| | encoding the | GACTTTGAAATTCCAACTTCTAATATTAGAAGGATAA | |
| | extracellular | TTTGCTCAACCTCTGGAGGTTTTCCAGAGCCTCACCT | |
| | domain. | CTCCTGGTTGGAAAATGGAGAAGAATTAAATGCCATC | |
| | | AACACAACAGTTTCCCAAGATCCTGAAACTGAGCTCT | |
| | | ATGCTGTTAGCAGCAAACTGGATTTCAATATGACAAC | |
| | | CAACCACAGCTTCATGTGTCTCATCAAGTATGGACAT | |
| | | TTAAGAGTGAATCAGACCTTCAACTGGAATACAACCA | |
| | | AGCAAGAGCATTTTCCTGATAACCTGCTCCCATCCTG | |
| | | GGCCATTACCTTAATCTCAGTAAATGGAATTTTTGTG | |
| | | ATATGCTGCCTGACCTACTGCTTTGCCCCAAGATGCA | |
| | | GAGAGAGAAGGAGGAATGAGAGATTGAGAAGGGAAAG | |
| | | TGTACGCCCTGTATAACAGTGTCCGCAGAAGCAAGGG | |
| | | GCTGAAAAGATCTGAAGGTCCCACCTCCATTTGCAAT | |
| | | TGACCTCTTCTGGGAACTTCCTCAGATGGACAAGATT | |
| | | ACCCCACCTTGCCCTTTACGTATCTGCTCTTAGGTGC | |
| | | TTCTTCACTTCAGTTGCTTTGCAGGAAGTGTCTAGAG | |
| | | GAATATGGTGGGCACAGAAG | |
| 473 | CD80Fc | MGHTRRQGTSPSKCPYLNFFQLLVLAGLSHFCSGVIH | |
| | construct, | VTKEVKEVATLSCGHNVSVEELAQTRIYWQKEKKMVL | |
| | protein | TMMSGDMNIWPEYKNRTIFDITNNLSIVILALRPSDE | |
| | sequence. | GTYECVVLKYEKDAFKREHLAEVTLSVKADFPTPSIS | |
| | Signal peptide | DFEIPTSNIRRIICSTSGGFPEPHLSWLENGEELNAI | |
| | in italics, EC | NTTVSQDPETELYAVSSKLDFNMTTNHSFMCLIKYGH | |
| | domain of | LRVNQTFNWNTTKQEHFPDDKTHTCPPCPAPELLGGP | |
| | CD80 is | SVFLFPPKPKDTLMISRTPEVTCVVVDVSHEDPEVKF | |
| | underlined, | NWYVDGVEVHNAKTKPREEQYNSTYRVVSVLTVLHQD | |
| | Fc region in | WLNGKEYKCKVSNKALPAPIEKTISKAKGQPREPQVY | |
| | bold | TLPPSRDELTKNQVSLTCLVKGFYPSDIAVEWESNGQ | |
| | | PENNYKTTPPVLDSDGSFFLYSKLTVDKSRWQQGNVF | |
| | | SCSVMHEALHNHYTQKSLSLSPGK | |
| 474 | CD80Fc, | ATGGGCCACACACGGAGGCAGGGAACATCACCATCCA | |
| | nucleic acid | AGTGTCCATACCTCAATTTCTTTCAGCTCTTGGTGCT | |
| | sequence. | GGCTGGTCTTTCTCACTTCTGTTCAGGTGTTATCCAC | |
| | Region | GTGACCAAGGAAGTGAAAGAAGTGGCAACGCTGTCCT | |
| | encoding the | GTGGTCACAATGTTTCTGTTGAAGAGCTGGCACAAAC | |
| | signal peptide | TCGCATCTACTGGCAAAAGGAGAAGAAAATGGTGCTG | |
| | in italics. | ACTATGATGTCTGGGGACATGAATATATGGCCCGAGT | |
| | | ACAAGAACCGGACCATCTTTGATATCACTAATAACCT | |
| | | CTCCATTGTGATCCTGGCTCTGCGCCCATCTGACGAG | |
| | | GGCACATACGAGTGTGTTGTTCTGAAGTATGAAAAAG | |
| | | ACGCTTTCAAGCGGGAACACCTGGCTGAAGTGACGTT | |
| | | ATCAGTCAAAGCTGACTTCCCTACACCTAGTATATCT | |
| | | GACTTTGAAATTCCAACTTCTAATATTAGAAGGATAA | |
| | | ITTGCTCAACCTCTGGAGGTTTTCCAGAGCCTCACCT | |
| | | CTCCTGGTTGGAAAATGGAGAAGAATTAAATGCCATC | |
| | | AACACAACAGTTTCCCAAGATCCTGAAACTGAGCTCT | |
| | | ATGCTGTTAGCAGCAAACTGGATTTCAATATGACAAC | |
| | | CAACCACAGCTTCATGTGTCTCATCAAGTATGGACAT | |
| | | TTAAGAGTGAATCAGACCTTCAACTGGAATACAACCA | |
| | | AGCAAGAGCATTTTCCTGATGACAAAACTCACACATG | |
| | | CCCACCGTGCCCAGCACCTGAACTCCTGGGGGGACCG | |
| | | TCAGTCTTCCTCTTCCCCCCAAAACCCAAGGACACCC | |
| | | TCATGATCTCCCGGACCCCTGAGGTCACATGCGTGGT | |
| | | GGTGGACGTGAGCCACGAAGACCCTGAGGTCAAGTTC | |
| | | AACTGGTACGTGGACGGCGTGGAGGTGCATAATGCCA | |
| | | AGACAAAGCCGCGGGAGGAGCAGTACAACAGCACGTA | |
| | | CCGGGTGGTCAGCGTCCTCACCGTCCTGCACCAGGAC | |
| | | TGGCTGAATGGCAAGGAGTACAAGTGCAAGGTCTCCA | |
| | | ACAAAGCCCTCCCAGCCCCCATCGAGAAAACCATCTC | |
| | | CAAAGCCAAAGGGCAGCCCCGAGAACCACAGGTGTAC | |
| | | ACCCTGCCCCCATCCCGGGATGAGCTGACCAAGAACC | |
| | | AGGTCAGCCTGACCTGCCTGGTCAAAGGCTTCTATCC | |
| | | CAGCGACATCGCCGTGGAGTGGGAGAGCAATGGGCAG | |
| | | CCGGAGAACAACTACAAGACCACGCCTCCCGTGCTGG | |
| | | ACTCCGACGGCTCCTTCTTCCTCTACAGCAAGCTCAC | |
| | | CGTGGACAAGAGCAGGTGGCAGCAGGGGAACGTCTTC | |
| | | TCATGCTCCGTGATGCATGAGGCTCTGCACAACCACT | |
| | | ACACGCAGAAGAGCCTCTCCCTGTCTCCGGGTAAA | |

[1230] In certain embodiments, the combination therapies disclosed herein comprise a CD80 polynucleotide comprising a nucleic acid sequence encoding a CD80 polypeptide. In some embodiments, the CD80 polypeptide functions as an immune response co-stimulatory signal polypeptide. The CD80 polypeptide can be a full sequence CD80, a mature CD80 (i.e., without signal peptide), a fragment thereof having a CD80 activity, or a fusion protein thereof.

[1231] In some embodiments, the CD80 polypeptide comprises the extracellular domain (EC) of CD80 or a fragment thereof having a CD80 activity. In some embodiments, the CD80 polypeptide is a variant, i.e., a peptide or a polypeptide containing a substitution, and insertion and/or an addition, a deletion and/or a covalent modification with respect to the corresponding wild-type CD80 sequence.

[1232] As used herein, the term “CD80 polypeptide” refers to a polypeptide having CD80 activity, e.g., a polypeptide capable of interacting with CD28 and/or CTLA-4 and eliciting an immune response, e.g., activation of T cells on binding of CD28 or attenuation of T cell activation on binding of CTLA-4. As used herein the term “CD80 polynucleotide” refers to a polynucleotide comprising an ORF encoding a CD80 polypeptide disclosed herein.

[1233] In some embodiments, the CD80 polypeptide is a truncated variant of wild type CD80. In some embodiments, the CD80 polypeptide is the CD80, wherein the CD80 does not comprise a signaling peptide. In some embodiments, the CD80 polypeptide comprises the EC domain or a portion thereof having CD80 activity. In other embodiments, the CD80 polypeptide comprises the EC domain or a portion thereof having CD80 activity and all or part of the transmembrane domain. In other embodiments, the CD80 polypeptide comprises the EC domain and all or part of the cytoplasmic domain.

[1234] In certain embodiments, the CD80 polypeptide comprises amino acids 35-230, 35-231, 35-232, 35-233, 35-234, 35-235, 35-236, 35-237, 35-238, 35-239, 35-240, 35-241, or 35-242 of wild type CD80 isoform 1 (SEQ ID NO:471). In other embodiments, the CD80 polypeptide comprises amino acids 35-243, 35-244, 35-245, 35-246, 35-247, 35-248, 35-249, 35-250 of wild type CD80 isoform 1 (SEQ ID NO:471). In one embodiment, the CD80 polypeptide comprises amino acids 35-241 of wild type CD80 isoform 1 (SEQ ID NO:471). In another embodiment, the CD80 polypeptide comprises amino acids 35-242 of wild type CD80 isoform 1 (SEQ ID NO:471). In one particular embodiment, the CD80 polypeptide comprises amino acids 35-241 of SEQ ID NO:473 (CD80 Fc construct). In certain embodiments, the CD80 polypeptide comprises or consists or consists essentially of the EC domain or a portion thereof having CD80 activity, the TM domain, and the CP domain.

[1235] In some embodiments, the CD80 polypeptide comprises one or more amino acids of the TM domain of a full-length or mature CD80 polypeptide. In certain embodiments, the one or more amino acids of the TM domain comprises, consists of, or consists essentially of D, DK, DKT, DKTH (SEQ ID NO: 475), DKTHT (SEQ ID NO: 476), DKTHTC (SEQ ID NO: 477), or DKTHTCP (SEQ ID NO: 478).

[1236] In other embodiments, the CD80 polypeptide comprises one or more amino acids of the CP domain of a full-length or mature CD80 polypeptide. In certain embodiments, the one or more amino acids of the CP domain comprises, consists of, or consists essentially of F, FA, FAP, FAPR (SEQ ID NO: 479), FAPRC (SEQ ID NO: 480), FAPRCR (SEQ ID NO: 481), FAPRCRE (SEQ ID NO: 482), FAPRCRER (SEQ ID NO: 483), FAPRCRERR (SEQ ID NO: 484), FAPRCRERRR (SEQ ID NO: 485), FAPRCRERRRN (SEQ ID NO: 486), FAPRCRERRRNE (SEQ ID NO: 487), FAPRCRERRRNER (SEQ ID NO: 488), FAPRCRERRRNERL (SEQ ID NO: 489), FAPRCRERRRNERLR (SEQ ID NO: 490), FAPRCRERRRNERLRR (SEQ ID NO: 491), FAPRCRERRRNERLRRE (SEQ ID NO: 492), FAPRCRERRRNERLRRES (SEQ ID NO: 493), FAPRCRERRRNERLRRESV (SEQ ID NO: 494), FAPRCRERRRNERLRRESVR (SEQ ID NO: 495), FAPRCRERRRNERLRRESVRP (SEQ ID NO: 496), or FAPRCRERRRNERLRRESVRPV (SEQ ID NO: 497). In another embodiment, the CD80 polypeptide comprises a CP fragment consisting or consisting essentially of one, two, three, four, five, six, seven, eight, nine, ten, 11, 12, 13, 14, 15, 16, 17, 18, 19, 20, 21, 22, 23, 24, or 25 amino acids of a CP domain of a full-length or mature CD80 polypeptide.

[1237] In some embodiments, sequence tags or amino acids, can be added to the sequences encoded by the CD80 polynucleotides of the present disclosure (e.g., at the N-terminal or C-terminal ends), e.g., for localization. In some embodiments, amino acid residues located at the carboxy, amino terminal, or internal regions of a CD80 polypeptide disclosed herein (e.g., a CD80Fc) can optionally be deleted providing for fragments.

[1238] In some embodiments, the CD80 polynucleotide (e.g., a RNA, e.g., a mRNA) comprising a nucleotide sequence (e.g., an ORF) encoding a CD80 polypeptide encodes a substitutional variant of a CD80 sequence, which can comprise one, two, three or more than three substitutions. In some embodiments, the CD80 substitutional variant can comprise one or more conservative amino acids substitutions. In other embodiments, the CD80 variant is an insertional variant. In other embodiments, the CD80 variant is a deletional variant.

[1239] Certain compositions and methods presented in this disclosure refer to the protein or polynucleotide sequences of CD80. A person skilled in the art will understand that such disclosures are equally applicable to any other isoforms of CD80 known in the art.

[1240] In some embodiments, the CD80 polypeptide comprises an amino acid sequence at least about 80%, at least about 85%, at least about 90%, at least about 95%, at least about 95%, about 96%, at least about 97%, at least about 98%, at least about 99%, or about 100% identical to amino acids 35 to 241 of SEQ ID NO: 473 (i.e., the CD80Fc fusion polypeptide disclosed herein).

[1241] In other embodiments, the CD80 polypeptide comprises a CP domain of a full-length or mature CD80 polypeptide or an isoform thereof, a TM domain of a full-length or mature CD80 polypeptide, and an EC domain of a full-length or mature CD80 polypeptide or a portion thereof having a CD80 activity, wherein the CP domain has an amino acid sequence having at least about 80%, at least about 85%, at least about 90%, at least about 95%, at least about 95%, about 96%, at least about 97%, at least about 98%, at least about 99%, or about 100% identical to amino acids 264-288 of SEQ ID NO: 471, wherein the TM domain has an amino acid sequence having at least about 80%, at least about 85%, at least about 90%, at least about 95%, at least about 95%, about 96%, at least about 97%, at least about 98%, at least about 99%, or about 100% identical to amino acids 243-263 of SEQ ID NO: 471, and/or wherein the EC domain or the portion thereof has an amino acid sequence consisting at least about 80%, at least about 85%, at least about 90%, at least about 95%, at least about 95%, about 96%, at least about 97%, at least about 98%, at least about 99%, or about 100% identical to amino acids 35 to 241 of SEQ ID NO: 473 (i.e., the CD80Fc fusion polypeptide disclosed herein) or a corresponding portion thereof.

[1242] In certain embodiments, the CD80 polypeptide can be fused to a signal peptide. In one embodiment, the signal peptide is a naturally occurring CD80 signal peptide. In another embodiment, the signal peptide is a heterologous signal peptide. In other embodiments, the signal peptide comprises an amino acid sequence having at least about 80%, at least about 85%, at least about 90%, at least about 95%, at least about 95%, about 96%, at least about 97%, at least about 98%, at least about 99%, or about 100% identical to amino acids 1-34 of SEQ ID NO: 473.

[1243] In other embodiments, the CD80 polypeptide can be a fusion protein, which is fused to one or more heterologous polypeptide. In one embodiment, the CD80 polypeptide is fused to one or more Fc regions.

[1244] In some embodiments, the combination therapies disclosed herein comprise a polynucleotide comprising an ORF encoding any of the CD80 polypeptides, e.g., a CD80Fc polypeptide, disclosed herein, including the CD80 polypeptides encoding by the sequence-optimized polynucleotides disclosed herein.

[1245] CD80 fusions comprising fragment Crystallizable (Fc) Regions: In some embodiments, the CD80 polynucleotides used in the combination therapies disclosed herein comprise an ORF encoding a CD80 polypeptide genetically fused to a fragment crystallizable region (Fc) (see, e.g., SEQ ID NOs: 473 and 474 in TABLE 4). A fragment crystallizable (Fc) Region is portion of an immunoglobulin polypeptide that interacts with Fc receptors on the surface of cells, activating the immune response. Fc regions can further interact with other Fc regions to form homodimers through disulfide bonds. Engineered Fc regions can be fused to heterologous polypeptides for various purposes, including but not limited to in vivo half-life extension, immunohistochemistry, flow cytometry, binding assays, as Fc-fusion baits in microarray technologies, and to increase in vivo and in vitro solubility and/or stability.

[1246] As used herein, the terms “Fe region” or “Fc” refer to a polypeptide having an Fe activity, e.g., a polypeptide capable of interacting with an Fc receptor. In some embodiments, the Fc region is an IgG Fc region, e.g., IgG1 Fe, IgG2 Fe, IgG3 Fc, or IgG4 Fe, or a fragment thereof having an Fe activity.

[1247] In one particular embodiment, the Fc region is an IgG1 Fc region. In some embodiments, the Fc region comprises an amino acid sequence at least about 80%, at least about 85%, at least about 90%, at least about 95%, at least about 95%, about 96%, at least about 97%, at least about 98%, at least about 99%, or about 100% identical to the wild type amino acid sequence of IgG1 Fe (GenBank: AAC82527.1; “immunoglobulin gamma-1 heavy chain constant region, partial [Homo sapiens]”).

[1248] In other embodiments, the Fc region comprises an amino acid sequence having at least about 80%, at least about 85%, at least about 90%, at least about 95%, at least about 95%, about 96%, at least about 97%, at least about 98%, at least about 99%, or about 100% identical to amino acids 242-468 of SEQ ID NO: 473. In some embodiments, the Fc region or the fragment thereof is a variant, a peptide or a polypeptide containing a substitution, and insertion and/or an addition, a deletion and/or a covalent modification with respect to the corresponding wild-type Fc sequence.

[1249] In some embodiments, sequence tags or amino acids, can be added to the sequences encoded by the polynucleotides (e.g., at the N-terminal or C-terminal ends), e.g., for localization. In some embodiments, amino acid residues located at the carboxy, amino terminal, or internal regions of a polypeptide can optionally be deleted providing for fragments.

[1250] In some embodiments, the CD80 polynucleotide (e.g., a RNA, e.g., a mRNA) comprising a nucleotide sequence (e.g., an ORF) encoding a CD80 polypeptide, encodes a substitutional variant of an Fc sequence, which can comprise one, two, three or more than three substitutions. In some embodiments, the Fc substitutional variant can comprise one or more conservative amino acids substitutions. In other embodiments, the Fc variant is an insertional variant. In other embodiments, the Fc variant is a deletional variant.

[1251] Certain compositions and methods presented in this disclosure refer to the protein or polynucleotide sequences of Fc. A person skilled in the art will understand that such disclosures are equally applicable to any other Fc regions known in the art, e.g., Fc regions from other immunoglobulin proteins, or Fc regions comprising specific mutations to confer desirable characteristic to the Fe or Fc fusion protein, such as mutations to extend plasma half life.

[1252] In some embodiments, the Fc region is fused to a CD80 polypeptide or a portion thereof having a CD80 activity. In some embodiments, the CD80 polynucleotides used in the combination therapies disclosed herein comprise ORFs encoding any CD80Fc polypeptides encoded by the sequence-optimized polynucleotides disclosed herein.

[1253] CD80 Polynucleotides and Open Reading Frames (ORFs): The CD80 polynucleotides disclosed herein includes any polynucleotides (e.g., DNA or RNA, e.g., mRNA) that comprise a nucleotide sequence (e.g., an ORF) encoding one or more CD80 polypeptides; one or more Fc regions; and/or one or more CD80Fc fusion polypeptides.

[1254] In some embodiments, the CD80 polynucleotide encodes a CD80 polypeptide selected from:
[1255] (i) a CD80 polypeptide comprising an EC domain of CD80 with or without a signal peptide;
[1256] (ii) a CD80 polypeptide comprising an EC fragment comprising, consisting essentially of, or consisting of amino acids 35-230, 35-231, 35-232, 35-233, 35-234, 35-235, 35-236, 35-237, 35-238, 35-239, 35-240, 35-241, or 35-242 of wild type CD80 isoform 1 (SEQ ID NO: 471) with or without a signal peptide;
[1257] (iii) a CD80 comprising an EC domain of CD80 and one or more amino acids of the TM domain comprising, consisting of, or consisting essentially of D, DK, DKT, DKTH (SEQ ID NO: 475), DKTHT (SEQ ID NO: 476), DKTHTC (SEQ ID NO: 477), or DKTHTCP (SEQ ID NO: 478);
[1258] (iv) a CD80 comprising an EC domain of CD80 and one or more amino acids of the CP domain comprising, consisting of, or consisting essentially of F, FA, FAP, FAPR (SEQ ID NO: 479), FAPRC (SEQ ID NO: 480), FAPRCR (SEQ ID NO: 481), FAPRCRE (SEQ ID NO: 482), FAPRCRER (SEQ ID NO: 483), FAPRCRERR (SEQ ID NO: 484), FAPRCRERRR (SEQ ID NO: 485), FAPRCRERRRN (SEQ ID NO: 486), FAPRCRERRRNE (SEQ ID NO: 487), FAPRCRERRRNER (SEQ ID NO: 488), FAPRCRERRRNERL (SEQ ID NO: 489), FAPRCRERRRNERLR (SEQ ID NO: 490), FAPRCRERRRNERLRR (SEQ ID NO: 491), FAPRCRERRRNERLRRE (SEQ ID NO: 492), FAPRCRERRRNERLRRES (SEQ ID NO: 493), FAPRCRERRRNERLRRESV (SEQ ID NO: 494), FAPRCRERRRNERLRRESVR (SEQ ID NO: 495), FAPRCRERRRNERLRRESVRP (SEQ ID NO: 496), or FAPRCRERRRNERLRRESVRPV (SEQ ID NO: 497); and
[1259] (v) a fusion protein comprising (i) a CD80 polypeptide, a functional fragment or a variant thereof, and (ii) an Fc region.

[1260] In some embodiments, the CD80 polynucleotide can also encode:
[1261] (i) a CD80 polypeptide (e.g., having the same or essentially the same length as wild-type CD80 isoform 1, 2, or 3) with or without a signal peptide;
[1262] (ii) a CD80 functional fragment of any of the CD80 isoforms described herein (e.g., a truncated (e.g., deletion of carboxy, amino terminal, or internal regions) sequence shorter than one of wild-type isoforms 1, 2, or 3; but still retaining CD80 activity);
[1263] (iii) a CD80 variant thereof (e.g., full-length, mature, or truncated CD80 isoform 1, 2, or 3 proteins in which one or more amino acids have been replaced, e.g., variants that retain all or most of the CD80 activity of the polypeptide with respect to a reference isoform); or,
[1264] (iv) a CD80 fusion protein comprising (i) the CD80 polypeptide, a functional fragment, or a variant thereof, with or without a signal peptide and (ii) a heterologous protein, e.g., an Fc region.

[1265] In other embodiments, the CD80 polynucleotide can also encode:
[1266] (i) a wild-type Fc region (e.g., having the same or essentially the same length as wild-type Fc, e.g., IgG1 Fc);
[1267] (ii) an Fc functional fragment of an Fc regions known in the art (e.g., a truncated (e.g., deletion of carboxy, amino terminal, or internal regions) sequence);
[1268] (iii) an Fc variant thereof (e.g., full-length, mature, or truncated Fc regions in which one or more amino acids have been replaced, e.g., variants that retain all or most of the Fc activity of the polypeptide with respect to a reference Fc); or
[1269] (iv) an Fc fusion protein comprising (i) an Fc region, a functional fragment, or a variant thereof, and (ii) a heterologous protein, e.g., a CD80 polypeptide disclosed herein.

[1270] In certain embodiments, the encoded CD80 polypeptide, e.g., a CD80 polypeptide comprising the EC domain of CD80 or a functional portion thereof, is a mammalian CD80 polypeptide, such as a human CD80 polypeptide, a functional fragment or a variant thereof.

[1271] In some embodiments, the CD80 polynucleotide (e.g., a RNA, e.g., a mRNA) increases CD80 or Fc, protein expression levels and/or detectable CD80, e.g., a CD80 polypeptide comprising the EC domain of CD80 or a functional portion thereof, activity levels in cells when introduced in those cells, e.g., by at least 10%, at least 15%, at least 20%, at least 25%, at least 30%, at least 35%, at least 40%, at least 45%, at least 50%, at least 55%, at least 60%, at least 65%, at least 70%, at least 75%, at least 80%, at least 85%, at least 90%, at least 95%, or at least 100%, compared to CD80 protein expression levels and/or detectable CD80 activity levels in the cells prior to the administration of the CD80 polynucleotide.

[1272] The CD80 protein expression levels and/or CD80 activity can be measured according to methods know in the art. In some embodiments, the CD80 polynucleotide is introduced to the cells in vitro. In some embodiments, the CD80 polynucleotide is introduced to the cells in vivo.

[1273] In some embodiments, the CD80 polynucleotide (e.g., a RNA, e.g., a mRNA) comprises a codon optimized nucleic acid sequence, wherein the open reading frame (ORF) of the codon optimized nucleic sequence is derived from a wild-type CD80 sequence. For example, for CD80 polynucleotides comprising a sequence optimized ORF encoding CD80, the corresponding wild type sequence is the native CD80, isoform 1.

[1274] In some embodiments, the CD80 polynucleotide (e.g., a RNA, e.g., a mRNA) comprises a nucleotide sequence (e.g., an ORF) that encodes a CD80 polypeptide, e.g., a CD80 polypeptide comprising the EC domain of CD80 or a functional portion thereof, with mutations that do not alter CD80 activity. Such mutant CD80 polypeptides can be referred to as function-neutral. In some embodiments, the CD80 polynucleotide comprises an ORF that encodes a mutant CD80 polypeptide, e.g., a CD80 polypeptide comprising the EC domain of CD80 or a functional portion thereof, comprising one or more function-neutral point mutations.

[1275] In some embodiments, the mutant CD80 polypeptide has higher CD80 activity than the corresponding wild-type CD80. In some embodiments, the mutant CD80 polypeptide has a CD80 activity that is at least 10%, at least 15%, at least 20%, at least 25%, at least 30%, at least 35%, at least 40%, at least 45%, at least 50%, at least 55%, at least 60%, at least 65%, at least 70%, at least 75%, at least 80%, at least 85%, at least 90%, at least 95%, or at least 100% higher than the activity of the corresponding wild-type CD80

[1276] In some embodiments, the CD80 polynucleotide (e.g., a RNA, e.g., a mRNA) comprises a nucleotide sequence (e.g., an ORF) encoding a CD80 fragment that has higher CD80 activity than the corresponding full-length or mature CD80. Thus, in some embodiments the CD80 fragment, e.g., a CD80 polypeptide comprising the EC domain of CD80 or a functional portion thereof, has a CD80 activity which is at least 10%, at least 15%, at least 20%, at least 25%, at least 30%, at least 35%, at least 40%, at least 45%, at least 50%, at least 55%, at least 60%, at least 65%, at least 70%, at least 75%, at least 80%, at least 85%, at least 90%, at least 95%, or at least 100% higher than the CD80 activity of the corresponding full-length or mature CD80.

[1277] In some embodiments, the CD80 polynucleotide (e.g., a RNA, e.g., a mRNA) comprises a nucleotide sequence (e.g., an ORF) encoding a CD80 polypeptide, e.g., a CD80 polypeptide comprising the EC domain of CD80 or a functional portion thereof, that is at least 1%, 2%, 3%, 4%, 5%, 6%, 7%, 8%, 9%, 10, 1%, 12%, 13%, 14%, 15, 16%, 7%, 187%, 19%, 20%, 21%, 22%, 23%, 24%, or 25% shorter than the amino acid sequence as set forth in amino acids 35 to 241 of SEQ ID NO: 473.

[1278] In some embodiments, the CD80 polynucleotide (e.g., a RNA, e.g., a mRNA) comprises a nucleotide sequence (e.g., an ORF) encoding a CD80 polypeptide, e.g., a CD80 polypeptide comprising the EC domain of CD80 or a functional portion thereof, wherein the CD80 polypeptide comprises an amino acid sequence at least 70%, at least 75%, at least 80%, at least 85%, at least 90%, at least 95%, at least 96%, at least 97%, at least 98%, at least 99%, or 100% identical to amino acids 35 to 241 of SEQ ID NO: 473.

[1279] In some embodiments, the CD80 polynucleotide (e.g., a RNA, e.g., a mRNA) comprises a nucleotide sequence (e.g., an ORF) encoding a CD80 polypeptide, e.g., a CD80 polypeptide comprising the EC domain of CD80 or a functional portion thereof, wherein the CD80 polypeptide comprises a nucleotide sequence at least 60%, at least 65%, at least 70%, at least 75%, at least 80%, at least 85%, at least 90%, at least 95%, at least 96%, at least 97%, at least 98%, at least 99%, or 100% identical to nucleotides 103 to 723 of SEQ ID NO: 474.

[1280] In some embodiments, the CD80 polynucleotide (e.g., a RNA, e.g., a mRNA) comprises a nucleotide sequence (e.g., an ORF) encoding a CD80 polypeptide, wherein the nucleotide sequence has 85% to 100%, 90% to 100%, 95% to 100%, 80% to 95%, 85% to 95%, 85% to 90%, 90% to 95%, or 95% to 100% sequence identity to nucleotides 103 to 723 of SEQ ID NO: 474.

[1281] In some embodiments, the CD80 polynucleotide (e.g., a RNA, e.g., a mRNA) comprises a nucleotide sequence (e.g., an ORF) encoding a CD80 polypeptide, wherein the nucleotide sequence has 60% to 100%, 65% to 100%, 70% to 100%, 75% to 100%, 80% to 100%, 85% to 100%, 90% to 100%, 95% to 100%, 80% to 95%, 85% to 95%, 85% to 90%, 90% to 95%, or 95% to 100% sequence identity to SEQ ID NO: 474.

[1282] In some embodiments, the CD80 polynucleotide (e.g., a RNA, e.g., a mRNA) comprises a nucleotide sequence (e.g., an ORF) encoding a CD80 polypeptide, wherein the nucleotide sequence has at least 86%, at least 87%, at least 88%, at least 89%, at least 90%, at least 91%, at least 92%, at least 93%, at least 94%, at least 95%, at least 96%, at least 97%, at least 98%, at least 99%, or 100% sequence identity to nucleotides 103 to 723 of SEQ ID NOs: 498 or 508. See TABLE 5.

[1283] In some embodiments, the CD80 polynucleotide (e.g., a RNA, e.g., a mRNA) comprises a nucleotide sequence (e.g., an ORF) encoding a CD80 polypeptide, wherein the nucleotide sequence has at least 80%, at least 85%, at least 86%, at least 87%, at least 88%, at least 89%, at least 90%, at least 91%, at least 92%, at least 93%, at least 94%, at least 95%, at least 96%, at least 97%, at least 98%, at least 99%, or 100% sequence identity to SEQ ID NOs: 498 or 508. See TABLE 5.

[1284] In some embodiments, the CD80 polynucleotide (e.g., a RNA, e.g., a mRNA) comprises a nucleotide sequence (e.g., an ORF) encoding a CD80 polypeptide, wherein the nucleotide sequence has 86% to 100%, 90% to 100%, 86% to 95%, 86% to 90%, 90% to 95%, or 95% to 100% sequence identity to nucleotides 103 to 723 of SEQ ID NOs: 498 or 508. See TABLE 5.

[1285] In some embodiments, the CD80 polynucleotide (e.g., a RNA, e.g., a mRNA) comprises a nucleotide sequence (e.g., an ORF) encoding a CD80 polypeptide, wherein the nucleotide sequence has 80% to 100%, 85% to 100%, 86% to 100%, 90% to 100%, 86% to 95%, 86% to 90%, 90% to 95%, or 95% to 100% sequence identity to SEQ ID NOs: 498 or 508. See TABLE 5.

[1286] In some embodiments, the CD80 polynucleotide (e.g., a RNA, e.g., a mRNA) comprises a nucleotide sequence (e.g., an ORF) encoding a CD80 polypeptide, wherein the nucleotide sequence has at least 87%, at least 88%, at least 89%, at least 90%, at least 91%, at least 92%, at least 93%, at least 94%, at least 95%, at least 96%, at least 97%, at least 98%, at least 99%, or 100% sequence identity to nucleotides 103 to 723 of a sequence selected from the group consisting of SEQ ID NOs: 511, 513, and 515. See TABLE 5.

[1287] In some embodiments, the CD80 polynucleotide (e.g., a RNA, e.g., a mRNA) comprises a nucleotide sequence (e.g., an ORF) encoding a CD80 polypeptide, wherein the nucleotide sequence has at least 80%, at least 85%, at least 87%, at least 88%, at least 89%, at least 90%, at least 91%, at least 92%, at least 93%, at least 94%, at least 95%, at least 96%, at least 97%, at least 98%, at least 99%, or 100% sequence identity to a sequence selected from the group consisting of SEQ ID NOs: 511, 513, and 515. See TABLE 5.

[1288] In some embodiments, the CD80 polynucleotide (e.g., a RNA, e.g., a mRNA) comprises a nucleotide sequence (e.g., an ORF) encoding a CD80 polypeptide, wherein the nucleotide sequence has 87% to 100%, 90% to 100%, 87% to 95%, 87% to 90%, 90% to 95%, or 95% to 100% sequence identity to nucleotides 103 to 723 of a sequence selected from the group consisting of SEQ ID NO: 511, 513, and 515. See TABLE 5.

[1289] In some embodiments, the CD80 polynucleotide (e.g., a RNA, e.g., a mRNA) comprises a nucleotide sequence (e.g., an ORF) encoding a CD80 polypeptide, wherein the nucleotide sequence has 80% to 100%, 85% to 100%, 87% to 100%, 90% to 100%, 87% to 95%, 87% to 90%, 90% to 95%, or 95% to 100% sequence identity to SEQ ID NO: 511, 513, and 515. See TABLE 5.

[1290] In some embodiments, the CD80 polynucleotide (e.g., a RNA, e.g., a mRNA) comprises a nucleotide sequence (e.g., an ORF) encoding a CD80 polypeptide, wherein the nucleotide sequence has at least 88%, at least 89%, at least 90%, at least 91%, at least 92%, at least 93%, at least 94%, at least 95%, at least 96%, at least 97%, at least 98%, at least 99%, or 100% sequence identity to nucleotides 103 to 723 of a sequence selected from the group consisting of SEQ ID NOs: 501, 502, 514, 516, 518, and 522. See TABLE 5.

[1291] In some embodiments, the CD80 polynucleotide (e.g., a RNA, e.g., a mRNA) comprises a nucleotide sequence (e.g., an ORF) encoding a CD80 polypeptide, wherein the nucleotide sequence has at least 80%, at least 85%, at least 88%, at least 89%, at least 90%, at least 91%, at least 92%, at least 93%, at least 94%, at least 95%, at least 96%, at least 97%, at least 98%, at least 99%, or 100% sequence identity to a sequence selected from the group consisting of SEQ ID NOs: 501, 502, 514, 516, 518, and 522. See TABLE 5.

[1292] In some embodiments, the CD80 polynucleotide (e.g., a RNA, e.g., a mRNA) comprises a nucleotide sequence (e.g., an ORF) encoding a CD80 polypeptide, wherein the nucleotide sequence has 88% to 100%, 90% to 100%, 88% to 95%, 88% to 90%, 90% to 95%, or 95% to 100% sequence identity to nucleotides 103 to 723 of a sequence selected from the group consisting of SEQ ID NOs: 501, 502, 514, 516, 518, and 522. See TABLE 5.

[1293] In some embodiments, the CD80 polynucleotide (e.g., a RNA, e.g., a mRNA) comprises a nucleotide sequence (e.g., an ORF) encoding a CD80 polypeptide, wherein the nucleotide sequence has 80% to 100%, 85% to 100%, 88% to 100%, 90% to 100%, 88% to 95%, 88% to 90%, 90% to 95%, or 95% to 100% sequence identity to a sequence selected from the group consisting of SEQ ID NOs: 501, 502, 514, 516, 518, and 522. See TABLE 5.

[1294] In some embodiments, the CD80 polynucleotide (e.g., a RNA, e.g., a mRNA) comprises a nucleotide sequence (e.g., an ORF) encoding a CD80 polypeptide, wherein the nucleotide sequence has at least 89%, at least 90%, at least 91%, at least 92%, at least 93%, at least 94%, at least 95%, at least 96%, at least 97%, at least 98%, at least 99%, or 100% sequence identity to nucleotides 103 to 723 of a sequence selected from the group consisting of SEQ ID NOs: 505, 509, 510, 512, 520, and 521. See TABLE 5.

[1295] In some embodiments, the CD80 polynucleotide (e.g., a RNA, e.g., a mRNA) comprises a nucleotide sequence (e.g., an ORF) encoding a CD80 polypeptide, wherein the nucleotide sequence has at least 80%, at least 85%, at least 89%, at least 90%, at least 91%, at least 92%, at least 93%, at least 94%, at least 95%, at least 96%, at least 97%, at least 98%, at least 99%, or 100% sequence identity to a sequence selected from the group consisting of SEQ ID NOs: 505, 509, 510, 512, 520, and 521. See TABLE 5.

[1296] In some embodiments, the CD80 polynucleotide (e.g., a RNA, e.g., a mRNA) comprises a nucleotide sequence (e.g., an ORF) encoding a CD80 polypeptide, wherein the nucleotide sequence has 89% to 100%, 95% to 100%, or 89% to 95% sequence identity to nucleotides 103 to 723 of a sequence selected from the group consisting of SEQ ID NOs: 505, 509, 510, 512, 520, and 521. See TABLE 5.

[1297] In some embodiments, the CD80 polynucleotide (e.g., a RNA, e.g., a mRNA) comprises a nucleotide sequence (e.g., an ORF) encoding a CD80 polypeptide, wherein the nucleotide sequence has 80% to 100%, 85% to 100%, 89% to 100%, 95% to 100%, or 89% to 95% sequence identity to a sequence selected from the group consisting of SEQ ID NOs: 505, 509, 510, 512, 520, and 521. See TABLE 5.

[1298] In some embodiments, the CD80 polynucleotide (e.g., a RNA, e.g., a mRNA) comprises a nucleotide sequence (e.g., an ORF) encoding a CD80 polypeptide, wherein the nucleotide sequence has at least 90%, at least 91%, at least 92%, at least 93%, at least 94%, at least 95%, at least 96%, at least 97%, at least 98%, at least 99%, or 100% sequence identity to nucleotides 103 to 723 of a sequence selected from the group consisting of SEQ ID NOs: 499, 503, 506, 507, and 517. See TABLE 5.

[1299] In some embodiments, the CD80 polynucleotide (e.g., a RNA, e.g., a mRNA) comprises a nucleotide sequence (e.g., an ORF) encoding a CD80 polypeptide, wherein the nucleotide sequence has at least 80%, at least 85%, at least 90%, at least 91%, at least 92%, at least 93%, at least 94%, at least 95%, at least 96%, at least 97%, at least 98%, at least 99%, or 100% sequence identity to a sequence selected from the group consisting of SEQ ID NOs: 499, 503, 506, 507, and 517. See TABLE 5.

[1300] In some embodiments, the CD80 polynucleotide (e.g., a RNA, e.g., a mRNA) comprises a nucleotide sequence (e.g., an ORF) encoding a CD80 polypeptide, wherein the nucleotide sequence has 90% to 100%, 90% to 95%, or 95% to 100% sequence identity to nucleotides 103 to 723 of a sequence selected from the group consisting of SEQ ID NOs: 499, 503, 506, 507, and 517. See TABLE 5.

[1301] In some embodiments, the CD80 polynucleotide (e.g., a RNA, e.g., a mRNA) comprises a nucleotide sequence (e.g., an ORF) encoding a CD80 polypeptide, wherein the nucleotide sequence has 80% to 100%, 85% to 100%, 90% to 100%, 90% to 95%, or 95% to 100% sequence identity to a sequence selected from the group consisting of SEQ ID NOs: 499, 503, 506, 507, and 517. See TABLE 5.

[1302] In some embodiments, the CD80 polynucleotide (e.g., a RNA, e.g., a mRNA) comprises a nucleotide sequence (e.g., an ORF) encoding a CD80 polypeptide, wherein the nucleotide sequence has at least 91%, at least 92%, at least 93%, at least 94%, at least 95%, at least 96%, at least 97%, at least 98%, at least 99%, or 100% sequence to nucleotides 103 to 723 of SEQ ID NO: 504 or 519. See TABLE 5.

[1303] In some embodiments, the CD80 polynucleotide (e.g., a RNA, e.g., a mRNA) comprises a nucleotide sequence (e.g., an ORF) encoding a CD80 polypeptide, wherein the nucleotide sequence has at least 80%, at least 85%, at least 91%, at least 92%, at least 93%, at least 94%, at least 95%, at least 96%, at least 97%, at least 98%, at least 99%, or 100% sequence identity to SEQ ID NO: 504 or 519. See TABLE 5.

[1304] In some embodiments, the CD80 polynucleotide (e.g., a RNA, e.g., a mRNA) comprises a nucleotide sequence (e.g., an ORF) encoding a CD80 polypeptide, wherein the nucleotide sequence has 91% to 100%, 91% to 95%, or 95% to 100% sequence identity to nucleotides 103 to 723 of SEQ ID NO: 504 or 519. See TABLE 5.

[1305] In some embodiments, the CD80 polynucleotide (e.g., a RNA, e.g., a mRNA) comprises a nucleotide sequence (e.g., an ORF) encoding a CD80 polypeptide, wherein the nucleotide sequence has 80% to 100%, 85% to 100%, 90% to 100%, 91% to 100%, 91% to 95%, or 95% to 100% sequence identity to SEQ ID NO: 504 or 519. See TABLE 5.

[1306] In other embodiments, the CD80 polynucleotide (e.g., a RNA, e.g., a mRNA) comprises a nucleotide sequence (e.g., an ORF) encoding an Fc region, wherein the Fc region comprises an amino acid sequence at least 70%, at least 75%, at least 80%, at least 85%, at least 90%, at least 95%, at least 96%, at least 97%, at least 98%, at least 99%, or 100% identical to amino acids 242 to 468 of SEQ ID NO: 473.

[1307] In some embodiments, the CD80 polynucleotide (e.g., a RNA, e.g., a mRNA) comprises a nucleotide sequence (e.g., an ORF) encoding an Fc region, wherein the Fc region comprises a nucleotide sequence at least 60%, at least 65%, at least 70%, at least 75%, at least 80%, at least 85%, at least 90%, at least 95%, at least 96%, at least 97%, at least 98%, at least 99%, or 100% identical to nucleotides 724 to 1404 of SEQ ID NO: 474.

[1308] In some embodiments, the CD80 polynucleotide (e.g., a RNA, e.g., a mRNA) comprises a nucleotide sequence (e.g., an ORF) encoding an Fc region, wherein the nucleotide sequence has 85% to 100%, 90% to 100%, 95% to 100%, 80% to 95%, 85% to 95%, 85% to 90%, 90% to 95%, or 95% to 100% sequence identity to nucleotides 724 to 1404 of SEQ ID NO: 474.

[1309] In some embodiments, the CD80 polynucleotide (e.g., a RNA, e.g., a mRNA) comprises a nucleotide sequence (e.g., an ORF) encoding an Fc region, wherein the nucleotide sequence has 60% to 100%, 65% to 100%, 70% to 100%, 75% to 100%, 80% to 100%, 85% to 100%, 90% to 100%, 95% to 100%, 80% to 95%, 85% to 95%, 85% to 90%, 90% to 95%, or 95% to 100% sequence identity to SEQ ID NO: 474.

[1310] In some embodiments, the CD80 polynucleotide (e.g., a RNA, e.g., a mRNA) comprises a nucleotide sequence (e.g., an ORF) encoding an Fc region, wherein the nucleotide sequence has at least 86%, at least 87%, at least 88%, at least 89%, at least 90%, at least 91%, at least 92%, at least 93%, at least 94%, at least 95%, at least 96%, at least 97%, at least 98%, at least 99%, or 100% sequence identity to nucleotides 724 to 1404 of SEQ ID NO: 498 or 508. See TABLE 5.

[1311] In some embodiments, the CD80 polynucleotide (e.g., a RNA, e.g., a mRNA) comprises a nucleotide sequence (e.g., an ORF) encoding an Fc region, wherein the nucleotide sequence has at least 80%, at least 85%, at least 86%, at least 87%, at least 88%, at least 89%, at least 90%, at least 91%, at least 92%, at least 93%, at least 94%, at least 95%, at least 96%, at least 97%, at least 98%, at least 99%, or 100% sequence identity to SEQ ID NO: 498 or 508. See TABLE 5.

[1312] In some embodiments, the CD80 polynucleotide (e.g., a RNA, e.g., a mRNA) comprises a nucleotide sequence (e.g., an ORF) encoding an Fc region, wherein the nucleotide sequence has 86% to 100%, 90% to 100%, 86% to 95%, 86% to 90%, 90% to 95%, or 95% to 100% sequence identity to nucleotides 724 to 1404 of SEQ ID NO: 498 or 508. See TABLE 5.

[1313] In some embodiments, the CD80 polynucleotide (e.g., a RNA, e.g., a mRNA) comprises a nucleotide sequence (e.g., an ORF) encoding an Fc region, wherein the nucleotide sequence has 80% to 100%, 85% to 100%, 86% to 100%, 90% to 100%, 86% to 95%, 86% to 90%, 90% to 95%, or 95% to 100% sequence identity to SEQ ID NO: 498 or 508. See TABLE 5.

[1314] In some embodiments, the CD80 polynucleotide (e.g., a RNA, e.g., a mRNA) comprises a nucleotide sequence (e.g., an ORF) encoding an Fc region, wherein the nucleotide sequence has at least 87%, at least 88%, at least 89%, at least 90%, at least 91%, at least 92%, at least 93%, at least 94%, at least 95%, at least 96%, at least 97%, at least 98%, at least 99%, or 100% sequence identity to nucleotides 724 to 1404 of a sequence selected from the group consisting of SEQ ID NOs: 511, 513, and 515. See TABLE 5.

[1315] In some embodiments, the CD80 polynucleotide (e.g., a RNA, e.g., a mRNA) comprises a nucleotide sequence (e.g., an ORF) encoding an Fc region, wherein the nucleotide sequence has at least 80%, at least 85%, at least 87%, at least 88%, at least 89%, at least 90%, at least 91%, at least 92%, at least 93%, at least 94%, at least 95%, at least 96%, at least 97%, at least 98%, at least 99%, or 100% sequence identity to a sequence selected from the group consisting of SEQ ID NOs: 511, 513, and 515. See TABLE 5.

[1316] In some embodiments, the CD80 polynucleotide (e.g., a RNA, e.g., a mRNA) comprises a nucleotide sequence (e.g., an ORF) encoding an Fc region, wherein the nucleotide sequence has 87% to 100%, 90% to 100%, 87% to 95%, 87% to 90%, 90% to 95%, or 95% to 100% sequence identity to nucleotides 724 to 1404 of a sequence selected from the group consisting of SEQ ID NOs: 511, 513, and 515. See TABLE 5.

[1317] In some embodiments, the CD80 polynucleotide (e.g., a RNA, e.g., a mRNA) comprises a nucleotide sequence (e.g., an ORF) encoding an Fc region, wherein the nucleotide sequence has 80% to 100%, 85% to 100%, 87% to 100%, 90% to 100%, 87% to 95%, 87% to 90%, 90% to 95%, or 95% to 100% sequence identity to SEQ ID NOs: 511, 513, and 515. See TABLE 5.

[1318] In some embodiments, the CD80 polynucleotide (e.g., a RNA, e.g., a mRNA) comprises a nucleotide sequence (e.g., an ORF) encoding an Fc region, wherein the nucleotide sequence has at least 88%, at least 89%, at least 90%, at least 91%, at least 92%, at least 93%, at least 94%, at least 95%, at least 96%, at least 97%, at least 98%, at least 99%, or 100% sequence identity to nucleotides 724 to 1404 of a sequence selected from the group consisting of SEQ ID NOs: 501, 502, 514, 516, 518, and 522. See TABLE 5.

[1319] In some embodiments, the CD80 polynucleotide (e.g., a RNA, e.g., a mRNA) comprises a nucleotide sequence (e.g., an ORF) encoding an Fc region, wherein the nucleotide sequence has at least 80%, at least 85%, at least 88%, at least 89%, at least 90%, at least 91%, at least 92%, at least 93%, at least 94%, at least 95%, at least 96%, at least 97%, at least 98%, at least 99%, or 100% sequence identity to a sequence selected from the group consisting of SEQ ID NOs: 501, 502, 514, 516, 518, and 522. See TABLE 5.

[1320] In some embodiments, the CD80 polynucleotide (e.g., a RNA, e.g., a mRNA) comprises a nucleotide sequence (e.g., an ORF) encoding an Fc region, wherein the nucleotide sequence has 88% to 100%, 90% to 100%, 88% to 95%, 88% to 90%, 90% to 95%, or 95% to 100% sequence identity to nucleotides 724 to 1404 of a sequence selected from the group consisting of SEQ ID NOs: 501, 502, 514, 516, 518, and 522. See TABLE 5.

[1321] In some embodiments, the CD80 polynucleotide (e.g., a RNA, e.g., a mRNA) comprises a nucleotide sequence (e.g., an ORF) encoding an Fc region, wherein the nucleotide sequence has 80% to 100%, 85% to 100%, 88% to 100%, 90% to 100%, 88% to 95%, 88% to 90%, 90% to 95%, or 95% to 100% sequence identity to a sequence selected from the group consisting of SEQ ID NOs: 501, 502, 514, 516, 518, and 522. See TABLE 5.

[1322] In some embodiments, the CD80 polynucleotide (e.g., a RNA, e.g., a mRNA) comprises a nucleotide sequence (e.g., an ORF) encoding an Fc region, wherein the nucleotide sequence has at least 89%, at least 90%, at least 91%, at least 92%, at least 93%, at least 94%, at least 95%, at least 96%, at least 97%, at least 98%, at least 99%, or 100% sequence identity to nucleotides 724 to 1404 of a sequence selected from the group consisting of SEQ ID NOs: 505, 509, 510, 512, 520, and 521. See TABLE 5.

[1323] In some embodiments, the CD80 polynucleotide (e.g., a RNA, e.g., a mRNA) comprises a nucleotide sequence (e.g., an ORF) encoding an Fc region, wherein the nucleotide sequence has at least 80%, at least 85%, at least 89%, at least 90%, at least 91%, at least 92%, at least 93%, at least 94%, at least 95%, at least 96%, at least 97%, at least 98%, at least 99%, or 100% sequence identity to a sequence selected from the group consisting of SEQ ID NOs: 505, 509, 510, 512, 520, and 521. See TABLE 5.

[1324] In some embodiments, the CD80 polynucleotide (e.g., a RNA, e.g., a mRNA) comprises a nucleotide sequence (e.g., an ORF) encoding an Fc region, wherein the nucleotide sequence has 89% to 100%, 95% to 100%, or 89% to 95% sequence identity to nucleotides 724 to 1404 of a sequence selected from the group consisting of SEQ ID NOs: 505, 509, 510, 512, 520, and 521. See TABLE 5.

[1325] In some embodiments, the CD80 polynucleotide (e.g., a RNA, e.g., a mRNA) comprises a nucleotide sequence (e.g., an ORF) encoding an Fc region, wherein the nucleotide sequence has 80% to 100%, 85% to 100%, 89% to 100%, 95% to 100%, or 89% to 95% sequence identity to a sequence selected from the group consisting of SEQ ID NOs: 505, 509, 510, 512, 520, and 521. See TABLE 5.

[1326] In some embodiments, the CD80 polynucleotide (e.g., a RNA, e.g., a mRNA) comprises a nucleotide sequence (e.g., an ORF) encoding an Fc region, wherein the nucleotide sequence has at least 90%, at least 91%, at least 92%, at least 93%, at least 94%, at least 95%, at least 96%, at least 97%, at least 98%, at least 99%, or 100% sequence identity to nucleotides 724 to 1404 of a sequence selected from the group consisting of SEQ ID NOs: 499, 503, 506, 507, and 517. See TABLE 5.

[1327] In some embodiments, the CD80 polynucleotide (e.g., a RNA, e.g., a mRNA) comprises a nucleotide sequence (e.g., an ORF) encoding an Fc region, wherein the nucleotide sequence has at least 80%, at least 85%, at least 90%, at least 91%, at least 92%, at least 93%, at least 94%, at least 95%, at least 96%, at least 97%, at least 98%, at least 99%, or 100% sequence identity to a sequence selected from the group consisting of SEQ ID NOs: 499, 503, 506, 507, and 517. See TABLE 5.

[1328] In some embodiments, the CD80 polynucleotide (e.g., a RNA, e.g., a mRNA) comprises a nucleotide sequence (e.g., an ORF) encoding an Fc region, wherein the nucleotide sequence has 90% to 100%, 90% to 95%, or 95% to 100% sequence identity to nucleotides 724 to 1404 of a sequence selected from the group consisting of SEQ ID NOs: 499, 503, 506, 507, and 517. See TABLE 5.

[1329] In some embodiments, the CD80 polynucleotide (e.g., a RNA, e.g., a mRNA) comprises a nucleotide sequence (e.g., an ORF) encoding an Fc region, wherein the nucleotide sequence has 80% to 100%, 85% to 100%, 90% to 100%, 90% to 95%, or 95% to 100% sequence identity to a sequence selected from the group consisting of SEQ ID NOs: 499, 503, 506, 507, and 517. See TABLE 5.

[1330] In some embodiments, the CD80 polynucleotide (e.g., a RNA, e.g., a mRNA) comprises a nucleotide sequence (e.g., an ORF) encoding an Fc region, wherein the nucleotide sequence has at least 91%, at least 92%, at least 93%, at least 94%, at least 95%, at least 96%, at least 97%, at least 98%, at least 99%, or 100% sequence to nucleotides 724 to 1404 of SEQ ID NO: 504 or 519. See TABLE 5.

[1331] In some embodiments, the CD80 polynucleotide (e.g., a RNA, e.g., a mRNA) comprises a nucleotide sequence (e.g., an ORF) encoding an Fc region, wherein the nucleotide sequence has at least 80%, at least 85%, at least 91%, at least 92%, at least 93%, at least 94%, at least 95%, at least 96%, at least 97%, at least 98%, at least 99%, or 100% sequence identity to SEQ ID NO: 504 or 519. See TABLE 5.

[1332] In some embodiments, the CD80 polynucleotide (e.g., a RNA, e.g., a mRNA) comprises a nucleotide sequence (e.g., an ORF) encoding an Fc region, wherein the nucleotide sequence has 91% to 100%, 91% to 95%, or 95% to 100% sequence identity to nucleotides 724 to 1404 of SEQ ID NO: 504 or 519. See TABLE 5.

[1333] In some embodiments, the CD80 polynucleotide (e.g., a RNA, e.g., a mRNA) comprises a nucleotide sequence (e.g., an ORF) encoding an Fc region, wherein the nucleotide sequence has 80% to 100%, 85% to 100%, 90% to 100%, 91% to 100%, 91% to 95%, or 95% to 100% sequence identity to SEQ ID NO: 504 or 519. See TABLE 5.

[1334] In some embodiments, the CD80 polynucleotide (e.g., a RNA, e.g., a mRNA) comprises from about 600 to about 100,000 nucleotides (e.g., from 600 to 650, from 600 to 675, from 600 to 700, from 600 to 725, from 600 to 750, from 600 to 775, from 600 to 800, from 600 to 900, from 600 to 1000, from 600 to 1100, from 600 to 1200, from 600 to 1300, from 600 to 1400, from 600 to 1500, from 700 to 800, from 700 to 900, from 700 to 1000, from 700 to 1100, from 700 to 1200, from 700 to 1300, from 700 to 1400, from 700 to 1500, from 753 to 800, from 753 to 900, from 753 to 1000, from 753 to 1200, from 753 to 1400, from 753 to 1600, from 753 to 1800, from 753 to 2000, from 753 to 3000, from 753 to 5000, from 753 to 7000, from 753 to 10,000, from 753 to 25,000, from 753 to 50,000, from 753 to 70,000, or from 753 to 100,000.).

[1335] In some embodiments, the CD80 polynucleotide (e.g., a RNA, e.g., a mRNA) comprises a nucleotide sequence (e.g., an ORF) encoding a CD80 polypeptide, e.g., a CD80 polypeptide comprising the EC domain of CD80 or a functional portion thereof, wherein the length of the nucleotide sequence (e.g., an ORF) is at least 300 nucleotides in length (e.g., at least or greater than about 300, 400, 500, 600, 700, 750, 753, 800, 900, 1000, 1100, 1200, 1300, 1400, 1500, 1600, 1700, 1800, 1900, 2000, 2100, 2200, 2300, 2400, 2500, 2600, 2700, 2800, 2900, 3000, 3100, 3200, 3300, 3400, 3500, 3600, 3700, 3800, 3900, 4000, 4100, 4200, 4300, 4400, 4500, 4600, 4700, 4800, 4900, 5000, 5100, 5200, 5300, 5400, 5500, 5600, 5700, 5800, 5900, 6000, 7000, 8000, 9000, 10,000, 20,000, 30,000, 40,000, 50,000, 60,000, 70,000, 80,000, 90,000 or up to and including 100,000 nucleotides).

[1336] In some embodiments, the CD80 polynucleotide (e.g., a RNA, e.g., a mRNA) comprises a nucleotide sequence (e.g., an ORF) encoding a CD80 polypeptide, e.g., a CD80 polypeptide comprising the EC domain of CD80 or a functional portion thereof, that further comprises at least one nucleic acid sequence that is noncoding, e.g., a miRNA binding site.

[1337] In some embodiments, the CD80 polynucleotide (e.g., a RNA, e.g., a mRNA) comprises a nucleotide sequence (e.g., an ORF) encoding a CD80 polypeptide, e.g., a CD80 polypeptide comprising the EC domain of CD80 or a functional portion thereof, that is single stranded or double stranded.

[1338] In some embodiments, the CD80 polynucleotide comprising a nucleotide sequence (e.g., an ORF) encoding a CD80 polypeptide, e.g., a CD80 polypeptide comprising the EC domain of CD80 or a functional portion thereof, is DNA or RNA. In some embodiments, the CD80 polynucleotide is RNA. In some embodiments, the CD80 polynucleotide is, or functions as, a messenger RNA (mRNA). In some embodiments, the mRNA comprises a nucleotide sequence (e.g., an ORF) that encodes at least one CD80 polypeptide, e.g., a CD80 polypeptide comprising the EC domain of CD80 or a functional portion thereof, and is capable of being translated to produce the encoded CD80 polypeptide, e.g., a CD80 polypeptide comprising the EC domain of CD80 or a functional portion thereof, in vitro, in vivo, in situ or ex vivo.

[1339] In some embodiments, the CD80 polynucleotide (e.g., a RNA, e.g., a mRNA) comprises a sequence-optimized nucleotide sequence (e.g., an ORF) encoding a CD80 polypeptide, e.g., the wild-type sequence, functional fragment, or variant thereof, wherein the CD80 polynucleotide comprises at least one chemically modified nucleobase, e.g., 5-methoxyuracil. In some embodiments, the CD80 polynucleotide further comprises a miRNA binding site, e.g., a miRNA binding site that binds to miR-122 In some embodiments, the CD80 polynucleotide disclosed herein is formulated with a delivery agent, e.g., a compound having Formula (I), e.g., any of Compounds 1-147.

[1340] CD80 Signal Sequences: The CD80 polynucleotides (e.g., a RNA, e.g., a mRNA) used in the combination therapies disclosed herein can comprise nucleotide sequences that encode additional features that facilitate trafficking of the encoded polypeptides to therapeutically relevant sites. One such feature that aids in protein trafficking is the signal sequence, or targeting sequence. In some embodiments, the CD80 polynucleotide (e.g., a RNA, e.g., a mRNA) comprises a nucleotide sequence (e.g., an ORF) that encodes a signal peptide operably linked a nucleotide sequence that encodes a CD80 polypeptide, e.g., a CD80 polypeptide comprising the EC domain of CD80 or a functional portion thereof, described herein.

[1341] In some embodiments, such signal sequence or signal peptide is a polynucleotide or polypeptide, respectively, which is from about 9 to 200 nucleotides (3-70 amino acids) in length that, optionally, is incorporated at the 5′ (or N-terminus) of the coding region or the CD80 polypeptide, respectively. Addition of these sequences results in trafficking the encoded CD80 polypeptide to a desired site, such as the endoplasmic reticulum or the mitochondria through one or more targeting pathways. Some signal peptides are cleaved from the protein, for example by a signal peptidase after the proteins are transported to the desired site.

[1342] In some embodiments, the CD80 polynucleotide comprises a nucleotide sequence encoding a CD80 polypeptide, e.g., a CD80 polypeptide comprising the EC domain of CD80 or a functional portion thereof, wherein the nucleotide sequence further comprises a 5′ nucleic acid sequence encoding a signal peptide.

[1343] In one embodiment, a signal peptide is a naturally occurring CD80 signal peptide, e.g., the signal peptide corresponding to amino acids 1-34 of wild-type CD80. In other embodiments, the signal peptide is a heterologous signal peptide. In some embodiments, the signal peptide comprises an amino acid sequence having at least about 80%, at least about 85%, at least about 90%, at least about 95%, at least about 95%, about 96%, at least about 97%, at least about 98%, at least about 99%, or about 100% identical to amino acids 1 to 34 of SEQ ID NO: 473.

[1344] CD80 Fusion Proteins: In some embodiments, the CD80 polynucleotide (e.g., a RNA, e.g., a mRNA) can comprise more than one nucleic acid sequence (e.g., an ORF) encoding a polypeptide of interest. In some embodiments, CD80 polynucleotides comprise a single ORF encoding a CD80 polypeptide, e.g., a CD80 polypeptide comprising the EC domain of CD80, a functional fragment, or a variant thereof. However, in some embodiments, the CD80 polynucleotide can comprise more than one ORF, for example, a first ORF encoding a CD80 polypeptide (a first polypeptide of interest), a functional fragment, or a variant thereof, and a second ORF expressing a second polypeptide of interest.

[1345] In some embodiments, two or more polypeptides of interest can be genetically fused, i.e., two or more polypeptides can be encoded by the same ORF. In some embodiments, the CD80 polynucleotide can comprise a nucleic acid sequence encoding a linker (e.g., a G4S peptide linker or another linker known in the art) between two or more polypeptides of interest.

[1346] In some embodiments, the CD80 polynucleotide (e.g., a RNA, e.g., a mRNA) can comprise two, three, four, or more ORFs, each expressing a polypeptide of interest. In some embodiments, the CD80 polynucleotide (e.g., a RNA, e.g., a mRNA) can comprise a first nucleic acid sequence (e.g., a first ORF) encoding a CD80 polypeptide, e.g., a CD80 polypeptide comprising the EC domain of CD80 or a functional portion thereof, and a second nucleic acid sequence (e.g., a second ORF) encoding a second polypeptide of interest.

[1347] In some embodiments, the CD80 polynucleotide (e.g., a RNA, e.g., a mRNA) can comprise a first nucleic acid sequence (e.g., a first ORF) encoding a CD80 polypeptide, e.g., a CD80 polypeptide comprising the EC domain of CD80 or a functional portion thereof, and a second nucleic acid sequence (e.g., a second ORF) encoding an Fc region.

[1348] Sequence-Optimized Nucleotide Sequences Encoding CD80 Polypeptides: In some embodiments, the CD80 polynucleotide comprises a sequence-optimized nucleotide sequence encoding a CD80 polypeptide, e.g., a CD80 polypeptide comprising the EC domain of CD80 or a functional portion thereof, e.g., a CD80Fc fusion polypeptide comprising the EC domain of CD80 or a functional portion thereof fused to an Fc region. In some embodiments, the CD80 polynucleotide comprises an open reading frame (ORF) encoding a CD80 polypeptide, e.g., CD80Fc, wherein the ORF has been sequence optimized

[1349] Exemplary sequence-optimized polynucleotide sequences encoding CD80Fc are shown in TABLE 5. In some embodiments, the sequence optimized CD80Fc polynucleotides in TABLE 5, fragments, and variants thereof are used to practice the methods disclosed herein.

TABLE 5
Sequence optimized sequences for CD80Fc

| SEQ | | |
|---|---|---|
| ID NO | Name | Sequence |
| 498 | CD80_Fc-CO01 | ATGGGCCACACGAGGCGCCAGGGCACCAGCCCCAGCAAGTGCCCGTACCTTAATTTCTTCCA |
| | | ACTTCTCGTCCTCGCCGGCCTCAGCCACTTTTGCTCCGGCGTCATCCACGTCACCAAGGAGG |
| | | TCAAGGAGGTTGCCACCCTCTCGTGCGGGCACAACGTGTCCGTCGAGGAGCTCGCCCAGACC |
| | | AGGATCTACTGGCAGAAAGAGAAGAAGATGGTCCTCACCATGATGAGCGGCGACATGAATAT |
| | | CTGGCCCGAGTACAAAAATAGGACCATCTTCGACATCACGAATAATCTTTCCATCGTGATCC |
| | | TGGCGCTGAGGCCGAGCGATGAGGGCACCTACGAATGCGTGGTGCTGAAATACGAGAAGGAC |
| | | GCCTTCAAGCGGGAGCACCTTGCGGAAGTGACCCTGTCCGTGAAGGCGGATTTTCCGACCCC |
| | | CAGCATCAGCGATTTCGAGATCCCTACCAGCAACATCCGGAGGATCATCTGCTCCACCTCCG |
| | | GCGGCTTCCCCGAGCCCCACCTGTCCTGGCTGGAAAATGGGGAGGAGCTCAACGCCATCAAC |
| | | ACCACCGTGTCCCAGGACCCCGAGACGGAGCTGTACGCCGTGAGCTCCAAACTGGATTTCAA |
| | | CATGACCACCAACCACTCCTTCATGTGTCTGATCAAATACGGCCACCTGCGCGTGAACCAAA |
| | | CCTTCAATTGGAACACCACCAAGCAGGAGCACTTCCCCGACGACAAGACCCACACCTGCCCG |
| | | CCGTGCCCCGCCCCCGAGCTGCTTGGAGGGCCGAGCGTGTTCCTGTTCCCGCCCAAGCCCAA |
| | | GGACACCCTGATGATCTCCCGAACCCCCGAGGTCACCTGCGTGGTGGTGGATGTGAGCCACG |
| | | AGGACCCCGAGGTGAAGTTCAACTGGTACGTGGACGGCGTGGAGGTCCACAATGCCAAGACG |
| | | AAGCCCAGGGAGGAGCAATACAACTCCACTTACAGGGTCGTCAGCGTGCTGACCGTGCTCCA |
| | | CCAGGACTGGCTCAACGGCAAGGAGTACAAGTGTAAGGTCAGCAACAAGGCCCTGCCCGCAC |
| | | CCATCGAGAAGACCATCAGCAAGGCCAAAGGCCAACCCCGCGAGCCCCAGGTGTACACCCTG |
| | | CCCCCTAGCAGGGACGAACTGACCAAGAACCAGGTGAGCCTGACCTGCCTGGTGAAGGGGTT |
| | | CTACCCCAGCGATATCGCCGTGGAGTGGGAGTCCAATGGCCAGCCCGAAAACAATTACAAGA |
| | | CCACGCCGCCCGTCCTGGACAGCGATGGCAGCTTCTTCCTGTACAGCAAGCTGACCGTCGAC |
| | | AAGTCCAGGTGGCAGCAGGGCAACGTGTTTTCCTGCAGCGTGATGCACGAGGCCCTGCACAA |
| | | CCACTACACCCAAAAATCCCTCAGCCTGTCCCCGGGCAAG |
| 499 | CD80_Fc-CO02 | ATGGGCCACACCCGCAGGCAGGGGACCTCCCCCTCCAAGTGCCCCTACCTCAACTTTTTCCA |
| | | GCTACTCGTACTCGCAGGGCTCAGCCACTTTTGCTCCGGAGTGATCCACGTCACCAAGGAGG |
| | | TTAAAGAGGTCGCCACTCTCAGCTGTGGACACAACGTCTCCGTCGAGGAACTAGCCCAGACA |
| | | AGGATCTACTGGCAGAAGGAGAAGAAGATGGTTCTCACCATGATGAGCGGAGACATGAACAT |
| | | CTGGCCCGAGTACAAGAACCGTACCATCTTCGACATCACCAACAATCTCAGCATCGTGATCC |
| | | TGGCCCTCAGGCCCTCCGATGAGGGCACCTACGAGTGCGTCGTGCTGAAGTACGAGAAAGAC |
| | | GCCTTCAAGAGGGAACACCTGGCCGAGGTGACCCTGTCCGTGAAGGCCGACTTCCCTACCCC |
| | | CAGCATTAGCGACTTCGAGATCCCAACCTCCAACATACGGCGTATTATCTGCAGCACTAGCG |
| | | GGGGCTTCCCCGAGCCCCACCTGTCCTGGCTGGAAAACGGCGAGGAGCTGAACGCCATCAAC |
| | | ACCACCGTCAGCCAGGATCCCGAGACAGAGCTGTACGCCGTGAGCTCGAAGCTGGACTTCAA |
| | | CATGACGACCAACCACTCCTTCATGTGCCTGATCAAGTATGGCCACCTGAGGGTCAACCAGA |
| | | CCTTCAACTGGAACACCACCAAGCAAGAGCACTTCCCGGACGATAAGACCCACACCTGCCCC |
| | | CCGTGCCCGGCCCCCGAGCTGCTCGGCGGGCCCAGCGTGTTCCTGTTCCCTCCCAAACCCAA |
| | | GGACACGCTGATGATCAGCCGGACCCCCGAGGTGACGTGTGTTGTCGTGGACGTGAGCCACG |
| | | AGGACCCCGAAGTGAAGTTTAACTGGTACGTGGATGGGGTGGAGGTGCACAACGCCAAAACC |
| | | AAGCCCAGGGAGGAGCAGTACAATAGCACCTATAGGGTGGTATCGGTGCTGACCGTGCTGCA |
| | | CCAGGACTGGCTGAACGGCAAGGAGTACAAGTGCAAGGTGAGCAATAAGGCCCTCCCGGCCC |
| | | CCATCGAGAAGACCATCAGCAAGGCCAAGGGGCAGCCCAGGGAACCCCAGGTGTACACCCTG |
| | | CCCCCATCCCGGGACGAGCTCACCAAGAACCAGGTGAGCCTGACCTGCCTGGTGAAGGGATT |
| | | CTACCCAAGCGATATCGCCGTGGAGTGGGAGTCCAACGGGCAGCCGGAGAACAACTACAAGA |
| | | CCACCCCACCCGTGCTGGACTCCGACGGCAGCTTCTTCCTGTACTCCAAGCTGACCGTGGAC |
| | | AAGAGCCGCTGGCAGCAGGGAAATGTGTTCAGCTGCAGCGTGATGCACGAGGCCCTGCACAA |
| | | TCACTACACCCAGAAAAGCCTCAGCCTGAGCCCGGGCAAG |
| 500 | CD80_Fc-CO03 | ATGGGCCACACCAGGAGGCAGGGCACCAGCCCGAGCAAGTGCCCATATCTCAACTTTTTCCA |
| | | GCTCCTCGTACTCGCCGGACTAAGCCATTTCTGCAGCGGGGTCATCCACGTCACCAAGGAGG |
| | | TCAAGGAGGTCGCCACGCTCAGCTGCGGGCACAACGTCAGCGTCGAGGAGCTCGCCCAGACC |
| | | AGAATCTACTGGCAGAAAGAGAAGAAGATGGTCCTCACTATGATGAGCGGCGACATGAACAT |
| | | CTGGCCAGAATACAAGAACCGGACCATCTTCGACATCACCAACAACCTCAGCATCGTGATCC |
| | | TTGCGCTGCGGCCCTCCGACGAAGGGACCTACGAGTGCGTGGTGCTGAAGTATGAGAAGGAC |
| | | GCCTTTAAACGCGAGCACCTGGCCGAGGTGACGCTGTCCGTGAAGGCCGACTTTCCCACCCC |
| | | GTCCATCAGCGACTTCGAGATCCCCACCAGCAATATCCGCCGGATCATCTGCTCCACCTCCG |
| | | GGGGCTTTCCCGAGCCACACCTGTCCTGGCTGGAGAACGGCGAGGAGCTGAATGCCATCAAC |
| | | ACCACGGTGAGCCAGGACCCCGAGACGGAGCTCTACGCCGTGAGCAGCAAGCTGGACTTCAA |
| | | CATGACCACCAACCACAGCTTCATGTGCCTGATCAAGTATGGCCACCTGCGTGTGAACCAAA |
| | | CCTTTAATTGGAACACCACCAAGCAGGAGCACTTCCCCGACGACAAAACGCACACCTGCCCG |
| | | CCCTGCCCCGCCCCCGAGCTGCTGGGCGGGCCGAGCGTGTTCCTGTTCCCTCCCAAGCCCAA |
| | | AGACACCCTGATGATCAGCAGGACGCCGGAGGTGACCTGTGTCGTGGTGGACGTGAGCCACG |
| | | AGGACCCCGAGGTGAAGTTCAACTGGTACGTCGACGGGGTGGAGGTGCACAACGCCAAGACG |
| | | AAGCCCAGGGAGGAGCAGTATAACAGCACCTACAGGGTGGTGAGCGTGCTGACCGTGCTGCA |
| | | CCAGGATTGGCTGAACGGCAAAGAGTACAAGTGTAAGGTGAGCAACAAGGCCCTGCCCGCAC |
| | | CCATCGAGAAGACCATCAGCAAGGCCAAGGGGCAGCCCAGGGAACCCCAAGTGTATACCCTG |
| | | CCGCCGTCCCGGGATGAGCTGACCAAGAACCAGGTGTCCCTCACCTGCCTGGTGAAGGGATT |
| | | CTACCCCAGCGATATCGCTGTTGAGTGGGAGAGCAATGGCCAGCCCGAGAACAACTACAAGA |
| | | CGACGCCCCCGGTGCTGGATAGTGACGGGAGCTTCTTTCTGTACAGCAAACTGACCGTGGAT |
| | | AAGTCCAGGTGGCAGCAGGGCAACGTGTTCAGCTGCTCCGTGATGCACGAGGCCCTGCACAA |
| | | TCATTACACCCAGAAGTCCCTGAGCCTGAGCCCGGGCAAA |
| 501 | CD80_Fc-CO04 | ATGGGGCATACCAGGCGACAAGGCACGAGCCCCTCAAAGTGTCCCTACCTCAACTTCTTCCA |
| | | GCTTCTCGTCCTCGCCGGCCTCAGCCACTTCTGCAGCGGCGTAATCCACGTCACCAAGGAGG |
| | | TCAAGGAGGTCGCCACTCTTAGCTGCGGCCACAACGTCAGCGTCGAAGAACTTGCCCAGACG |
| | | AGGATCTATTGGCAGAAGGAGAAGAAGATGGTACTCACCATGATGAGCGGCGACATGAACAT |
| | | CTGGCCCGAGTACAAGAACAGGACGATCTTCGACATAACCAACAACCTCAGCATCGTCATCC |
| | | TGGCCCTGAGGCCAAGCGACGAGGGAACCTACGAATGCGTGGTGCTCAAATACGAGAAAGAT |
| | | GCCTTCAAGCGGGAGCACCTGGCCGAGGTGACCCTGTCCGTGAAGGCCGACTTCCCTACCCC |
| | | CAGCATCTCGGACTTCGAGATCCCCACGAGCAACATCCGCAGGATCATTTGCAGCACCAGCG |
| | | GGGGGTTCCCCGAGCCCCACCTCAGCTGGCTGGAGAACGGCGAAGAACTCAACGCCATCAAC |
| | | ACCACCGTGAGCCAGGACCCCGAGACGGAGCTGTACGCGGTGTCCTCGAAGCTCGATTTCAA |
| | | CATGACGACGAACCATAGCTTCATGTGCCTCATCAAGTACGGTCACCTCAGGGTGAACCAGA |
| | | CCTTCAACTGGAACACGACCAAGCAGGAGCACTTCCCCGACGACAAGACCCACACCTGCCCG |
| | | CCCTGCCCCGCCCCCGAGCTGCTGGGTGGCCCCAGCGTGTTTCTGTTCCCGCCCAAGCCCAA |
| | | GGACACCCTGATGATCTCCAGGACCCCCGAGGTAACCTGCGTGGTGGTGGACGTGAGCCACG |
| | | AGGACCCCGAGGTGAAGTTCAACTGGTACGTGGACGGCGTGGAGGTGCACAACGCCAAAACC |
| | | AAGCCCAGGGAGGAGCAGTACAACAGCACCTACCGCGTGGTATCCGTGCTGACTGTGCTGCA |
| | | CCAAGACTGGCTGAACGGAAAGGAGTACAAGTGCAAGGTGTCCAACAAGGCTCTGCCCGCCC |
| | | CCATCGAGAAGACAATCAGCAAGGCCAAGGGCCAGCCCCGGGAGCCCCAGGTGTACACCCTC |
| | | CCTCCCTCCAGGGACGAGCTCACCAAGAACCAGGTGTCCCTGACCTGTCTGGTGAAGGGCTT |
| | | CTACCCGAGCGACATAGCCGTGGAGTGGGAGAGCAATGGCCAGCCGGAGAACAACTACAAGA |
| | | CCACCCCACCCGTGCTGGACAGCGACGGGAGCTTCTTCCTGTACTCCAAGCTCACGGTGGAC |
| | | AAGAGCAGGTGGCAGCAGGGCAACGTGTTCAGCTGCAGCGTGATGCACGAGGCCCTGCATAA |
| | | CCACTACACCCAGAAGTCGCTGAGCCTGTCCCCGGGCAAG |
| 502 | CD80_Fc-CO05 | ATGGGCCACACCAGGCGACAGGGCACCAGCCCCAGCAAGTGCCCCTATCTCAACTTCTTCCA |
| | | GCTCCTAGTCCTCGCCGGCCTTTCACACTTCTGTAGCGGGGTCATCCACGTCACCAAAGAGG |
| | | TCAAGGAGGTCGCCACACTCAGCTGTGGCCATAACGTATCCGTCGAGGAGCTCGCCCAGACC |
| | | AGGATCTACTGGCAGAAGGAAAAGAAGATGGTCCTCACCATGATGAGCGGCGACATGAACAT |
| | | CTGGCCCGAGTATAAAAACCGGACCATCTTCGACATCACCAACAACCTCAGCATCGTGATCC |
| | | TGGCCCTCAGGCCCAGCGATGAGGGGACCTACGAGTGCGTGGTGCTGAAGTACGAGAAGGAC |
| | | GCCTTCAAGCGGGAACACCTGGCCGAGGTGACCCTGAGCGTGAAGGCCGATTTCCCCACCCC |
| | | GAGCATCAGCGACTTCGAGATCCCCACCTCCAACATCCGGCGAATCATCTGCAGCACCTCAG |
| | | GAGGCTTTCCCGAGCCCCACCTGAGCTGGCTGGAGAATGGGGAGGAGCTGAACGCCATCAAC |
| | | ACCACCGTCAGCCAGGACCCCGAGACGGAGCTGTACGCCGTGTCATCCAAACTGGACTTCAA |
| | | CATGACCACGAACCACTCATTCATGTGCCTGATCAAGTACGGGCACCTGCGCGTGAACCAGA |
| | | CGTTCAACTGGAACACCACGAAACAGGAGCACTTCCCCGACGACAAGACACACACCTGCCCG |
| | | CCCTGCCCCGCCCCCGAGCTGCTGGGCGGCCCTAGCGTGTTCCTCTTCCCCCCAAAGCCCAA |
| | | GGACACCCTGATGATCTCCAGGACACCGGAAGTGACCTGCGTCGTCGTAGACGTCAGTCACG |
| | | AGGACCCCGAGGTGAAGTTCAACTGGTACGTGGACGGCGTGGAGGTCCACAACGCGAAGACC |
| | | AAGCCCCGGGAGGAACAGTACAACAGCACGTACCGGGTGGTGAGCGTGCTGACCGTGCTGCA |
| | | TCAGGATTGGCTGAACGGCAAGGAGTACAAGTGCAAGGTGAGCAACAAGGCCCTGCCGGCCC |
| | | CGATCGAGAAGACCATCAGCAAGGCCAAGGGCCAGCCCCGCGAGCCCCAGGTGTACACCCTG |
| | | CCCCCTTCCCGCGACGAGCTCACCAAGAATCAGGTGTCCCTGACATGCCTGGTGAAGGGCTT |
| | | CTACCCGAGCGACATCGCGGTGGAATGGGAAAGCAACGGCCAACCCGAGAACAACTACAAGA |
| | | CCACCCCTCCCGTGCTGGACTCCGACGGCAGCTTCTTCCTGTACTCCAAGCTCACCGTGGAC |
| | | AAGTCCAGGTGGCAGCAGGGGAATGTGTTCTCCTGCAGCGTGATGCACGAGGCCCTGCACAA |
| | | CCACTACACACAGAAAAGCCTGAGCCTGAGCCCCGGCAAG |
| 503 | CD80_Fc-CO06 | ATGGGCCACACCAGGAGGCAGGGCACCAGCCCCTCCAAGTGCCCGTACCTCAATTTCTTCCA |
| | | GCTCCTCGTCCTCGCGGGGTTAAGCCACTTTTGCTCAGGCGTCATCCACGTCACCAAGGAGG |
| | | TCAAAGAGGTCGCCACCCTCAGCTGCGGCCACAACGTCAGCGTAGAGGAGCTTGCCCAGACC |
| | | AGGATATACTGGCAGAAAGAGAAGAAGATGGTACTCACCATGATGAGCGGCGACATGAACAT |
| | | CTGGCCCGAATACAAAAACCGGACCATCTTCGACATTACCAACAATCTCTCCATCGTGATCC |
| | | TGGCCCTCAGGCCCTCCGACGAGGGGACCTACGAGTGTGTGGTACTGAAGTACGAGAAGGAC |
| | | GCCTTCAAGCGGGAGCACCTGGCCGAAGTCACCCTGTCCGTGAAGGCCGACTTCCCGACACC |
| | | CAGCATCAGCGACTTTGAAATCCCCACCAGCAATATCAGGAGGATCATCTGCTCGACCAGCG |
| | | GCGGCTTCCCCGAGCCCCACCTGTCATGGCTGGAGAACGGCGAGGAGCTGAACGCCATCAAC |
| | | ACCACCGTCTCGCAGGACCCGGAGACAGAGCTGTACGCCGTGTCCAGCAAGCTGGACTTCAA |
| | | CATGACCACAAATCACAGCTTCATGTGCCTGATCAAGTACGGCCACCTGAGGGTCAACCAAA |
| | | CCTTCAACTGGAACACGACCAAACAAGAGCACTTTCCGGATGACAAGACACACACCTGCCCG |
| | | CCCTGCCCCGCCCCCGAGCTGCTGGGCGGGCCCAGCGTGTTCCTCTTCCCGCCCAAGCCCAA |
| | | GGACACCCTGATGATCTCCCGCACCCCCGAGGTGACCTGCGTGGTGGTGGACGTGTCCCATG |
| | | AGGATCCCGAGGTGAAGTTTAACTGGTACGTGGACGGCGTGGAAGTGCATAACGCCAAGACC |
| | | AAGCCCAGGGAGGAGCAATATAACAGCACCTACAGGGTGGTGAGCGTGCTGACCGTGCTGCA |
| | | TCAAGATTGGCTCAACGGCAAGGAGTACAAGTGCAAGGTCAGCAACAAGGCCCTGCCCGCGC |
| | | CGATCGAGAAGACCATCAGCAAAGCCAAGGGGCAGCCCAGGGAGCCCCAAGTGTACACGCTC |
| | | CCGCCCAGCAGGGACGAGCTGACCAAAAACCAGGTTAGCCTGACCTGCCTGGTGAAGGGCTT |
| | | CTACCCCTCCGACATTGCCGTGGAGTGGGAGTCAAACGGGCAGCCGGAGAACAATTACAAGA |
| | | CGACCCCTCCCGTGCTGGACAGCGACGGGTCCTTCTTCCTGTATAGCAAGCTCACCGTGGAT |
| | | AAGAGCAGGTGGCAGCAGGGCAACGTCTTCTCGTGCAGCGTGATGCACGAGGCCCTGCACAA |
| | | CCATTACACCCAGAAAAGCCTGTCGCTGTCCCCCGGGAAG |
| 504 | CD80_Fc-CO07 | ATGGGCCACACCAGGCGCCAGGGCACAAGCCCCAGCAAGTGCCCCTACCTCAACTTCTTCCA |
| | | GCTCCTCGTCCTCGCCGGGCTAAGCCACTTCTGCTCAGGCGTAATTCACGTCACCAAGGAGG |
| | | TCAAGGAGGTCGCCACCCTCAGCTGCGGCCACAACGTCTCCGTCGAGGAGTTGGCCCAGACC |
| | | AGGATCTACTGGCAGAAGGAAAAGAAAATGGTCCTCACCATGATGAGCGGGGACATGAACAT |
| | | CTGGCCCGAATACAAAAACCGCACCATCTTCGACATCACCAACAACCTCAGCATCGTGATCC |
| | | TGGCCCTTCGGCCGTCCGACGAGGGCACCTACGAGTGCGTGGTGCTGAAGTACGAGAAGGAC |
| | | GCCTTCAAGAGGGAGCACCTGGCCGAGGTGACCCTGAGCGTGAAGGCCGATTTCCCCACTCC |
| | | CAGCATCAGCGACTTCGAGATCCCCACCAGCAACATCCGGAGGATAATCTGCAGCACCAGCG |
| | | GGGGCTTTCCCGAGCCCCACCTCAGCTGGCTCGAGAACGGCGAGGAGCTGAACGCCATAAAC |
| | | ACGACCGTGAGCCAGGACCCCGAGACTGAGCTGTACGCCGTCAGCAGCAAGCTGGACTTCAA |
| | | CATGACGACCAATCACTCGTTCATGTGTCTGATTAAGTATGGACATCTGAGGGTGAACCAGA |
| | | CCTTCAATTGGAACACCACCAAGCAGGAGCACTTCCCCGACGATAAGACCCACACCTGCCCG |
| | | CCCTGCCCCGCCCCGGAACTGCTGGGGGGCCCCAGCGTGTTCCTGTTCCCGCCCAAGCCCAA |
| | | GGACACCCTGATGATCAGCAGGACACCCGAGGTGACCTGCGTGGTTGTGGACGTGTCCCATG |
| | | AGGATCCCGAGGTGAAGTTCAACTGGTACGTAGACGGGGTGGAGGTGCACAATGCCAAGACC |
| | | AAGCCCCGCGAGGAGCAGTACAACAGCACCTACCGGGTGGTGTCCGTGCTGACCGTCCTGCA |
| | | CCAGGACTGGCTGAACGGCAAGGAGTACAAATGCAAGGTGAGCAACAAGGCCCTGCCCGCGC |
| | | CCATCGAAAAGACGATCAGCAAGGCCAAAGGGCAGCCCCGGGAGCCCCAGGTGTACACGCTG |
| | | CCGCCCAGCCGCGATGAGCTGACGAAAAACCAAGTGAGCCTCACGTGCCTGGTCAAGGGCTT |
| | | CTACCCCTCCGATATCGCAGTGGAGTGGGAGAGCAACGGCCAGCCCGAGAACAACTACAAGA |
| | | CCACGCCCCCGGTGCTGGACTCCGACGGCTCGTTCTTCCTGTACAGCAAGCTGACGGTTGAC |
| | | AAGTCCAGGTGGCAGCAGGGGAACGTGTTTAGCTGCAGCGTGATGCACGAGGCCCTCCATAA |
| | | CCACTACACGCAGAAGTCCCTGTCCCTGAGCCCCGGCAAG |
| 505 | CD80_Fc-CO08 | ATGGGCCACACCAGGCGGCAGGGCACCAGCCCCAGCAAGTGCCCCTACCTCAACTTTTTTCA |
| | | GCTTTTGGTCCTCGCCGGCCTAAGCCATTTTTGCTCCGGGGTCATCCACGTGACCAAGGAGG |
| | | TAAAGGAGGTCGCCACCCTCAGCTGCGGACACAACGTCAGCGTAGAGGAGCTCGCCCAGACC |
| | | CGAATCTACTGGCAAAAGGAGAAGAAGATGGTCCTCACCATGATGTCCGGCGATATGAACAT |
| | | CTGGCCGGAGTACAAAAATAGGACAATCTTCGATATCACCAACAACCTAAGCATCGTGATCC |
| | | TGGCGCTGCGGCCCAGCGATGAAGGCACGTACGAATGCGTGGTGCTGAAGTACGAAAAGGAC |
| | | GCCTTTAAGAGGGAGCACCTGGCCGAGGTGACCCTCAGCGTGAAGGCCGACTTCCCCACCCC |
| | | CTCCATCAGCGACTTCGAGATACCCACCAGCAACATCCGACGGATTATCTGCAGCACCAGCG |
| | | GGGGCTTCCCCGAACCCCACCTGTCCTGGCTGGAGAACGGCGAGGAGCTGAACGCCATCAAC |
| | | ACCACCGTGAGCCAGGATCCCGAGACAGAGCTCTACGCGGTGAGCAGCAAGCTGGACTTCAA |
| | | CATGACCACAAACCACAGCTTCATGTGCCTCATCAAGTATGGCCATCTGAGGGTGAACCAGA |
| | | CCTTCAACTGGAACACCACCAAACAGGAGCACTTCCCGGACGACAAGACCCACACCTGCCCA |
| | | CCCTGCCCCGCCCCCGAGCTGCTGGGTGGCCCCAGCGTGTTTCTGTTCCCCCCGAAGCCCAA |
| | | AGATACACTGATGATCAGCCGAACCCCAGAGGTGACGTGTGTGGTGGTCGACGTGAGCCACG |
| | | AGGACCCGGAGGTCAAATTCAACTGGTACGTGGACGGCGTGGAGGTGCACAACGCCAAGACC |
| | | AAACCCAGAGAGGAGCAGTACAACAGCACGTACCGTGTGGTCAGCGTGCTGACCGTGCTGCA |
| | | CCAGGACTGGCTGAACGGCAAGGAGTACAAGTGCAAGGTGAGCAATAAGGCGCTGCCCGCCC |
| | | CCATCGAGAAAACCATCTCCAAAGCCAAGGGCCAACCCCGGGAGCCTCAGGTGTACACCCTG |
| | | CCGCCCAGCAGGGACGAGCTGACCAAGAACCAGGTGTCCCTGACCTGCCTGGTGAAAGGCTT |
| | | CTATCCCAGCGACATCGCTGTGGAGTGGGAGTCCAACGGGCAACCCGAGAACAACTACAAGA |
| | | CCACCCCGCCCGTACTGGACTCGGATGGCAGCTTCTTCCTGTACTCGAAGCTGACCGTGGAC |
| | | AAAAGCAGGTGGCAGCAGGGAAACGTGTTCTCATGCAGCGTCATGCACGAGGCCCTCCACAA |
| | | CCACTACACCCAGAAATCCCTGAGCCTGAGCCCCGGCAAA |
| 506 | CD80_Fc-CO09 | ATGGGCCACACCAGGCGCCAAGGCACCAGCCCCTCAAAGTGCCCCTACCTCAACTTCTTCCA |
| | | GCTCCTCGTACTCGCGGGGCTCAGCCACTTCTGCTCGGGCGTGATCCACGTTACCAAGGAGG |
| | | TCAAAGAGGTCGCGACCCTCTCCTGTGGCCACAACGTCTCCGTCGAGGAGCTTGCCCAGACC |
| | | CGAATCTACTGGCAGAAGGAGAAAAAGATGGTCCTCACGATGATGAGCGGAGACATGAACAT |
| | | CTGGCCGGAGTATAAGAACCGGACCATCTTCGACATCACCAACAACCTCAGCATCGTCATCC |
| | | TGGCCCTGCGTCCATCCGATGAGGGGACCTACGAGTGCGTGGTCCTCAAGTATGAAAAGGAC |
| | | GCCTTCAAGCGGGAGCACCTGGCCGAGGTCACCCTGAGTGTCAAGGCCGACTTCCCTACCCC |
| | | CAGCATCAGTGACTTCGAGATCCCCACTTCCAACATAAGGAGGATCATCTGCTCCACCAGCG |
| | | GAGGCTTCCCCGAGCCCCACCTGAGCTGGCTGGAGAACGGCGAGGAGCTGAACGCCATCAAT |
| | | ACCACCGTTAGCCAGGACCCCGAGACGGAGCTGTACGCCGTGAGCAGCAAGCTGGACTTCAA |
| | | CATGACCACCAATCACTCATTCATGTGCCTCATTAAGTACGGCCACCTGAGGGTCAACCAGA |
| | | CCTTCAACTGGAACACCACCAAGCAGGAGCACTTCCCGGATGATAAGACCCACACCTGCCCG |
| | | CCCTGCCCCGCCCCAGAGCTGCTGGGCGGCCCCAGCGTCTTCCTGTTCCCGCCCAAGCCTAA |
| | | GGACACCCTCATGATCAGCCGGACCCCCGAGGTAACCTGCGTGGTGGTGGACGTAAGCCACG |
| | | AGGATCCCGAGGTGAAGTTCAACTGGTACGTCGACGGGGTGGAGGTGCATAACGCGAAGACC |
| | | AAACCCCGCGAAGAACAGTACAACAGCACCTACAGGGTCGTTAGTGTGCTCACCGTGCTCCA |
| | | CCAGGATTGGCTGAACGGGAAAGAGTACAAGTGCAAGGTGTCCAACAAAGCACTCCCCGCCC |
| | | CCATCGAGAAGACCATCTCCAAGGCCAAGGGCCAGCCGAGGGAACCTCAGGTCTACACCCTG |
| | | CCCCCCAGCAGGGACGAGCTGACCAAGAACCAGGTGAGCCTGACCTGCCTGGTGAAGGGCTT |
| | | CTACCCGAGCGACATCGCGGTGGAATGGGAGTCCAACGGCCAGCCCGAGAACAACTATAAGA |
| | | CCACGCCCCCCGTGCTCGACTCCGACGGCAGCTTCTTCCTGTATTCCAAGCTGACCGTGGAC |
| | | AAGTCGAGGTGGCAGCAAGGTAACGTGTTCTCCTGCAGCGTGATGCACGAGGCCCTCCACAA |
| | | TCATTACACCCAGAAGTCGCTGAGCCTGAGTCCGGGTAAA |
| 507 | CD80_Fc-CO10 | ATGGGGCACACCCGGCGACAGGGCACGAGCCCCAGCAAGTGCCCCTACCTCAACTTCTTCCA |
| | | ACTCCTCGTTCTCGCCGGCCTCTCGCACTTTTGCTCGGGCGTCATCCACGTCACCAAGGAAG |
| | | TTAAGGAGGTCGCCACCCTCTCCTGCGGCCACAACGTCTCCGTCGAGGAACTCGCGCAGACC |
| | | CGCATATACTGGCAAAAGGAAAAGAAGATGGTCCTCACGATGATGAGCGGAGACATGAACAT |
| | | TTGGCCCGAGTACAAGAACCGCACCATCTTCGACATCACCAACAACCTCTCCATAGTGATCC |
| | | TGGCCCTGCGGCCCAGCGACGAGGGGACCTATGAGTGCGTGGTGCTGAAGTACGAAAAGGAC |
| | | GCCTTCAAGAGGGAGCACCTGGCCGAGGTGACCCTGAGCGTGAAGGCCGATTTCCCCACCCC |
| | | CAGCATCAGCGACTTCGAAATCCCCACCAGCAACATCAGGCGGATAATCTGCAGCACCAGCG |
| | | GCGGCTTCCCCGAGCCCCACCTGAGCTGGCTGGAGAATGGGGAGGAACTGAACGCCATTAAC |
| | | ACCACAGTCAGCCAAGATCCCGAGACAGAGCTCTACGCCGTGTCCTCGAAGCTGGACTTCAA |
| | | CATGACCACCAACCACAGCTTCATGTGCCTGATCAAATACGGGCACCTGCGGGTGAACCAAA |
| | | CCTTCAACTGGAACACCACCAAGCAGGAGCACTTCCCCGACGACAAGACGCATACGTGCCCA |
| | | CCCTGCCCCGCCCCCGAGCTCCTCGGCGGCCCCAGCGTGTTCTTATTCCCGCCCAAGCCCAA |
| | | GGACACCCTGATGATCTCCCGGACGCCGGAGGTGACGTGTGTGGTCGTGGACGTGAGCCACG |
| | | AGGACCCGGAGGTGAAGTTTAATTGGTACGTGGACGGGGTGGAGGTGCACAACGCGAAGACC |
| | | AAGCCCAGGGAGGAGCAGTACAACAGCACCTACCGCGTGGTGAGCGTGCTGACCGTACTGCA |
| | | CCAGGACTGGCTCAATGGCAAGGAGTACAAGTGCAAGGTGTCCAACAAGGCCCTGCCCGCTC |
| | | CGATCGAAAAAACGATCAGCAAGGCGAAAGGGCAGCCCAGGGAACCCCAGGTCTACACCCTG |
| | | CCGCCCAGCCGCGACGAACTGACCAAGAACCAGGTGTCACTGACCTGCCTGGTGAAGGGGTT |
| | | CTATCCGTCGGACATCGCGGTGGAGTGGGAGTCCAACGGCCAACCCGAGAACAATTACAAAA |
| | | CCACCCCGCCCGTGCTGGACAGCGACGGGAGCTTCTTTCTGTATTCCAAGTTAACAGTCGAC |
| | | AAGAGCAGGTGGCAGCAGGGCAACGTGTTCTCCTGCAGCGTCATGCACGAGGCCCTCCACAA |
| | | CCACTACACCCAGAAAAGCTTGAGCCTGTCCCCCGGCAAG |
| 508 | CD80_Fc-CO11 | ATGGGGCACACAAGGAGGCAAGGCACCAGCCCCAGCAAGTGCCCGTACCTAAACTTTTTCCA |
| | | GCTCCTCGTCCTCGCAGGCCTAAGCCACTTTTGCTCCGGCGTCATACACGTCACCAAGGAGG |
| | | TAAAGGAGGTCGCAACCCTAAGCTGCGGCCACAACGTGTCCGTCGAGGAGTTAGCCCAGACC |
| | | AGAATCTACTGGCAAAAAGAGAAGAAGATGGTCCTTACGATGATGTCAGGCGACATGAACAT |
| | | CTGGCCGGAGTACAAGAACCGGACTATCTTCGACATCACCAATAACCTTAGCATCGTGATCC |
| | | TGGCCCTCAGGCCCTCCGACGAGGGCACCTACGAGTGCGTCGTGCTGAAATACGAGAAGGAT |
| | | GCCTTCAAGAGGGAGCACCTGGCCGAGGTGACCCTGAGCGTGAAGGCCGACTTCCCGACCCC |
| | | GAGCATCTCCGATTTCGAGATCCCGACCAGCAACATAAGGAGGATCATTTGCAGCACCTCCG |
| | | GCGGCTTCCCCGAGCCGCACCTGAGCTGGCTCGAGAATGGCGAGGAGCTGAATGCCATCAAC |
| | | ACCACCGTGAGCCAGGACCCGGAGACGGAACTCTATGCGGTGAGCAGCAAGCTCGACTTCAA |
| | | CATGACGACGAACCACTCCTTCATGTGCCTGATCAAGTACGGCCATCTGCGGGTGAACCAGA |
| | | CCTTCAACTGGAACACCACCAAGCAGGAGCACTTCCCCGATGACAAGACGCACACCTGCCCG |
| | | CCGTGCCCCGCCCCGGAGCTGCTGGGGGGCCCCAGCGTCTTCCTGTTCCCGCCCAAGCCCAA |
| | | GGATACCCTGATGATCTCCAGGACGCCCGAGGTGACCTGCGTCGTGGTTGACGTATCCCACG |
| | | AGGACCCCGAAGTGAAATTCAACTGGTATGTGGACGGGGTAGAGGTGCACAACGCTAAAACT |
| | | AAGCCGCGGGAGGAGCAGTACAATAGCACCTATCGAGTGGTGAGCGTGCTGACCGTGCTGCA |
| | | CCAGGACTGGCTGAACGGGAAGGAGTATAAGTGCAAGGTGTCGAACAAAGCCCTGCCCGCCC |
| | | CCATCGAGAAGACCATCTCGAAAGCCAAGGGCCAGCCCAGGGAGCCCCAGGTCTACACGCTG |
| | | CCCCCCTCCCGGGACGAGCTCACCAAGAATCAGGTGAGCCTGACCTGTCTGGTCAAGGGGTT |
| | | CTACCCCTCCGACATCGCGGTGGAGTGGGAGAGCAACGGCCAACCCGAGAACAACTATAAGA |
| | | CCACGCCGCCCGTGCTGGACTCCGACGGGTCCTTCTTTCTGTACTCCAAGCTCACCGTGGAT |
| | | AAGTCCCGCTGGCAGCAGGGCAACGTGTTCAGCTGCAGCGTGATGCACGAGGCCCTCCACAA |
| | | CCACTACACCCAGAAAAGCCTGAGCCTGAGCCCGGGCAAG |
| 509 | CD80_Fc-CO12 | ATGGGCCACACCAGGAGACAGGGCACCAGCCCCAGCAAGTGCCCCTATCTCAACTTCTTCCA |
| | | GCTCCTCGTACTTGCCGGCCTTTCGCACTTCTGCTCCGGAGTCATCCACGTAACCAAGGAGG |
| | | TTAAGGAGGTCGCCACCCTCAGCTGTGGGCACAACGTCAGCGTCGAGGAGCTAGCCCAGACC |
| | | AGGATCTACTGGCAAAAGGAGAAGAAGATGGTACTCACCATGATGTCCGGAGACATGAACAT |
| | | TTGGCCCGAGTACAAGAATAGGACCATCTTCGATATCACGAACAACCTCTCCATCGTGATCC |
| | | TGGCCCTCAGGCCCAGCGACGAAGGCACCTACGAGTGCGTGGTGCTGAAGTACGAAAAGGAC |
| | | GCCTTCAAGAGGGAGCACCTGGCCGAGGTGACCCTGAGCGTGAAGGCCGACTTCCCCACCCC |
| | | AAGCATCAGCGACTTCGAGATTCCGACCAGCAACATCAGGCGCATCATCTGCAGCACCAGCG |
| | | GCGGCTTTCCCGAGCCGCATCTGAGCTGGCTGGAGAACGGCGAGGAGCTGAACGCCATCAAC |
| | | ACGACCGTGAGCCAGGATCCCGAGACGGAGCTGTACGCCGTCAGCTCCAAGCTGGACTTCAA |
| | | CATGACCACCAACCACAGCTTTATGTGCCTGATCAAGTACGGGCATCTGCGGGTGAACCAGA |
| | | CCTTTAACTGGAACACCACCAAGCAGGAGCATTTTCCGGACGACAAGACCCACACGTGTCCC |
| | | CCCTGCCCCGCTCCCGAGCTGCTCGGCGGCCCCTCCGTCTTCCTGTTCCCTCCCAAGCCCAA |
| | | GGACACCCTGATGATCTCCAGGACCCCCGAGGTCACCTGTGTGGTGGTGGATGTGTCCCACG |
| | | AGGACCCCGAGGTGAAGTTCAATTGGTACGTGGACGGCGTGGAGGTGCACAACGCCAAAACC |
| | | AAGCCCCGGGAGGAGCAGTACAATTCCACCTACAGGGTTGTGAGCGTCCTCACCGTGCTGCA |
| | | CCAGGACTGGCTCAATGGGAAGGAGTACAAGTGCAAGGTCAGCAACAAGGCCCTGCCCGCCC |
| | | CCATCGAGAAGACGATCAGCAAGGCCAAAGGGCAGCCCCGCGAGCCCCAGGTCTATACCCTG |
| | | CCCCCCAGCCGGGATGAGCTGACCAAGAACCAGGTGTCTCTGACATGCCTGGTGAAGGGGTT |
| | | CTATCCCAGCGACATCGCCGTGGAGTGGGAGAGCAACGGGCAACCCGAGAACAACTATAAGA |
| | | CGACTCCCCCCGTCCTGGACTCCGACGGCAGCTTCTTCCTGTACTCCAAGCTGACCGTGGAC |
| | | AAGTCCAGGTGGCAGCAGGGGAACGTGTTTAGCTGCAGCGTCATGCACGAGGCCCTGCACAA |
| | | CCACTATACACAGAAAAGCCTGAGCCTGTCACCCGGGAAG |
| 510 | CD80_Fc-CO13 | ATGGGCCACACCAGGCGCCAAGGAACCAGCCCCTCGAAGTGCCCCTACCTCAACTTCTTTCA |
| | | GCTTCTAGTCCTCGCCGGCTTATCCCATTTCTGCAGCGGCGTAATACACGTTACCAAGGAGG |
| | | TCAAGGAGGTCGCGACCCTCAGCTGCGGACATAACGTGTCCGTAGAGGAGCTCGCTCAGACC |
| | | CGGATCTATTGGCAGAAGGAGAAGAAGATGGTCCTCACCATGATGAGCGGCGACATGAACAT |
| | | CTGGCCCGAGTACAAGAACAGGACCATCTTCGACATCACCAACAACCTAAGTATCGTGATCC |
| | | TGGCCCTGCGGCCCAGCGACGAGGGCACCTACGAGTGCGTGGTGCTGAAGTACGAGAAGGAC |
| | | GCCTTCAAGAGGGAGCACCTGGCCGAGGTGACCCTGTCAGTGAAGGCCGACTTCCCAACCCC |
| | | CAGCATCAGCGATTTCGAGATCCCCACCAGCAATATCAGGCGCATAATCTGCAGCACCAGCG |
| | | GCGGCTTTCCCGAGCCGCACCTCAGCTGGCTGGAGAATGGCGAAGAACTGAACGCCATCAAC |
| | | ACCACCGTCTCGCAGGACCCCGAGACGGAGCTCTACGCCGTGAGCTCCAAGCTGGACTTTAA |
| | | CATGACGACCAATCACTCCTTTATGTGCCTCATTAAATACGGACATCTGCGCGTGAACCAGA |
| | | CCTTCAACTGGAACACCACCAAGCAGGAACACTTTCCCGACGACAAGACGCATACGTGCCCA |
| | | CCCTGCCCCGCCCCGGAGCTGCTGGGCGGCCCCAGCGTGTTCCTCTTCCCGCCCAAGCCCAA |
| | | GGACACGCTGATGATCTCCCGGACCCCCGAGGTGACCTGCGTGGTGGTGGATGTCTCGCACG |
| | | AGGACCCGGAGGTGAAGTTCAACTGGTACGTGGATGGCGTGGAAGTCCATAACGCCAAGACA |
| | | AAGCCCCGGGAGGAACAGTACAACAGCACCTATAGGGTGGTGAGCGTGCTGACGGTGCTGCA |
| | | CCAGGATTGGCTGAACGGCAAGGAATACAAGTGCAAGGTGTCCAACAAGGCCCTGCCTGCCC |
| | | CCATCGAGAAAACCATCTCCAAGGCCAAGGGCCAACCCCGAGAGCCCCAGGTTTACACTTTA |
| | | CCCCCCTCCAGGGACGAGCTGACCAAGAATCAGGTGAGCCTCACCTGCCTGGTCAAGGGGTT |
| | | CTACCCCAGCGACATCGCCGTGGAGTGGGAAAGCAACGGCCAGCCCGAGAACAACTACAAGA |
| | | CAACCCCGCCCGTGCTGGACAGCGACGGGAGCTTCTTCCTGTATAGCAAGCTGACCGTGGAT |
| | | AAGAGCCGGTGGCAGCAGGGCAACGTGTTTAGCTGCAGCGTTATGCACGAGGCCCTGCACAA |
| | | CCACTACACCCAGAAATCCCTGTCCCTGTCCCCCGGTAAG |
| 511 | CD80_Fc-CO14 | ATGGGCCACACGAGGCGTCAGGGCACCAGCCCCAGCAAGTGCCCCTACCTCAATTTCTTCCA |
| | | GCTCCTCGTCCTAGCCGGTCTGAGCCACTTCTGCAGCGGGGTCATCCACGTAACCAAGGAGG |
| | | TCAAGGAGGTCGCCACCTTGTCCTGCGGCCATAACGTCTCCGTAGAGGAGCTCGCGCAAACG |
| | | CGGATATATTGGCAAAAAGAGAAGAAGATGGTCCTCACCATGATGTCCGGGGACATGAATAT |
| | | CTGGCCCGAATACAAAAACAGGACCATCTTCGACATCACGAACAATCTCTCCATCGTGATCC |
| | | TGGCCCTGAGGCCCAGCGACGAGGGCACCTACGAGTGCGTGGTCCTGAAGTACGAGAAGGAC |
| | | GCCTTCAAGAGGGAGCACCTGGCCGAGGTGACCCTGTCCGTGAAGGCAGACTTCCCCACCCC |
| | | CAGCATCAGCGACTTCGAGATCCCCACCTCCAACATCAGAAGGATCATCTGCTCCACCTCGG |
| | | GCGGTTTCCCCGAGCCCCACCTGAGTTGGCTCGAGAACGGCGAGGAACTGAATGCCATTAAC |
| | | ACCACCGTCAGCCAGGACCCCGAGACGGAGCTGTACGCCGTCTCATCCAAACTGGACTTCAA |
| | | CATGACCACCAATCACAGCTTCATGTGTCTGATTAAGTACGGGCATCTGCGGGTCAACCAAA |
| | | CCTTTAACTGGAACACAACCAAACAGGAACATTTCCCGGACGACAAGACCCACACGTGCCCA |
| | | CCCTGCCCCGCCCCCGAGCTGCTCGGCGGGCCGAGCGTGTTCCTGTTCCCGCCCAAACCCAA |
| | | GGACACTCTGATGATCTCCCGGACCCCCGAGGTGACGTGCGTGGTGGTGGACGTGAGTCACG |
| | | AGGACCCCGAGGTGAAGTTCAACTGGTACGTGGACGGGGTGGAGGTGCATAATGCCAAGACC |
| | | AAGCCGAGGGAGGAGCAGTACAACTCCACCTACAGGGTCGTGAGCGTGCTTACGGTGCTCCA |
| | | CCAGGACTGGCTGAACGGGAAGGAGTACAAGTGTAAGGTGAGCAATAAGGCGCTGCCCGCCC |
| | | CCATCGAGAAAACCATCAGCAAAGCCAAGGGGCAGCCCCGGGAGCCCCAGGTGTACACCCTC |
| | | CCCCCATCCAGAGACGAGCTCACCAAGAATCAGGTGAGCCTCACCTGCCTGGTCAAGGGCTT |
| | | CTATCCCTCCGACATCGCCGTGGAGTGGGAATCCAACGGGCAGCCCGAGAACAACTATAAAA |
| | | CCACCCCACCGGTCCTGGACTCAGATGGGAGCTTCTTCCTGTACAGCAAGCTCACCGTCGAC |
| | | AAGTCGAGGTGGCAGCAGGGGAACGTGTTCAGCTGCTCCGTGATGCACGAAGCCCTGCACAA |
| | | CCACTACACCCAGAAGTCGCTCAGCCTGAGCCCAGGGAAG |
| 512 | CD80_Fc-CO15 | ATGGGCCACACGAGGAGGCAGGGGACCTCCCCCTCAAAGTGCCCCTATCTCAACTTCTTCCA |
| | | GCTCCTCGTCCTTGCCGGCCTCTCTCACTTCTGCAGCGGGGTCATCCACGTCACAAAGGAGG |
| | | TCAAGGAGGTCGCCACCCTCTCCTGCGGGCACAACGTCAGCGTTGAGGAGCTTGCCCAGACC |
| | | AGGATCTACTGGCAGAAGGAGAAGAAGATGGTCCTCACCATGATGTCCGGGGACATGAACAT |
| | | TTGGCCCGAGTACAAGAATAGGACCATCTTCGATATCACCAACAACTTGAGCATCGTGATCC |
| | | TGGCCCTGCGGCCCAGCGACGAGGGCACCTACGAGTGTGTCGTGCTGAAGTACGAGAAGGAC |
| | | GCCTTCAAGCGGGAGCATCTCGCCGAGGTGACCCTGAGCGTCAAGGCCGACTTCCCCACCCC |
| | | CTCCATCAGCGATTTCGAGATCCCGACCAGCAACATCCGGCGTATCATATGCAGCACCAGCG |
| | | GCGGATTCCCGGAGCCCCATCTGTCCTGGCTTGAGAACGGCGAGGAGCTGAATGCCATCAAT |
| | | ACCACGGTTAGCCAGGACCCGGAGACAGAACTGTACGCCGTGTCCAGCAAACTGGACTTCAA |
| | | CATGACAACCAATCACTCCTTCATGTGCCTGATCAAGTACGGCCACCTGAGGGTGAACCAGA |
| | | CGTTCAACTGGAATACCACCAAGCAGGAGCACTTCCCCGACGACAAAACGCACACATGCCCG |
| | | CCCTGCCCCGCCCCCGAGCTGCTGGGCGGTCCCTCCGTGTTCCTGTTCCCACCCAAGCCGAA |
| | | GGACACGCTGATGATCAGCCGCACCCCCGAGGTGACATGCGTGGTGGTCGACGTCAGCCACG |
| | | AGGACCCCGAGGTGAAGTTCAACTGGTACGTGGACGGCGTGGAAGTGCACAACGCCAAGACC |
| | | AAGCCCCGCGAGGAACAGTACAATTCGACCTACAGGGTGGTGAGCGTGCTGACCGTGCTGCA |
| | | CCAGGACTGGCTGAATGGCAAGGAATACAAGTGCAAGGTCAGCAATAAGGCCCTGCCCGCCC |
| | | CCATCGAGAAGACCATCAGCAAGGCCAAGGGCCAGCCCAGGGAACCCCAGGTGTACACCCTG |
| | | CCCCCGAGCCGGGACGAGCTGACCAAGAACCAGGTGAGCCTGACGTGTCTGGTGAAGGGCTT |
| | | CTACCCCAGCGACATCGCCGTGGAGTGGGAGAGCAACGGTCAGCCCGAGAACAACTACAAGA |
| | | CCACCCCTCCCGTCCTGGATAGCGACGGCTCCTTCTTCCTGTACAGCAAGCTGACCGTGGAC |
| | | AAAAGCAGGTGGCAGCAGGGCAACGTGTTCAGCTGCAGCGTGATGCACGAGGCGCTGCACAA |
| | | CCACTACACCCAAAAGAGCCTGTCGCTGAGCCCCGGCAAG |
| 513 | CD80_Fc-CO16 | ATGGGCCACACCAGGAGGCAGGGCACCTCGCCCTCGAAGTGCCCCTACCTTAATTTCTTCCA |
| | | GCTACTTGTACTCGCCGGCCTCAGCCACTTCTGCAGCGGCGTCATCCACGTTACCAAAGAAG |
| | | TAAAGGAGGTCGCAACCCTCAGCTGCGGACACAACGTGAGCGTCGAGGAGCTCGCGCAGACC |
| | | CGGATCTACTGGCAGAAGGAAAAGAAGATGGTCCTCACGATGATGTCCGGAGATATGAACAT |
| | | TTGGCCCGAGTACAAAAACCGCACCATCTTCGACATCACCAACAACCTTTCGATAGTGATCC |
| | | TGGCGCTCAGGCCCAGCGACGAGGGCACATACGAATGCGTGGTGCTTAAGTACGAGAAGGAT |
| | | GCCTTCAAGCGGGAGCACCTGGCCGAGGTGACGCTGTCCGTGAAGGCCGACTTCCCCACCCC |
| | | TAGCATAAGCGATTTCGAGATCCCCACCAGCAACATCAGGCGCATCATCTGCAGCACCAGCG |
| | | GGGGCTTCCCCGAGCCCCACCTGTCCTGGCTGGAAAACGGCGAGGAGCTGAACGCCATCAAC |
| | | ACCACCGTCAGCCAGGACCCCGAGACAGAGCTGTACGCCGTGAGCTCCAAGCTGGATTTCAA |
| | | CATGACCACAAACCATTCCTTCATGTGCCTGATTAAGTATGGTCACCTGCGGGTGAACCAGA |
| | | CCTTTAACTGGAACACGACCAAGCAGGAGCACTTCCCCGACGACAAGACCCACACGTGCCCC |
| | | CCTTGCCCCGCCCCCGAGCTGCTCGGCGGCCCCTCCGTGTTCCTGTTCCCACCCAAGCCGAA |
| | | GGACACCCTCATGATCAGCCGCACCCCCGAGGTGACCTGCGTGGTCGTGGACGTGAGCCATG |
| | | AGGATCCCGAAGTGAAGTTCAATTGGTACGTGGACGGGGTGGAGGTGCACAACGCAAAGACC |
| | | AAGCCGAGGGAGGAGCAGTACAACAGCACCTACAGGGTGGTGTCCGTCCTGACCGTGCTGCA |
| | | CCAGGATTGGCTGAACGGGAAGGAGTATAAGTGCAAGGTGAGCAATAAAGCCCTGCCCGCCC |
| | | CCATCGAGAAGACCATCAGCAAGGCGAAGGGCCAACCCCGGGAGCCGCAGGTCTATACGCTG |
| | | CCCCCCAGCCGGGACGAGCTCACCAAGAACCAGGTGAGCCTGACCTGTCTGGTGAAGGGATT |
| | | CTATCCCTCCGACATCGCCGTGGAGTGGGAATCCAACGGCCAGCCCGAAAACAACTACAAGA |
| | | CAACGCCCCCCGTGCTGGACTCCGACGGCAGCTTCTTCCTGTATAGCAAGCTGACCGTCGAC |
| | | AAGTCGCGCTGGCAGCAGGGCAACGTGTTCAGCTGCAGCGTGATGCATGAGGCCCTGCACAA |
| | | CCATTACACGCAGAAGTCCCTCTCCCTTAGCCCCGGTAAG |
| 514 | CD80_Fc-CO17 | ATGGGCCATACGAGGCGCCAAGGCACGAGCCCCAGCAAGTGCCCCTACCTTAACTTCTTCCA |
| | | ACTTCTCGTCCTCGCCGGCTTAAGCCACTTTTGCAGCGGGGTCATCCACGTGACCAAGGAGG |
| | | TCAAAGAGGTCGCCACGCTCAGCTGCGGTCACAACGTATCGGTTGAGGAGTTAGCGCAGACC |
| | | AGGATCTACTGGCAGAAGGAAAAGAAGATGGTCCTCACCATGATGAGCGGCGATATGAACAT |
| | | CTGGCCCGAGTATAAGAACCGAACCATCTTCGACATAACCAACAACCTCTCCATCGTCATCC |
| | | TGGCCCTGCGCCCCAGCGACGAGGGCACCTACGAGTGCGTGGTCCTGAAGTATGAGAAGGAT |
| | | GCCTTTAAGCGGGAGCACCTGGCGGAGGTCACGCTGAGCGTGAAGGCCGACTTCCCCACGCC |
| | | CAGCATCAGCGATTTCGAGATCCCTACCAGCAATATCCGGCGGATTATCTGTAGCACCAGCG |
| | | GCGGCTTTCCCGAGCCCCACCTGTCCTGGCTGGAGAATGGCGAGGAGCTGAACGCCATCAAT |
| | | ACCACCGTGTCGCAGGACCCCGAGACGGAGCTCTACGCCGTGAGCTCCAAGCTGGACTTCAA |
| | | CATGACCACAAATCACAGCTTTATGTGCCTGATCAAGTACGGCCACCTGAGGGTAAACCAGA |
| | | CGTTTAACTGGAACACCACCAAGCAGGAGCACTTCCCCGATGACAAGACCCACACCTGCCCT |
| | | CCCTGCCCCGCCCCCGAGTTGCTCGGCGGCCCCAGCGTGTTTCTCTTTCCCCCCAAGCCCAA |
| | | GGACACCCTGATGATCTCCAGGACCCCCGAGGTTACCTGCGTCGTGGTCGACGTGAGCCACG |
| | | AGGATCCCGAGGTCAAGTTCAACTGGTACGTAGACGGCGTGGAGGTGCATAACGCCAAGACA |
| | | AAGCCCAGGGAGGAGCAATACAACTCGACCTACAGGGTTGTAAGCGTGCTGACCGTCCTGCA |
| | | CCAGGACTGGCTGAACGGGAAGGAGTACAAGTGCAAGGTCAGCAACAAGGCCCTGCCGGCCC |
| | | CCATCGAGAAGACCATCAGCAAGGCCAAGGGCCAGCCCAGGGAGCCGCAGGTGTATACCCTG |
| | | CCACCCAGCAGGGACGAGCTGACCAAAAACCAGGTGAGCCTCACCTGCTTGGTGAAGGGCTT |
| | | CTACCCCTCCGATATCGCCGTCGAATGGGAGAGCAACGGCCAGCCCGAGAATAACTATAAGA |
| | | CCACACCCCCGGTGCTAGACAGCGACGGCAGCTTCTTCCTGTACTCGAAGCTGACCGTGGAC |
| | | AAGAGCCGTTGGCAGCAGGGCAACGTGTTCAGCTGCTCCGTGATGCACGAAGCCCTGCACAA |
| | | TCACTACACCCAGAAAAGCCTGTCCCTGAGCCCGGGCAAG |
| 515 | CD80_Fc-CO18 | ATGGGCCACACTCGGCGGCAGGGCACCAGCCCCTCAAAGTGTCCCTACCTTAACTTCTTCCA |
| | | GCTCCTCGTCCTAGCCGGGCTCTCCCACTTCTGCTCGGGCGTCATCCACGTCACGAAGGAGG |
| | | TCAAGGAGGTCGCCACCCTCTCCTGCGGTCACAACGTCTCCGTCGAAGAACTCGCCCAGACC |
| | | AGGATCTACTGGCAAAAAGAGAAGAAGATGGTCCTCACCATGATGAGCGGCGACATGAATAT |
| | | CTGGCCCGAGTACAAGAACCGGACCATCTTCGACATCACCAACAACCTAAGCATCGTGATCC |
| | | TGGCCCTGCGCCCCTCGGACGAGGGGACCTACGAGTGCGTGGTGTTAAAGTACGAGAAGGAT |
| | | GCCTTTAAGAGGGAGCACCTGGCTGAGGTCACCCTCAGCGTGAAGGCCGACTTTCCGACCCC |
| | | CAGCATCTCCGACTTCGAGATACCCACCAGCAACATCAGGAGGATCATCTGCAGCACCAGCG |
| | | GAGGCTTTCCCGAGCCCCACCTGTCGTGGCTGGAGAACGGGGAAGAACTGAACGCCATCAAC |
| | | ACCACCGTGAGCCAGGACCCGGAGACGGAGCTCTACGCCGTGTCCAGCAAGCTGGACTTTAA |
| | | CATGACGACCAATCACAGCTTCATGTGCCTGATCAAGTACGGGCACCTGAGAGTCAACCAGA |
| | | CCTTCAACTGGAACACCACCAAGCAGGAGCACTTTCCGGATGACAAGACCCATACCTGCCCG |
| | | CCCTGCCCCGCGCCCGAGCTGCTGGGCGGCCCCAGCGTGTTTCTGTTCCCGCCCAAGCCCAA |
| | | GGATACCCTGATGATCAGCCGGACCCCCGAAGTGACGTGCGTGGTGGTGGACGTGAGCCACG |
| | | AGGACCCCGAGGTGAAGTTTAACTGGTACGTGGACGGCGTGGAGGTGCATAACGCCAAGACC |
| | | AAGCCCCGCGAGGAGCAGTACAACAGCACCTATAGGGTCGTCTCCGTGCTGACCGTGCTGCA |
| | | CCAGGATTGGCTGAACGGCAAGGAGTACAAGTGCAAGGTGTCGAACAAGGCCCTGCCCGCGC |
| | | CCATCGAGAAAACCATCTCCAAGGCCAAGGGCCAACCCAGGGAACCCCAGGTTTACACGCTC |
| | | CCGCCCTCCCGCGACGAGCTCACCAAGAACCAAGTGAGCCTGACGTGTCTGGTCAAGGGGTT |
| | | TTACCCCAGCGATATCGCGGTGGAGTGGGAGAGCAACGGTCAGCCCGAGAACAACTACAAGA |
| | | CCACCCCGCCGGTGCTGGACAGCGATGGGTCCTTCTTCCTCTACAGCAAGCTGACCGTGGAC |
| | | AAGAGCAGGTGGCAGCAGGGCAACGTGTTCAGCTGCTCCGTGATGCACGAGGCGCTGCACAA |
| | | CCACTACACCCAGAAGTCCCTGAGCCTGTCGCCCGGCAAG |
| 516 | CD80_Fc-CO19 | ATGGGTCACACACGGAGGCAGGGGACCAGCCCCAGCAAGTGCCCCTACCTCAACTTCTTTCA |
| | | GCTCCTCGTCCTCGCGGGGCTCTCCCACTTCTGCAGCGGGGTCATCCACGTGACCAAGGAGG |
| | | TAAAGGAGGTAGCCACACTCAGCTGCGGCCACAACGTTAGCGTCGAGGAACTCGCGCAGACG |
| | | CGGATCTATTGGCAGAAGGAGAAGAAGATGGTCTTAACCATGATGAGCGGCGACATGAACAT |
| | | CTGGCCCGAGTACAAGAACAGGACCATCTTCGACATCACAAACAACCTCTCCATCGTGATCC |
| | | TGGCCCTGCGACCCTCAGATGAGGGCACCTACGAGTGTGTGGTGCTCAAGTACGAGAAAGAC |
| | | GCCTTCAAGAGGGAGCACCTGGCAGAGGTGACCCTGAGCGTCAAGGCGGACTTCCCCACCCC |
| | | AAGCATCTCCGATTTCGAAATCCCCACCAGCAACATTCGGAGGATCATCTGCAGCACTAGCG |
| | | GTGGCTTCCCCGAGCCCCATCTGAGCTGGCTGGAGAACGGCGAGGAGCTCAATGCCATCAAC |
| | | ACCACCGTGAGCCAGGACCCCGAGACGGAGCTCTACGCCGTGAGCTCGAAGCTGGATTTCAA |
| | | CATGACCACGAACCACAGCTTCATGTGCCTGATCAAATATGGCCACCTGCGGGTGAACCAGA |
| | | CCTTCAACTGGAACACCACGAAGCAGGAGCACTTCCCCGACGATAAGACCCATACCTGCCCG |
| | | CCGTGCCCCGCCCCCGAGCTGCTGGGCGGTCCGTCCGTCTTCCTGTTCCCGCCCAAGCCCAA |
| | | GGACACCCTCATGATCTCCAGGACGCCGGAGGTGACCTGTGTGGTCGTGGACGTGAGCCACG |
| | | AGGACCCCGAGGTGAAGTTCAACTGGTACGTGGACGGGGTGGAGGTGCATAACGCCAAGACC |
| | | AAGCCGCGGGAGGAACAGTACAACAGCACCTATCGGGTGGTGTCCGTGCTCACGGTCCTGCA |
| | | CCAGGATTGGCTGAATGGCAAAGAATACAAGTGCAAAGTGAGCAACAAGGCCCTGCCCGCCC |
| | | CCATCGAAAAGACCATCAGCAAGGCCAAGGGCCAGCCCAGGGAGCCCCAGGTGTATACGCTG |
| | | CCCCCCAGCCGGGACGAGCTCACCAAAAACCAAGTCTCACTGACCTGCCTGGTGAAGGGCTT |
| | | CTACCCATCCGATATCGCCGTGGAATGGGAGTCCAATGGGCAGCCCGAGAACAACTACAAGA |
| | | CCACCCCACCGGTGCTCGACTCCGACGGCAGCTTCTTCCTCTATAGCAAGCTGACCGTGGAC |
| | | AAGAGCAGGTGGCAGCAAGGCAACGTGTTCAGCTGCTCCGTGATGCACGAAGCCCTGCACAA |
| | | CCATTACACTCAGAAGTCCCTGAGCCTGAGCCCCGGGAAG |
| 517 | CD80_Fc-CO20 | ATGGGGCACACCAGGAGGCAGGGGACCAGCCCCTCCAAGTGCCCCTACCTTAACTTTTTTCA |
| | | GCTACTGGTGCTAGCCGGGCTCAGCCACTTCTGCAGCGGCGTCATCCACGTGACCAAAGAGG |
| | | TCAAGGAGGTCGCCACCCTCTCCTGCGGCCACAACGTCTCCGTCGAAGAACTAGCGCAGACC |
| | | AGGATATACTGGCAGAAGGAGAAGAAGATGGTCCTCACCATGATGTCCGGGGACATGAACAT |
| | | CTGGCCCGAGTACAAGAACAGGACCATCTTCGATATAACCAATAACCTCAGCATCGTGATCC |
| | | TGGCCCTGAGGCCCAGCGACGAGGGCACCTATGAGTGCGTGGTCCTGAAGTACGAGAAGGAC |
| | | GCCTTCAAGCGTGAGCACCTGGCCGAGGTCACCCTGAGCGTGAAGGCCGACTTCCCCACCCC |
| | | CAGCATCAGCGACTTCGAGATCCCCACCAGCAACATCCGCCGTATTATCTGCAGCACCAGCG |
| | | GGGGGTTCCCGGAGCCGCACCTGAGCTGGCTGGAGAACGGCGAGGAGCTGAACGCCATCAAC |
| | | ACTACTGTCTCCCAGGATCCCGAAACCGAACTGTACGCCGTGTCCAGCAAGCTGGACTTTAA |
| | | CATGACCACCAACCACTCGTTTATGTGCCTGATCAAATACGGACACCTGCGGGTAAACCAGA |
| | | CCTTCAACTGGAACACCACCAAGCAGGAGCACTTCCCGGATGACAAGACCCACACCTGCCCG |
| | | CCCTGCCCGGCTCCCGAGCTTCTGGGCGGCCCCAGCGTGTTTCTGTTTCCCCCCAAGCCCAA |
| | | GGATACCCTGATGATCTCCAGGACCCCCGAGGTGACCTGCGTGGTGGTGGATGTGTCCCACG |
| | | AGGATCCCGAGGTGAAATTTAATTGGTATGTGGACGGGGTCGAGGTGCACAATGCCAAGACC |
| | | AAGCCCAGAGAGGAGCAGTACAACAGCACCTACAGGGTGGTGAGCGTGCTGACGGTGCTGCA |
| | | TCAGGACTGGCTGAACGGGAAGGAGTACAAGTGCAAGGTGTCCAACAAGGCCCTCCCGGCCC |
| | | CCATCGAGAAGACCATCTCCAAGGCCAAGGGTCAGCCGCGCGAGCCCCAAGTGTACACCCTG |
| | | CCCCCCAGCCGGGACGAGCTGACCAAGAACCAGGTGAGCCTGACCTGTCTGGTGAAGGGCTT |
| | | CTACCCCAGCGACATCGCCGTCGAGTGGGAGAGCAACGGCCAGCCTGAGAACAACTACAAGA |
| | | CCACCCCGCCCGTCCTGGACAGCGACGGAAGCTTCTTCCTATACAGCAAGCTGACCGTAGAC |
| | | AAGAGCAGGTGGCAGCAGGGCAACGTGTTCTCATGCAGCGTGATGCACGAGGCCCTGCATAA |
| | | CCATTACACCCAGAAAAGCCTCTCGCTCAGCCCCGGCAAG |
| 518 | CD80_Fc-CO21 | ATGGGCCATACCAGGAGGCAGGGCACGAGCCCCAGCAAGTGCCCCTACCTCAACTTCTTCCA |
| | | GCTCCTCGTCCTTGCCGGGCTCAGCCACTTCTGTAGCGGCGTTATTCACGTAACCAAGGAAG |
| | | TAAAAGAGGTCGCCACCCTAAGCTGTGGCCACAACGTCAGCGTCGAGGAGCTCGCCCAGACC |
| | | AGGATCTACTGGCAGAAGGAGAAGAAGATGGTCCTCACAATGATGTCGGGCGACATGAATAT |
| | | CTGGCCCGAATACAAGAACCGGACAATCTTCGACATCACCAACAACCTCAGCATCGTGATCC |
| | | TGGCCCTGAGGCCCAGCGACGAAGGGACCTACGAGTGTGTCGTGCTCAAGTACGAAAAGGAC |
| | | GCCTTCAAAAGGGAGCACCTCGCGGAGGTGACGCTGAGCGTGAAGGCCGACTTCCCCACCCC |
| | | ATCCATCAGCGACTTCGAGATTCCCACGTCCAACATCCGTAGGATCATTTGCAGCACCTCCG |
| | | GCGGCTTCCCCGAGCCCCACCTCAGCTGGCTGGAGAACGGCGAGGAACTGAACGCCATCAAC |
| | | ACCACCGTGAGCCAGGATCCCGAGACGGAGCTGTATGCCGTGAGCAGCAAGCTGGATTTCAA |
| | | CATGACCACCAACCATTCATTCATGTGCCTGATAAAGTACGGCCACCTGAGGGTGAACCAGA |
| | | CCTTCAACTGGAACACCACCAAACAGGAACACTTCCCGGACGATAAGACCCATACCTGCCCG |
| | | CCCTGCCCCGCCCCCGAGCTGCTGGGCGGCCCCTCCGTCTTCCTGTTCCCGCCCAAGCCTAA |
| | | GGATACCCTGATGATTTCCAGGACCCCCGAGGTGACCTGCGTCGTGGTGGACGTCAGCCACG |
| | | AGGATCCCGAGGTGAAGTTTAATTGGTACGTCGACGGGGTTGAGGTGCACAACGCCAAGACG |
| | | AAGCCCAGGGAGGAGCAGTACAACAGCACCTACCGGGTGGTGAGCGTGCTCACCGTGCTGCA |
| | | TCAGGACTGGCTGAATGGGAAAGAGTACAAATGCAAGGTGAGCAATAAGGCCCTGCCGGCCC |
| | | CCATCGAGAAGACCATCAGCAAAGCCAAGGGCCAGCCGAGGGAACCCCAGGTGTACACGCTC |
| | | CCGCCCTCCAGGGACGAGCTGACCAAGAATCAGGTCAGCCTCACCTGCCTCGTGAAGGGGTT |
| | | TTACCCCTCCGATATCGCCGTGGAATGGGAGAGCAACGGGCAGCCCGAGAACAACTACAAAA |
| | | CGACGCCCCCCGTCCTGGACTCGGACGGGAGCTTTTTCCTGTATTCTAAGCTGACCGTGGAC |
| | | AAAAGCCGGTGGCAGCAGGGCAACGTCTTCAGCTGCAGCGTGATGCACGAGGCCCTGCACAA |
| | | CCATTACACCCAGAAAAGCCTGAGCCTGTCGCCCGGCAAG |
| 519 | CD80_Fc-CO22 | ATGGGGCACACCCGCAGGCAAGGGACCAGCCCTAGCAAGTGCCCCTACCTCAACTTCTTCCA |
| | | GCTCCTCGTCCTCGCCGGTCTGAGCCACTTCTGCAGCGGCGTCATCCACGTCACCAAGGAGG |
| | | TCAAGGAGGTCGCCACGCTCAGCTGCGGCCACAACGTCTCCGTAGAGGAGTTGGCCCAGACC |
| | | AGGATCTACTGGCAGAAGGAGAAGAAGATGGTCTTAACGATGATGAGCGGCGACATGAACAT |
| | | CTGGCCCGAGTACAAGAACCGCACCATCTTCGACATTACCAACAACCTCTCCATAGTGATCC |
| | | TGGCCCTCCGGCCGAGCGATGAGGGCACCTACGAATGCGTGGTGCTGAAGTACGAAAAGGAC |
| | | GCCTTCAAAAGGGAGCACCTGGCGGAGGTGACCCTGTCCGTGAAGGCCGACTTTCCCACGCC |
| | | CAGCATTAGCGATTTCGAGATCCCCACGAGCAACATCAGGCGCATCATCTGCAGCACCAGCG |
| | | GCGGGTTCCCCGAGCCCCACCTGTCCTGGCTGGAGAACGGCGAAGAACTGAACGCCATCAAC |
| | | ACCACCGTGAGCCAGGATCCCGAGACGGAGTTGTACGCCGTGAGCAGCAAACTGGACTTTAA |
| | | CATGACCACCAACCACTCATTCATGTGCCTCATCAAGTACGGCCACCTGCGGGTGAACCAGA |
| | | CCTTCAACTGGAACACGACCAAGCAGGAGCACTTCCCCGACGACAAGACGCATACTTGCCCG |
| | | CCCTGCCCAGCCCCTGAGCTGCTGGGCGGTCCTTCGGTATTCCTGTTTCCCCCCAAGCCCAA |
| | | GGATACCCTGATGATCAGCCGGACCCCGGAGGTGACCTGCGTCGTGGTGGACGTTAGTCACG |
| | | AAGACCCCGAGGTGAAGTTTAATTGGTACGTGGACGGCGTGGAGGTCCACAACGCCAAGACC |
| | | AAGCCCCGTGAGGAGCAGTACAATAGCACGTACAGGGTGGTGAGCGTGCTCACCGTGCTCCA |
| | | TCAGGACTGGCTCAACGGGAAGGAGTACAAGTGCAAGGTGAGCAATAAGGCCCTCCCCGCCC |
| | | CGATCGAGAAGACCATCTCGAAGGCCAAGGGGCAGCCCCGGGAACCCCAGGTGTACACCCTC |
| | | CCGCCCAGCCGGGACGAACTGACCAAGAACCAGGTGTCCCTGACCTGCCTAGTGAAGGGCTT |
| | | CTACCCCTCCGACATCGCCGTGGAGTGGGAGAGCAACGGCCAGCCCGAGAACAACTATAAGA |
| | | CCACCCCGCCCGTGCTGGACAGCGATGGCAGCTTTTTCCTGTACAGCAAACTGACCGTGGAC |
| | | AAGTCCAGGTGGCAGCAGGGCAACGTGTTCAGCTGCAGCGTCATGCACGAGGCCCTGCACAA |
| | | CCACTACACCCAGAAAAGCCTGTCCCTCAGCCCCGGCAAG |
| 520 | CD80_Fc-CO23 | ATGGGCCATACCCGCAGGCAAGGCACCAGCCCCAGCAAGTGCCCCTACCTCAACTTCTTCCA |
| | | GCTCTTGGTCCTCGCCGGGCTCAGCCACTTCTGCTCCGGCGTCATACACGTGACCAAGGAGG |
| | | TCAAGGAGGTCGCCACCCTCTCGTGCGGGCACAACGTCAGCGTCGAGGAGCTCGCCCAGACC |
| | | AGGATCTACTGGCAGAAGGAGAAGAAGATGGTCCTCACCATGATGAGCGGGGACATGAACAT |
| | | CTGGCCCGAATACAAGAACCGGACGATCTTCGACATCACGAACAACCTCAGCATCGTGATCC |
| | | TCGCCCTGCGGCCCAGCGACGAGGGTACCTATGAGTGCGTCGTGCTGAAGTACGAGAAGGAC |
| | | GCGTTCAAGAGGGAGCATCTGGCGGAAGTGACCCTGAGCGTCAAGGCGGACTTCCCGACGCC |
| | | CTCGATCAGCGACTTCGAAATTCCCACCTCCAACATCCGCAGGATCATCTGCAGCACCTCCG |
| | | GAGGCTTCCCCGAGCCCCACCTCTCCTGGCTGGAGAACGGCGAGGAGCTGAACGCCATCAAC |
| | | ACCACGGTGTCCCAAGACCCAGAGACGGAGCTGTATGCCGTGTCCAGCAAACTGGACTTCAA |
| | | CATGACCACCAACCACTCCTTCATGTGCCTCATCAAATACGGCCACCTGAGGGTGAACCAGA |
| | | CCTTCAATTGGAACACCACCAAACAGGAGCACTTCCCCGACGATAAGACCCATACCTGTCCC |
| | | CCCTGCCCCGCCCCCGAGCTGCTGGGCGGCCCCAGCGTGTTCCTGTTCCCGCCCAAGCCCAA |
| | | GGACACCCTGATGATCAGTAGGACCCCCGAGGTTACCTGCGTGGTGGTGGACGTGAGCCACG |
| | | AGGACCCCGAGGTCAAGTTCAACTGGTATGTGGATGGCGTCGAGGTGCACAACGCCAAGACC |
| | | AAACCCCGGGAGGAGCAATACAACAGCACCTATAGGGTGGTGAGCGTCCTGACCGTGCTCCA |
| | | CCAGGATTGGCTCAATGGCAAGGAGTATAAGTGTAAGGTGTCCAACAAGGCCCTGCCGGCCC |
| | | CCATAGAGAAGACCATCTCCAAGGCCAAGGGCCAGCCCAGGGAGCCCCAGGTATACACCCTG |
| | | CCCCCCTCCCGGGATGAGCTGACGAAGAACCAGGTGAGCCTGACCTGCCTGGTGAAGGGGTT |
| | | CTACCCCAGCGACATAGCCGTGGAATGGGAATCCAACGGCCAGCCCGAAAACAACTACAAGA |
| | | CCACGCCGCCCGTGCTGGACAGCGACGGCAGCTTCTTCCTGTATAGCAAGCTGACCGTGGAC |
| | | AAGTCCCGCTGGCAGCAGGGCAACGTCTTCTCCTGCTCCGTGATGCATGAGGCCCTGCACAA |
| | | TCACTACACCCAAAAGAGCCTGAGCCTGAGCCCCGGTAAG |
| 521 | CD80_Fc-CO24 | ATGGGGCACACCAGGCGCCAGGGGACTTCTCCTAGCAAGTGCCCCTACCTCAACTTCTTCCA |
| | | GCTCCTCGTCCTCGCCGGCCTCTCGCATTTTTGCAGCGGGGTCATCCACGTCACCAAGGAAG |
| | | TCAAGGAGGTCGCCACCCTCAGCTGCGGCCACAACGTCAGCGTCGAGGAGCTCGCTCAGACC |
| | | CGGATATACTGGCAGAAGGAGAAGAAGATGGTCCTCACCATGATGTCGGGCGATATGAACAT |
| | | CTGGCCCGAATATAAAAACCGGACCATCTTCGACATCACCAACAATCTCTCCATCGTGATCC |
| | | TCGCCCTGCGGCCCTCCGATGAAGGAACATACGAGTGCGTGGTCCTGAAATACGAGAAAGAC |
| | | GCCTTCAAGAGGGAGCATCTGGCCGAGGTCACCCTGTCGGTGAAAGCCGACTTCCCGACCCC |
| | | CAGCATCTCCGACTTCGAGATCCCCACCAGCAACATTAGGCGGATCATCTGCAGCACCAGCG |
| | | GGGGCTTTCCCGAACCGCACCTGAGCTGGCTGGAGAACGGGGAGGAACTGAACGCCATCAAC |
| | | ACCACCGTGTCCCAAGACCCCGAGACGGAACTGTACGCGGTCAGCAGCAAGCTGGACTTCAA |
| | | TATGACCACCAACCACTCGTTCATGTGCCTGATCAAGTACGGCCACCTCAGGGTTAACCAGA |
| | | CCTTCAACTGGAACACCACCAAGCAGGAGCACTTCCCCGACGATAAGACCCACACGTGCCCC |
| | | CCGTGCCCCGCCCCGGAGCTGCTGGGCGGCCCCAGCGTGTTCCTGTTCCCTCCCAAGCCCAA |
| | | GGATACCCTGATGATCAGCAGGACACCCGAGGTGACCTGCGTGGTGGTAGACGTGTCCCACG |
| | | AGGACCCGGAAGTGAAGTTCAACTGGTACGTGGACGGCGTAGAGGTGCACAACGCCAAAACG |
| | | AAGCCCCGCGAAGAACAGTACAACAGCACCTACAGGGTGGTGAGCGTGCTGACCGTGCTGCA |
| | | CCAAGACTGGCTGAACGGGAAGGAGTACAAGTGTAAGGTGAGCAATAAGGCCCTGCCCGCCC |
| | | CCATCGAGAAGACCATCAGCAAGGCGAAGGGGCAGCCCAGGGAGCCGCAGGTGTACACCCTG |
| | | CCCCCCTCCAGGGACGAGTTGACGAAGAATCAGGTGTCCCTGACGTGCCTGGTGAAGGGCTT |
| | | CTACCCCAGCGACATCGCCGTGGAGTGGGAGAGCAACGGGCAGCCCGAGAACAATTACAAGA |
| | | CCACCCCACCCGTGCTGGATTCCGACGGCAGCTTTTTTCTGTACTCCAAGCTGACCGTGGAC |
| | | AAATCCCGCTGGCAGCAGGGGAACGTGTTCTCGTGCAGCGTGATGCACGAGGCCCTGCACAA |
| | | CCACTACACTCAGAAAAGCTTGAGCCTGAGCCCCGGGAAA |
| 522 | CD80_Fc-CO25 | ATGGGCCATACCCGGCGTCAAGGGACCTCCCCGAGCAAGTGTCCCTACCTCAACTTCTTCCA |
| | | GCTCCTAGTCCTCGCCGGCCTCTCCCACTTCTGCTCCGGCGTAATCCACGTTACGAAGGAGG |
| | | TCAAAGAGGTCGCGACCCTCAGCTGTGGCCATAACGTCTCCGTAGAGGAGTTGGCGCAGACA |
| | | AGGATCTATTGGCAGAAGGAGAAGAAGATGGTCCTTACCATGATGAGCGGCGACATGAACAT |
| | | CTGGCCGGAGTACAAGAATCGGACCATCTTCGACATCACTAACAATCTTAGCATAGTGATCC |
| | | TCGCCCTGAGGCCCAGCGATGAGGGGACCTACGAATGCGTGGTGCTTAAGTACGAGAAGGAC |
| | | GCCTTCAAGAGGGAGCACCTCGCCGAGGTGACACTGAGCGTGAAAGCCGACTTCCCCACCCC |
| | | GAGCATCAGCGACTTCGAGATCCCCACCAGCAACATCAGGAGGATCATCTGTAGCACCAGCG |
| | | GAGGCTTTCCCGAGCCCCACCTCAGCTGGCTGGAGAACGGGGAGGAGCTCAATGCTATCAAT |
| | | ACCACCGTGAGCCAGGACCCCGAAACGGAGCTCTACGCCGTCTCCTCGAAGCTGGACTTCAA |
| | | CATGACCACCAACCACAGCTTCATGTGCCTGATCAAGTACGGGCACCTGCGGGTGAACCAGA |
| | | CCTTCAACTGGAACACCACAAAGCAGGAGCATTTTCCAGACGACAAAACCCACACGTGCCCC |
| | | CCGTGCCCCGCGCCCGAGCTCCTGGGGGGACCCAGCGTGTTCCTGTTTCCCCCCAAGCCCAA |
| | | AGACACCCTGATGATCAGCAGGACCCCGGAGGTGACCTGTGTCGTGGTGGACGTGAGCCACG |
| | | AGGACCCCGAGGTGAAGTTCAATTGGTACGTGGACGGCGTGGAGGTGCACAACGCCAAGACC |
| | | AAGCCCCGCGAGGAGCAGTACAACAGCACCTACCGGGTGGTGAGCGTGCTGACCGTCCTGCA |
| | | CCAGGACTGGCTGAACGGGAAGGAGTACAAGTGCAAGGTGAGCAACAAGGCCCTCCCCGCCC |
| | | CGATCGAGAAAACAATCAGCAAGGCCAAGGGGCAACCCCGGGAACCCCAGGTCTACACCCTG |
| | | CCCCCCAGCCGCGACGAGCTGACCAAGAACCAAGTGAGCCTGACCTGCCTGGTGAAGGGGTT |
| | | CTACCCGAGCGATATCGCCGTGGAGTGGGAGAGCAACGGTCAGCCCGAGAACAACTACAAGA |
| | | CCACCCCGCCCGTGCTCGACAGCGACGGTAGCTTCTTCCTGTACAGCAAGCTGACCGTCGAT |
| | | AAGAGCAGGTGGCAGCAAGGCAACGTGTTCTCCTGCAGCGTGATGCACGAGGCCCTCCACAA |
| | | CCACTACACCCAGAAAAGCCTGTCGCTTTCCCCCGGCAAG |

[1350] The CD80 sequence-optimized polynucleotide sequences disclosed herein are distinct from the corresponding CD80 wild type polynucleotide sequences and from other known sequence-optimized polynucleotide sequences, e.g., these sequence-optimized nucleic acids have unique compositional characteristics. See FIGS. 87A to 88B

[1351] In some embodiments, the percentage of uracil or thymine nucleobases in a sequence-optimized CD80 polynucleotide sequence (e.g., encoding a CD80 polypeptide, a functional fragment, or a variant thereof) is modified (e.g., reduced) with respect to the percentage of uracil or thymine nucleobases in the reference wild-type polynucleotide sequence. Such a sequence is referred to as a uracil-modified or thymine-modified sequence. The percentage of uracil or thymine content in a CD80 polynucleotide sequence can be determined by dividing the number of uracils or thymines in a sequence by the total number of nucleotides and multiplying by 100. In some embodiments, the sequence-optimized CD80 polynucleotide sequence has a lower uracil or thymine content than the uracil or thymine content in the reference wild-type sequence. In some embodiments, the uracil or thymine content in a sequence-optimized CD80 polynucleotide sequence disclosed herein is greater than the uracil or thymine content in the reference wild-type sequence and still maintain beneficial effects, e.g., increased expression and/or CD80 response when compared to the reference wild-type sequence.

[1352] The uracil or thymine content of wild-type CD80 is about 26.60%. In some embodiments, the uracil or thymine content of a uracil- or thymine-modified sequence encoding a CD80 polypeptide is less than 25.60%. In some embodiments, the uracil or thymine content of a uracil- or thymine-modified sequence encoding a CD80 polypeptide disclosed herein is less than 25%, less than 24%, less than 23%, less than 22%, less than 21%, less than 20%, less than 19%, less that 18%, less than 17%, or less than 16%. In some embodiments, the uracil or thymine content is not less than 15%. The uracil or thymine content of a sequence disclosed herein, i.e., its total uracil or thymine content is abbreviated herein as % U_{TL} or % T_{TL}.

[1353] In some embodiments, the uracil or thymine content (% U_{TL} or % T_{TL}) of a uracil-or thymine-modified sequence encoding a CD80 polypeptide disclosed herein is between 15% and 25%, between 15% and 24%, between 16% and 25%, between 16% and 24%, between 17% and 24%, between 17% and 23%, between 17% and 22%, between 15% and 22%, between 15% and 21%, between 15% and 20%, between 15% and 19%, between 15% and 18%, or between 15% and 17%.

[1354] In some embodiments, the uracil or thymine content (% U_{TL} or % T_{TL}) of a uracil-or thymine-modified sequence encoding a CD80 polypeptide disclosed herein is between 13% and 20%, between 13% and 19%, between 13% and 18%, between 14% and 19%, between 14% and 18%, between 14% and 17%, between 14% and 16%, between 15% and 18%, between 15% and 19%, between 15% and 17%, or between 16% and 17%.

[1355] In a particular embodiment, the uracil or thymine content (% U_{TL} or % T_{TL}) of a uracil- or thymine modified sequence encoding a CD80 polypeptide disclosed herein is between about 15% and about 18%, e.g., between 16% and 18%

[1356] The uracil or thymine content of wild-type Fc is about 15.57%. In some embodiments, the uracil or thymine content of a uracil- or thymine-modified sequence encoding an Fc polypeptide is less than 15%. In some embodiments, the uracil or thymine content of a uracil- or thymine-modified sequence encoding a CD80 polypeptide disclosed is less than 15% or less than 14%. In some embodiments, the uracil or thymine content is not less than 13%. The uracil or thymine content of a sequence disclosed herein, i.e., its total uracil or thymine content is abbreviated herein as % U_{TL} or % T_{TL}.

[1357] In some embodiments, the uracil or thymine content (% U_{TL} or % T_{TL}) of a uracil-or thymine-modified sequence encoding an Fc region disclosed is between 13% and 16%, between 13% and 15%, between 13% and 14%, or between 14% and 15%.

[1358] In some embodiments, the uracil or thymine content (% U_{TL} or % T_{TL}) of a uracil-or thymine-modified sequence encoding an Fc region disclosed is between 11% and 18%, between 11% and 17%, between 11% and 16%, between 11% and 15%, between 12% and 18%, between 12% and 17%, between 12% and 16%, between 12% and 15%, between 13% and 16%, between 13% and 17%, between 13% and 18%, between 13% and 15%, or between 14% and 15%.

[1359] In a particular embodiment, the uracil or thymine content (% U_{TL} or % T_{TL}) of a uracil- or thymine modified sequence encoding a CD80 polypeptide disclosed herein is between about 13% and about 16%, e.g., between 13% and 15%.

[1360] In some embodiments, the % U_{WT} or % T_{WT} of a uracil- or thymine-modified sequence encoding a CD80 polypeptide disclosed herein is above 50%, above 55%, above 60%, or above 65%.

[1361] In some embodiments, the % U_{WT} or % T_{WT} of a uracil- or thymine modified sequence encoding a CD80 polypeptide disclosed herein is between 49% and 79%, between 50% and 78%, between 51% and 77%, between 52% and 76%, between 53% and 75%, between 54% and 74%, between 55% and 73%, between 56% and 72%, between 57% and 71%, between 58% and 70%, or between 59% and 69%.

[1362] In some embodiments, the % U_{WT} or % T_{WT} of a uracil- or thymine-modified sequence encoding a CD80 polypeptide disclosed herein is between 57% and 71%, between 57% and 70%, between 58% and 70%, between 59% and 70%, between 59% and 69%, between 60% and 70%, or between 61% and 70%.

[1363] In a particular embodiment, the % U_{WT} or % T_{WT} of a uracil- or thymine-modified sequence encoding a CD80 polypeptide disclosed herein is between about 59% and about 69%, e.g., between 60% and 69%.

[1364] In some embodiments, the % U_{WT} or % T_{WT} of a uracil- or thymine-modified sequence encoding an Fc polypeptide disclosed herein is above 50%, above 55%, above 60%, or above 65%, above 70%, above 75%, above 80%, above 85%, above 90%, or above 95%.

[1365] In some embodiments, the % U_{WT} or % T_{WT} of a uracil- or thymine modified sequence encoding an Fc polypeptide disclosed herein is between 75% and 100%, between 76% and 100%, between 77% and 100%, between 78% and 100%, between 79% and 100%, between 80% and 100%, between 81% and 100%, between 82% and 100%, between 83% and 100%, between 84% and 100%, or between 85% and 100%.

[1366] In some embodiments, the % U_{WT} or % T_{WT} of a uracil- or thymine-modified sequence encoding an Fc polypeptide disclosed herein is between 83% and 100%, between 84% and 100%, between 85% and 100%, between 86% and 100%, or between 87% and 100%.

[1367] In a particular embodiment, the % U_{WT} or % T_{WT} of a uracil- or thymine-modified sequence encoding an Fc polypeptide disclosed herein is between about 85% and about 100%, e.g., between 86% and 100%.

[1368] For DNA it is recognized that thymine is present instead of uracil, and one would substitute T where U appears. Thus, all the disclosures related to, e.g., % U_{TM}, % U_{WT}, or % U_{TL}, with respect to RNA are equally applicable to % T_{TM}, % T_{WT}, or % T_{TL} with respect to DNA.

[1369] In some embodiments, the % U_{TM} of a uracil-modified sequence encoding a CD80 polypeptide disclosed herein or encoding an Fc polypeptide disclosed herein is below 300%, below 295%, below 290%, below 285%, below 280%, below 275%, below 270%, below 265%, below 260%, below 255%, below 250%, below 245%, below 240%, below 235%, below 230%, below 225%, below 220%, below 215%, below 200%, below 195%, below 190%, below 185%, below 180%, below 175%, below 170%, below 165%, below 160%, below 155%, below 150%, below 145%, below 140%, below 139%, below 138%, below 137%, below 136%, below 135%, below 134%, below 133%, below 132%, below 131%, below 130%, below 129%, below 128%, below 127%, below 126%, below 125%, below 124%, below 123%, below 122%, below 121%, below 120%, below 119%, below 118%, below 117%, below 116%, or below 115%.

[1370] In some embodiments, the % U_{TM} of a uracil-modified sequence encoding a CD80 polypeptide disclosed herein or encoding an Fc polypeptide disclosed herein is above 100%, above 101%, above 102%, above 103%, above 104%, above 105%, above 106%, above 107%, above 108%, above 109%, above 110%, above 111%, above 112%, above 113%, above 114%, above 115%, above 116%, above 117%, above 118%, above 119%, above 120%, above 121%, above 122%, above 123%, above 124%, above 125%, or above 126%, above 127%, above 128%, above 129%, above 130%, above 131%, above 132%, above 133%, above 134%, above 135%, above 136%, above 137% above 138%, above 139%, above 140%, above 141%, above 142%, or above 143%.

[1371] In some embodiments, the % U_{TM} of a uracil-modified sequence encoding a CD80 polypeptide disclosed herein is between 122% and 124%, between 121% and 125%, between 120% and 126%, between 119% and 127%, between 118% and 128%, between 117% and 129%, between 116% and 130%, between 115% and 131%, between 114% and 132%, between 113% and 133%, between 112% and 134%, between 111% and 135%, between 110% and 136%, between 109% and 137%, or between 108% and 138%. In some embodiments, the % U_{TM} of a uracil-modified sequence encoding a CD80 polypeptide disclosed herein is between about 119% and about 139%, e.g., between 120% and 138%.

[1372] In some embodiments, the % U_{TM} of a uracil-modified sequence encoding an Fc polypeptide disclosed herein is between 135% and 137%, between 134% and 138%, between 133% and 139%, between 132% and 140%, between 131% and 141%, between 130% and 142%, between 129% and 143%, between 128% and 144%, between 127% and 145%, between 126% and 146%, between 125% and 147%, between 124% and 148%, between 123% and 149%, between 122% and 150%, or between 121% and 151%. In some embodiments, the % U_{TM} of a uracil-modified sequence encoding a CD80 polypeptide disclosed herein is between about 122% and about 144%, e.g., between 123% and 143%.

[1373] In some embodiments, a uracil-modified sequence encoding a CD80 polypeptide disclosed herein or an Fc polypeptide disclosed herein has a reduced number of consecutive uracils with respect to the corresponding wild-type nucleic acid sequence. For example, two consecutive leucines can be encoded by the sequence CUUUUG, which includes a four uracil cluster. Such a subsequence can be substituted, e.g., with CUGCUC, which removes the uracil cluster.

[1374] As discussed above, the number of phenylalanines in a sequence establishes a minimum number of uracil pairs (UU) that cannot be eliminated without altering the number of phenylalanines in the encoded polypeptide. Wild type CD80 contains 23 uracil pairs (UU), and 8 uracil triplets (UUU). In some embodiments, a uracil-modified sequence encoding a CD80 polypeptide disclosed herein has a reduced number of uracil triplets (UUU) with respect to the wild-type nucleic acid sequence. In some embodiments, a uracil-modified sequence encoding a CD80 polypeptide disclosed herein contains 8, 7, 6, 5, 4, 3, 2, 1 or no uracil triplets (UUU).

[1375] In some embodiments, a uracil-modified sequence encoding a CD80 polypeptide disclosed herein or an Fc polypeptide disclosed herein has a reduced number of uracil pairs (UU) with respect to the number of uracil pairs (UU) in the wild-type nucleic acid sequence. In some embodiments, a uracil-modified sequence encoding a CD80 polypeptide, e.g., a CD80 polypeptide comprising the EC domain of CD80 or a functional portion thereof, disclosed herein has a number of uracil pairs (UU) corresponding to the minimum possible number of uracil pairs (UU) in the wild-type nucleic acid sequence, e.g., 11 uracil pairs in the case of wild type CD80.

[1376] In some embodiments, a uracil-modified sequence encoding a CD80 polypeptide disclosed herein or an Fc polypeptide disclosed herein has at least 1, 2, 3, 4, 5, 6, 7, 8, 9, or 10 uracil pairs (UU) less than the number of uracil pairs (UU) in the wild-type nucleic acid sequence. In some embodiments, a uracil-modified sequence encoding a CD80 polypeptide disclosed herein has between 5 and 14 uracil pairs (UU). In other embodiments, a uracil-modified sequence encoding an Fc polypeptide disclosed herein has between 4 and 11 uracil pairs (UU).

[1377] In some embodiments, a uracil-modified sequence encoding a CD80 polypeptide disclosed herein has a % UU_{wt} less than 99%, less than 95%, less than 90%, less than 85%, less than 80%, less than 75%, less than 70%, less than 65%, less than 60%, less than 65%, less than 60%, less than 55%, less than 50%, less than 40%, or less than 35%.

[1378] In some embodiments, a uracil-modified sequence encoding a CD80 polypeptide has a % UU_{Wt} between 99% and 38%. In a particular embodiment, a uracil-modified sequence encoding a CD80 polypeptide, e.g., a CD80 polypeptide comprising the EC domain of CD80 or a functional portion thereof, disclosed herein has a % UU_{wt} between 33% and 94%.

[1379] In some embodiments, a uracil-modified sequence encoding an Fc polypeptide disclosed herein has a % UU_{wt} less than 99%, less than 95%, less than 90%, less than 85%, less than 80%, less than 75%, or less than 70%. In other embodiments, a uracil-modified sequence encoding an Fc polypeptide disclosed herein has a % UU_{wt} more than 100%, more than 110%, more 120%, more than 130%, more than 140%, more than 150%, more than 160%, more than 170%, or more than 180%.

[1380] In some embodiments, a uracil-modified sequence encoding an Fc polypeptide has a % UU_{wt} between 190% and 65%. In a particular embodiment, a uracil-modified sequence encoding a CD80 polypeptide, e.g., a CD80 polypeptide comprising the EC domain of CD80 or a functional portion thereof, disclosed herein has a % UU_{wt} between 66% and 184%.

[1381] In some embodiments, the CD80 polynucleotide comprises a uracil-modified sequence encoding a CD80 polypeptide or an Fc polypeptide disclosed herein. In some embodiments, the uracil-modified sequence encoding a CD80 polypeptide or an Fc polypeptide comprises at least one chemically modified nucleobase, e.g., 5-methoxyuracil. In some embodiments, at least 95% of a nucleobase (e.g., uracil) in a uracil-modified sequence encoding a CD80 polypeptide or an Fc polypeptide are modified nucleobases.

[1382] In some embodiments, at least 95% of uracil in a uracil-modified sequence encoding a CD80 polypeptide or an Fc polypeptide is 5-methoxyuracil. In some embodiments, the CD80 polynucleotide comprising a uracil-modified sequence further comprises a miRNA binding site, e.g., a miRNA binding site that binds to miR-122. In some embodiments, the CD80 polynucleotide comprising a uracil-modified sequence is formulated with a delivery agent, e.g., a compound having Formula (I), e.g., any of Compounds 1-147.

[1383] In some embodiments, the “guanine content of the sequence optimized ORF encoding a CD80 polypeptide disclosed herein with respect to the theoretical maximum guanine content of a nucleotide sequence encoding the CD80 polypeptide,” abbreviated as % G_{TMX} is at least about 69%, at least about 70%, at least about 75%, at least about 80%, at least about 85%, at least about 90%, at least about 95%, or about 100%. In some embodiments, the % G_{TMX} is between about 65% and about 80%, between about 66% and about 79%, between about 67% and about 78%, between about 68% and about 77%, or between about 68% and about 76%.

[1384] In some embodiments, the “guanine content of the sequence optimized ORF encoding an Fc polypeptide disclosed herein with respect to the theoretical maximum guanine content of a nucleotide sequence encoding the Fc polypeptide,” abbreviated as % G_{TMX} is at least about 74%, at least about 75%, at least about 80%, at least about 85%, at least about 90%, at least about 95%, or about 100%. In some embodiments, the % G_{TMX} is between about 70% and about 85%, between about 71% and about 84%, between about 72% and about 83%, between about 73% and about 82%, or between about 74% and about 82%.

[1385] In some embodiments, the “cytosine content of the ORF relative to the theoretical maximum cytosine content of a nucleotide sequence encoding the CD80 polypeptide,” abbreviated as % C_{TMX}, is at least 59%, at least 60%, at least about 65%, at least about 70%, at least about 75%, at least about 80%, at least about 85%, at least about 90%, at least about 95%, or about 100%. In some embodiments, the % C_{TMX} is between about 65% and about 85%, between about 66% and about 84%, between about 67% and about 83%, between about 68% and about 82%, between about 69% and about 81%, between about 70% and about 80%, or between about 70% and about 79%.

[1386] In some embodiments, the “cytosine content of the ORF relative to the theoretical maximum cytosine content of a nucleotide sequence encoding the Fc polypeptide,” abbreviated as % C_{TMX}, is at least 59%, at least 60%, at least about 65%, at least about 70%, at least about 75%, at least about 80%, at least about 85%, at least about 90%, at least about 95%, or about 100%. In some embodiments, the % C_{TMX} is between about 62% and about 80%, between about 63% and about 79%, between about 64% and about 78%, between about 65% and about 77%, between about 66% and about 76%, or between about 67% and about 76%.

[1387] In some embodiments, the “guanine and cytosine content (G/C) of the ORF relative to the theoretical maximum G/C content in a nucleotide sequence encoding the CD80 polypeptide,” abbreviated as % G/C_{TMX} is at least about 80%, at least about 85%, at least about 90%, at least about 95%, or about 100%. In some embodiments, the % G/C_{TMX} is between about 80% and about 100%, between about 85% and about 99%, between about 86% and about 97%, between about 87% and about 96%, between about 88% and about 95%, between about 89% and about 95%, or between about 90% and about 95%.

[1388] In some embodiments, the “guanine and cytosine content (G/C) of the ORF relative to the theoretical maximum G/C content in a nucleotide sequence encoding the Fc polypeptide,” abbreviated as % G/C_{TMX} is at least about 80%, at least about 85%, at least about 90%, at least about 95%, or about 100%. In some embodiments, the % G/C_{TMX} is between about 80% and about 100%, between about 85% and about 99%, between about 86% and about 97%, between about 87% and about 96%, between about 88% and about 96%, between about 89% and about 96%, between about 90% and about 96%, between about 91% and about 96%, or between about 92% and about 96%.

[1389] In some embodiments, the “G/C content in the ORF relative to the G/C content in the corresponding wild-type ORF,” abbreviated as % G/C_{WT} is at least 102%, at least 103%, at least 104%, at least 105%, at least 106%, at least 107%, at least 110%, at least 115%, at least 120%, at least 125%, or at least 130%.

[1390] In some embodiments, the average G/C content in the 3rd codon position in the ORF is at least 2%, at least 3%, at least 4%, at least 5%, at least 6%, at least 7%, at least 8%, at least 9%, at least 10%, at least 11%, at least 12%, at least 13%, at least 14%, at least 15%, at least 16%, at least 17%, at least 18%, at least 19%, at least 20%, at least 21%, at least 22%, at least 23%, at least 24%, at least 25%, at least 26%, at least 27%, at least 28%, at least 29%, at least 30%, at least 31%, at least 32%, at least 33%, at least 34%, at least 35%, at least 36%, at least 37%, at least 38%, at least 39%, at least 40%, at least 41%, at least 42%, at least 43%, at least 44%, at least 45%, at least 46%, at least 47%, at least 48%, or at least 49% higher than the average G/C content in the 3rd codon position in the corresponding wild-type ORF.

[1391] In some embodiments, the CD80 polynucleotide disclosed herein comprises an open reading frame (ORF) encoding a CD80 polypeptide, wherein the ORF has been sequence optimized, and wherein each of % U_{TL}, % U_{WT}, % U_{TM}, % G_{TL}, % G_{WT},% G_{TMX}, % C_{TL}, % C_{WT}, % C_{TMX}, % G/C_{TL}, % G/C_{WT}, or % G/C_{TMX}, alone or in a combination thereof is in a range between (i) a maximum corresponding to the parameter's maximum value (MAX) plus about 0.5, 1, 1.5, 2, 2.5, 3, 3.5, 4, 4.5, 5, 5.5, 6, 6.5, 7, 7.5, 8, 8.5, 9, 9.5, or 10 standard deviations (STD DEV), and (ii) a minimum corresponding to the parameter's minimum value (MIN) less 0.5, 1, 1.5, 2, 2.5, 3, 3.5, 4, 4.5, 5, 5.5, 6, 6.5, 7, 7.5, 8, 8.5, 9, 9.5, or 10 standard deviations (STD DEV).

[1392] In some embodiments, the CD80 polynucleotide disclosed herein comprises an open reading frame (ORF) encoding an Fc polypeptide, wherein the ORF has been sequence optimized, and wherein each of % U_{TL}, % U_{WT}, % U_{TM}, % G_{TL}, % G_{WT}, % G_{TMX}, % C_{TL}, % C_{WT}, % C_{TMX}, % G/C_{TL}, % G/C_{WT}, or % G/C_{TMX}, alone or in a combination thereof is in a range between (i) a maximum corresponding to the parameter's maximum value (MAX) plus about 0.5, 1, 1.5, 2, 2.5, 3, 3.5, 4, 4.5, 5, 5.5, 6, 6.5, 7, 7.5, 8, 8.5, 9, 9.5, or 10 standard deviations (STD DEV), and (ii) a minimum corresponding to the parameter's minimum value (MIN) less 0.5, 1, 1.5, 2, 2.5, 3, 3.5, 4, 4.5, 5, 5.5, 6, 6.5, 7, 7.5, 8, 8.5, 9, 9.5, or 10 standard deviations (STD DEV).

[1393] In some embodiments, the CD80 polynucleotide (e.g., a RNA, e.g., a mRNA) comprises a nucleotide sequence (e.g., an ORF) encoding a CD80 polypeptide, e.g., a CD80 polypeptide comprising the EC domain of CD80 or a functional portion thereof, wherein the CD80 polypeptide comprises an amino acid sequence at least 70%, at least 75%, at least 80%, at least 85%, at least 90%, at least 95%, at least 96%, at least 97%, at least 98%, at least 99%, or 100% identical to amino acids 35 to 241 of SEQ ID NO: 473.

[1394] In some embodiments, the CD80 polynucleotide (e.g., a RNA, e.g., a mRNA) comprises a nucleotide sequence (e.g., an ORF) encoding a CD80 polypeptide, e.g., a CD80 polypeptide comprising the EC domain of CD80 or a functional portion thereof, wherein the CD80 polypeptide comprises an amino acid sequence at least 60%, at least 65%, at least 70%, at least 75%, at least 80%, at least 85%, at least 90%, at least 95%, at least 96%, at least 97%, at least 98%, at least 99%, or 100% identical to SEQ ID NO: 473.

[1395] In some embodiments, the CD80 polynucleotide (e.g., a RNA, e.g., a mRNA) comprises a nucleotide sequence (e.g., an ORF) encoding a CD80 polypeptide, e.g., a CD80 polypeptide comprising the EC domain of CD80 or a functional portion thereof, wherein the polynucleotide comprises an amino acid sequence at least 60%, at least 65%, at least 70%, at least 75%, at least 80%, at least 85%, at least 90%, at least 95%, at least 96%, at least 97%, at least 98%, at least 99%, or 100% identical to nucleotides 103-723 of SEQ ID NO: 474.

[1396] In some embodiments, the CD80 polynucleotide (e.g., a RNA, e.g., a mRNA) comprises a nucleotide sequence (e.g., an ORF) encoding a CD80 polypeptide, e.g., a CD80 polypeptide comprising the EC domain of CD80 or a functional portion thereof, wherein the polynucleotide comprises an amino acid sequence at least 60%, at least 65%, at least 70%, at least 75%, at least 80%, at least 85%, at least 90%, at least 95%, at least 96%, at least 97%, at least 98%, at least 99%, or 100% identical to SEQ ID NO: 474.

[1397] In some embodiments, the CD80 polynucleotide (e.g., a RNA, e.g., a mRNA) comprises a nucleotide sequence (e.g., an ORF) encoding a CD80 polypeptide, wherein the nucleotide sequence has 85% to 100%, 88% to 100%, 90% to 100%, 95% to 100%, 80% to 95%, 85% to 95%, 85% to 90%, 90% to 95%, or 95% to 100% sequence identity to nucleotides 103-723 of a sequence selected from the group consisting of SEQ ID NOs: 498-522.

[1398] In some embodiments, the CD80 polynucleotide (e.g., a RNA, e.g., a mRNA) comprises a nucleotide sequence (e.g., an ORF) encoding a CD80 polypeptide, wherein the nucleotide sequence has 60% to 100%, 65% to 100%, 70% to 100%, 75% to 100%, 80% to 100%, 85% to 100%, 90% to 100%, 95% to 100%, 80% to 95%, 85% to 95%, 85% to 90%, 90% to 95%, or 95% to 100% sequence identity to a sequence selected from the group consisting of SEQ ID NOs: 498-522.

[1399] In some embodiments, the CD80 polynucleotide (e.g., a RNA, e.g., a mRNA) comprises a nucleotide sequence (e.g., an ORF) encoding a CD80 polypeptide, wherein the nucleotide sequence has at least 88%, at least 89%, at least 90%, at least 91%, at least 92%, at least 93%, at least 94%, at least 95%, at least 96%, at least 97%, at least 98%, at least 99%, or 100% sequence identity to nucleotides 103-723 of SEQ ID NO: 511.

[1400] In some embodiments, the CD80 polynucleotide (e.g., a RNA, e.g., a mRNA) comprises a nucleotide sequence (e.g., an ORF) encoding a CD80 polypeptide, wherein the nucleotide sequence has at least 80%, at least 85%, at least 86%, at least 87%, at least 88%, at least 89%, at least 90%, at least 91%, at least 92%, at least 93%, at least 94%, at least 95%, at least 96%, at least 97%, at least 98%, at least 99%, or 100% sequence identity to SEQ ID NO: 511.

[1401] In some embodiments, the CD80 polynucleotide (e.g., a RNA, e.g., a mRNA) comprises a nucleotide sequence (e.g., an ORF) encoding a CD80 polypeptide, wherein the nucleotide sequence has 88% to 100%, 90% to 100%, 88% to 95%, 88% to 90%, 90% to 95%, or 95% to 100% sequence identity to nucleotides 103-723 of SEQ ID NO: 511.

[1402] In some embodiments, the CD80 polynucleotide (e.g., a RNA, e.g., a mRNA) comprises a nucleotide sequence (e.g., an ORF) encoding a CD80 polypeptide, wherein the nucleotide sequence has 80% to 100%, 85% to 100%, 86% to 100%, 90% to 100%, 86% to 95%, 86% to 90%, 90% to 95%, or 95% to 100% sequence identity to SEQ ID NO: 511.

[1403] In some embodiments, the CD80 polynucleotide (e.g., a RNA, e.g., a mRNA) comprises a nucleotide sequence (e.g., an ORF) encoding a CD80 polypeptide, wherein the nucleotide sequence has at least 89%, at least 90%, at least 91%, at least 92%, at least 93%, at least 94%, at least 95%, at least 96%, at least 97%, at least 98%, at least 99%, or 100% sequence identity to nucleotides 103-723 of a sequence selected from the group consisting of SEQ ID NOs: 513, 520, and 521.

[1404] In some embodiments, the CD80 polynucleotide (e.g., a RNA, e.g., a mRNA) comprises a nucleotide sequence (e.g., an ORF) encoding a CD80 polypeptide, wherein the nucleotide sequence has at least 80%, at least 85%, at least 87%, at least 88%, at least 89%, at least 90%, at least 91%, at least 92%, at least 93%, at least 94%, at least 95%, at least 96%, at least 97%, at least 98%, at least 99%, or 100% sequence identity to a sequence selected from the group consisting of SEQ ID NOs: 513, 520, and 521.

[1405] In some embodiments, the CD80 polynucleotide (e.g., a RNA, e.g., a mRNA) comprises a nucleotide sequence (e.g., an ORF) encoding a CD80 polypeptide, wherein the nucleotide sequence has 89% to 100%, 90% to 100%, 89% to 95%, 90% to 95%, or 95% to 100% sequence identity to nucleotides 103-723 of a sequence selected from the group consisting of SEQ ID NOs: 513, 520, and 521.

[1406] In some embodiments, the CD80 polynucleotide (e.g., a RNA, e.g., a mRNA) comprises a nucleotide sequence (e.g., an ORF) encoding a CD80 polypeptide, wherein the nucleotide sequence has 80% to 100%, 85% to 100%, 87% to 100%, 90% to 100%, 87% to 95%, 87% to 90%, 90% to 95%, or 95% to 100% sequence identity to a sequence selected from the group consisting of SEQ ID NOs: 513, 520, and 521.

[1407] In some embodiments, the CD80 polynucleotide (e.g., a RNA, e.g., a mRNA) comprises a nucleotide sequence (e.g., an ORF) encoding a CD80 polypeptide, wherein the nucleotide sequence has at least 90%, at least 91%, at least 92%, at least 93%, at least 94%, at least 95%, at least 96%, at least 97%, at least 98%, at least 99%, or 100% sequence identity to nucleotides 103-723 of a sequence selected from the group consisting of SEQ ID NOs: 506-508, 510, 512, 514, 515, 517, 518, and 522.

[1408] In some embodiments, the CD80 polynucleotide (e.g., a RNA, e.g., a mRNA) comprises a nucleotide sequence (e.g., an ORF) encoding a CD80 polypeptide, wherein the nucleotide sequence has at least 80%, at least 85%, at least 88%, at least 89%, at least 90%, at least 91%, at least 92%, at least 93%, at least 94%, at least 95%, at least 96%, at least 97%, at least 98%, at least 99%, or 100% sequence identity to a sequence selected from the group consisting of SEQ ID NOs: 506-508, 510, 512, 514, 515, 517, 518, and 522.

[1409] In some embodiments, the CD80 polynucleotide (e.g., a RNA, e.g., a mRNA) comprises a nucleotide sequence (e.g., an ORF) encoding a CD80 polypeptide, wherein the nucleotide sequence has 90% to 100%, 90% to 95%, or 95% to 100% sequence identity to nucleotides 103-723 of a sequence selected from the group consisting of SEQ ID NO: 501, 502, 514, 516, 518, and 515.

[1410] In some embodiments, the CD80 polynucleotide (e.g., a RNA, e.g., a mRNA) comprises a nucleotide sequence (e.g., an ORF) encoding a CD80 polypeptide, wherein the nucleotide sequence has 80% to 100%, 85% to 100%, 88% to 100%, 90% to 100%, 88% to 95%, 88% to 90%, 90% to 95%, or 95% to 100% sequence identity to a sequence selected from the group consisting of SEQ ID NOs: 506-508, 510, 512, 514, 515, 517, 518, and 522.

[1411] In some embodiments, the CD80 polynucleotide (e.g., a RNA, e.g., a mRNA) comprises a nucleotide sequence (e.g., an ORF) encoding a CD80 polypeptide, wherein the nucleotide sequence has at least 91%, at least 92%, at least 93%, at least 94%, at least 95%, at least 96%, at least 97%, at least 98%, at least 99%, or 100% sequence identity to amino acids 30 to 251 of SEQ ID NO: 516 or 519.

[1412] In some embodiments, the CD80 polynucleotide (e.g., a RNA, e.g., a mRNA) comprises a nucleotide sequence (e.g., an ORF) encoding a CD80 polypeptide, wherein the nucleotide sequence has at least 80%, at least 85%, at least 89%, at least 90%, at least 91%, at least 92%, at least 93%, at least 94%, at least 95%, at least 96%, at least 97%, at least 98%, at least 99%, or 100% sequence identity to SEQ ID NO: 516 or 519.

[1413] In some embodiments, the CD80 polynucleotide (e.g., a RNA, e.g., a mRNA) comprises a nucleotide sequence (e.g., an ORF) encoding a CD80 polypeptide, wherein the nucleotide sequence has 91% to 100%, 95% to 100%, or 91% to 95% sequence identity to nucleotides 103-723 30 to 251 of SEQ ID NO: 516 or 519.

[1414] In some embodiments, the CD80 polynucleotide (e.g., a RNA, e.g., a mRNA) comprises a nucleotide sequence (e.g., an ORF) encoding a CD80 polypeptide, wherein the nucleotide sequence has 80% to 100%, 85% to 100%, 89% to 100%, 95% to 100%, or 89% to 95% sequence identity to SEQ ID NO: 516 or 519.

[1415] In some embodiments, the CD80 polynucleotide (e.g., a RNA, e.g., a mRNA) comprises a nucleotide sequence (e.g., an ORF) encoding a CD80 polypeptide, wherein the nucleotide sequence has at least 92%, at least 93%, at least 94%, at least 95%, at least 96%, at least 97%, at least 98%, at least 99%, or 100% sequence identity to nucleotides 103-723 of a sequence selected from the group consisting of SEQ ID NOs: 504, 505, and 509.

[1416] In some embodiments, the CD80 polynucleotide (e.g., a RNA, e.g., a mRNA) comprises a nucleotide sequence (e.g., an ORF) encoding a CD80 polypeptide, wherein the nucleotide sequence has at least 80%, at least 85%, at least 90%, at least 91%, at least 92%, at least 93%, at least 94%, at least 95%, at least 96%, at least 97%, at least 98%, at least 99%, or 100% sequence identity to a sequence selected from the group consisting of SEQ ID NOs: 504, 505, and 509.

[1417] In some embodiments, the CD80 polynucleotide (e.g., a RNA, e.g., a mRNA) comprises a nucleotide sequence (e.g., an ORF) encoding a CD80 polypeptide, wherein the nucleotide sequence has 92% to 100%, 92% to 95%, or 95% to 100% sequence identity to nucleotides 103-723 of a sequence selected from the group consisting of SEQ ID NOs: 504, 505, and 509.

[1418] In some embodiments, the CD80 polynucleotide (e.g., a RNA, e.g., a mRNA) comprises a nucleotide sequence (e.g., an ORF) encoding a CD80 polypeptide, wherein the nucleotide sequence has 80% to 100%, 85% to 100%, 90% to 100%, 90% to 95%, or 95% to 100% sequence identity to a sequence selected from the group consisting of SEQ ID NOs: 504, 505, and 509.

[1419] In some embodiments, the CD80 polynucleotide (e.g., a RNA, e.g., a mRNA) comprises a nucleotide sequence (e.g., an ORF) encoding an Fc region polypeptide, e.g., a CD80Fc fusion polypeptide comprising the EC domain of CD80 or a functional portion thereof, wherein the Fc polypeptide comprises an amino acid sequence at least 70%, at least 75%, at least 80%, at least 85%, at least 90%, at least 95%, at least 96%, at least 97%, at least 98%, at least 99%, or 100% identical to amino acids 242 to 468 of SEQ ID NO: 473.

[1420] In some embodiments, the CD80 polynucleotide (e.g., a RNA, e.g., a mRNA) comprises a nucleotide sequence (e.g., an ORF) encoding an Fc polypeptide, e.g., a CD80Fc fusion polypeptide comprising the EC domain of CD80 or a functional portion thereof, wherein the CD80Fc fusion polypeptide comprises an amino acid sequence at least 60%, at least 65%, at least 70%, at least 75%, at least 80%, at least 85%, at least 90%, at least 95%, at least 96%, at least 97%, at least 98%, at least 99%, or 100% identical to SEQ ID NO: 473.

[1421] In some embodiments, the CD80 polynucleotide (e.g., a RNA, e.g., a mRNA) comprises a nucleotide sequence (e.g., an ORF) encoding an Fc polypeptide, wherein the polynucleotide comprises an amino acid sequence at least 60%, at least 65%, at least 70%, at least 75%, at least 80%, at least 85%, at least 90%, at least 95%, at least 96%, at least 97%, at least 98%, at least 99%, or 100% identical to nucleotides 724 to 1404 of SEQ ID NO: 474.

[1422] In some embodiments, the CD80 polynucleotide (e.g., a RNA, e.g., a mRNA) comprises a nucleotide sequence (e.g., an ORF) encoding a CD80Fc fusion polypeptide, wherein the polynucleotide comprises an amino acid sequence at least 60%, at least 65%, at least 70%, at least 75%, at least 80%, at least 85%, at least 90%, at least 95%, at least 96%, at least 97%, at least 98%, at least 99%, or 100% identical to SEQ ID NO: 474.

[1423] In some embodiments, the CD80 polynucleotide (e.g., a RNA, e.g., a mRNA) comprises a nucleotide sequence (e.g., an ORF) encoding an Fc polypeptide, wherein the nucleotide sequence has 85% to 100%, 88% to 100%, 90% to 100%, 95% to 100%, 80% to 95%, 85% to 95%, 85% to 90%, 90% to 95%, or 95% to 100% sequence identity to nucleotides 724 to 1404 of SEQ ID NO: 522.

[1424] In some embodiments, the CD80 polynucleotide (e.g., a RNA, e.g., a mRNA) comprises a nucleotide sequence (e.g., an ORF) encoding a CD80Fc fusion polypeptide, wherein the nucleotide sequence has 60% to 100%, 65% to 100%, 70% to 100%, 75% to 100%, 80% to 100%, 85% to 100%, 90% to 100%, 95% to 100%, 80% to 95%, 85% to 95%, 85% to 90%, 90% to 95%, or 95% to 100% sequence identity to SEQ ID NO: 522.

[1425] In some embodiments, the CD80 polynucleotide (e.g., a RNA, e.g., a mRNA) comprises a nucleotide sequence (e.g., an ORF) encoding an Fc polypeptide, wherein the nucleotide sequence has at least 89%, at least 90%, at least 91%, at least 92%, at least 93%, at least 94%, at least 95%, at least 96%, at least 97%, at least 98%, at least 99%, or 100% sequence identity to nucleotides 724 to 1404 of SEQ ID NO: 507.

[1426] In some embodiments, the CD80 polynucleotide (e.g., a RNA, e.g., a mRNA) comprises a nucleotide sequence (e.g., an ORF) encoding a CD80Fc fusion polypeptide, wherein the nucleotide sequence has at least 80%, at least 85%, at least 86%, at least 87%, at least 88%, at least 89%, at least 90%, at least 91%, at least 92%, at least 93%, at least 94%, at least 95%, at least 96%, at least 97%, at least 98%, at least 99%, or 100% sequence identity to SEQ ID NO: 507.

[1427] In some embodiments, the CD80 polynucleotide (e.g., a RNA, e.g., a mRNA) comprises a nucleotide sequence (e.g., an ORF) encoding an Fc polypeptide, wherein the nucleotide sequence has 89% to 100%, 90% to 100%, 89% to 95%, 89% to 90%, 90% to 95%, or 95% to 100% sequence identity to nucleotides 724 to 1404 of SEQ ID NO: 507.

[1428] In some embodiments, the CD80 polynucleotide (e.g., a RNA, e.g., a mRNA) comprises a nucleotide sequence (e.g., an ORF) encoding a CD80Fc fusion polypeptide, wherein the nucleotide sequence has 80% to 100%, 85% to 100%, 86% to 100%, 90% to 100%, 86% to 95%, 86% to 90%, 90% to 95%, or 95% to 100% sequence identity to SEQ ID NO: 507.

[1429] In some embodiments, the CD80 polynucleotide (e.g., a RNA, e.g., a mRNA) comprises a nucleotide sequence (e.g., an ORF) encoding an Fc polypeptide, wherein the nucleotide sequence has at least 90%, at least 91%, at least 92%, at least 93%, at least 94%, at least 95%, at least 96%, at least 97%, at least 98%, at least 99%, or 100% sequence identity to nucleotides 724 to 1404 of a sequence selected from the group consisting of SEQ ID NOs: 506, 508, 511, 516, and 518.

[1430] In some embodiments, the CD80 polynucleotide (e.g., a RNA, e.g., a mRNA) comprises a nucleotide sequence (e.g., an ORF) encoding a CD80Fc fusion polypeptide, wherein the nucleotide sequence has at least 80%, at least 85%, at least 86%, at least 87%, at least 88%, at least 89%, at least 90%, at least 91%, at least 92%, at least 93%, at least 94%, at least 95%, at least 96%, at least 97%, at least 98%, at least 99%, or 100% sequence identity to a sequence selected from the group consisting of SEQ ID NOs: 506, 508, 511, 516, and 518.

[1431] In some embodiments, the CD80 polynucleotide (e.g., a RNA, e.g., a mRNA) comprises a nucleotide sequence (e.g., an ORF) encoding an Fc polypeptide, wherein the nucleotide sequence has 90% to 100%, 90% to 95%, or 95% to 100% sequence identity to nucleotides 724 to 1404 of a sequence selected from the group consisting of SEQ ID NOs: 506, 508, 511, 516, and 518.

[1432] In some embodiments, the CD80 polynucleotide (e.g., a RNA, e.g., a mRNA) comprises a nucleotide sequence (e.g., an ORF) encoding a CD80Fc fusion polypeptide, wherein the nucleotide sequence has 80% to 100%, 85% to 100%, 86% to 100%, 90% to 100%, 86% to 95%, 86% to 90%, 90% to 95%, or 95% to 100% sequence identity to a sequence selected from the group consisting of SEQ ID NOs: 506, 508, 511, 516, and 518.

[1433] In some embodiments, the CD80 polynucleotide (e.g., a RNA, e.g., a mRNA) comprises a nucleotide sequence (e.g., an ORF) encoding an Fc polypeptide, wherein the nucleotide sequence has at least 91%, at least 92%, at least 93%, at least 94%, at least 95%, at least 96%, at least 97%, at least 98%, at least 99%, or 100% sequence identity to nucleotides 724 to 1404 of a sequence selected from the group consisting of SEQ ID NOs: 503, 504, 509, 510, 513, and 519.

[1434] In some embodiments, the CD80 polynucleotide (e.g., a RNA, e.g., a mRNA) comprises a nucleotide sequence (e.g., an ORF) encoding a CD80Fc fusion polypeptide, wherein the nucleotide sequence has at least 80%, at least 85%, at least 86%, at least 87%, at least 88%, at least 89%, at least 90%, at least 91%, at least 92%, at least 93%, at least 94%, at least 95%, at least 96%, at least 97%, at least 98%, at least 99%, or 100% sequence identity to a sequence selected from the group consisting of SEQ ID NOs: 503, 504, 509, 510, 513, and 519.

[1435] In some embodiments, the CD80 polynucleotide (e.g., a RNA, e.g., a mRNA) comprises a nucleotide sequence (e.g., an ORF) encoding an Fc polypeptide, wherein the nucleotide sequence has 91% to 100%, 91% to 95%, or 95% to 100% sequence identity to nucleotides 724 to 1404 of a sequence selected from the group consisting of SEQ ID NOs: 503, 504, 509, 510, 513, and 519.

[1436] In some embodiments, the CD80 polynucleotide (e.g., a RNA, e.g., a mRNA) comprises a nucleotide sequence (e.g., an ORF) encoding a CD80Fc fusion polypeptide, wherein the nucleotide sequence has 80% to 100%, 85% to 100%, 86% to 100%, 90% to 100%, 86% to 95%, 86% to 90%, 90% to 95%, or 95% to 100% sequence identity to a sequence selected from the group consisting of SEQ ID NOs: 503, 504, 509, 510, 513, and 519.

[1437] In some embodiments, the CD80 polynucleotide (e.g., a RNA, e.g., a mRNA) comprises a nucleotide sequence (e.g., an ORF) encoding an Fc polypeptide, wherein the nucleotide sequence has at least 92%, at least 93%, at least 94%, at least 95%, at least 96%, at least 97%, at least 98%, at least 99%, or 100% sequence identity to nucleotides 724 to 1404 of a sequence selected from the group consisting of SEQ ID NOs: 498, 500, 505, 514, 515, 517, 520, and 521.

[1438] In some embodiments, the CD80 polynucleotide (e.g., a RNA, e.g., a mRNA) comprises a nucleotide sequence (e.g., an ORF) encoding a CD80Fc fusion polypeptide, wherein the nucleotide sequence has at least 80%, at least 85%, at least 86%, at least 87%, at least 88%, at least 89%, at least 90%, at least 91%, at least 92%, at least 93%, at least 94%, at least 95%, at least 96%, at least 97%, at least 98%, at least 99%, or 100% sequence identity to a sequence selected from the group consisting of SEQ ID NOs: 498, 500, 505, 514, 515, 517, 520, and 521.

[1439] In some embodiments, the CD80 polynucleotide (e.g., a RNA, e.g., a mRNA) comprises a nucleotide sequence (e.g., an ORF) encoding an Fc polypeptide, wherein the nucleotide sequence has 92% to 100%, 92% to 95%, or 95% to 100% sequence identity to nucleotides 724 to 1404 of a sequence selected from the group consisting of SEQ ID NOs: 498, 500, 505, 514, 515, 517, 520, and 521.

[1440] In some embodiments, the CD80 polynucleotide (e.g., a RNA, e.g., a mRNA) comprises a nucleotide sequence (e.g., an ORF) encoding a CD80Fc fusion polypeptide, wherein the nucleotide sequence has 80% to 100%, 85% to 100%, 86% to 100%, 90% to 100%, 86% to 95%, 86% to 90%, 90% to 95%, or 95% to 100% sequence identity to a sequence selected from the group consisting of SEQ ID NOs: 498, 500, 505, 514, 515, 517, 520, and 521.

[1441] In some embodiments, the CD80 polynucleotide (e.g., a RNA, e.g., a mRNA) comprises a nucleotide sequence (e.g., an ORF) encoding an Fc polypeptide, wherein the nucleotide sequence has at least 93%, at least 94%, at least 95%, at least 96%, at least 97%, at least 98%, at least 99%, or 100% sequence identity to nucleotides 724 to 1404 of SEQ ID NO: 499 or 502.

[1442] In some embodiments, the CD80 polynucleotide (e.g., a RNA, e.g., a mRNA) comprises a nucleotide sequence (e.g., an ORF) encoding a CD80Fc fusion polypeptide, wherein the nucleotide sequence has at least 80%, at least 85%, at least 86%, at least 87%, at least 88%, at least 89%, at least 90%, at least 91%, at least 92%, at least 93%, at least 94%, at least 95%, at least 96%, at least 97%, at least 98%, at least 99%, or 100% sequence identity to SEQ ID NO: 499 or 502.

[1443] In some embodiments, the CD80 polynucleotide (e.g., a RNA, e.g., a mRNA) comprises a nucleotide sequence (e.g., an ORF) encoding an Fc polypeptide, wherein the nucleotide sequence has 93% to 100%, 93% to 95%, or 95% to 100% sequence identity to nucleotides 724 to 1404 of SEQ ID NO: 499 or 502.

[1444] In some embodiments, the CD80 polynucleotide (e.g., a RNA, e.g., a mRNA) comprises a nucleotide sequence (e.g., an ORF) encoding a CD80Fc fusion polypeptide, wherein the nucleotide sequence has 80% to 100%, 85% to 100%, 86% to 100%, 90% to 100%, 86% to 95%, 86% to 90%, 90% to 95%, or 95% to 100% sequence identity to SEQ ID NO: 499 or 502.

[1445] In some embodiments, the CD80 polynucleotide (e.g., a RNA, e.g., a mRNA) comprises a nucleotide sequence (e.g., an ORF) encoding an Fc polypeptide, wherein the nucleotide sequence has at least 94%, at least 95%, at least 96%, at least 97%, at least 98%, at least 99%, or 100% sequence identity to nucleotides 724 to 1404 of a sequence selected from the group consisting of SEQ ID NOs: 501, 505, and 522.

[1446] In some embodiments, the CD80 polynucleotide (e.g., a RNA, e.g., a mRNA) comprises a nucleotide sequence (e.g., an ORF) encoding a CD80Fc fusion polypeptide, wherein the nucleotide sequence has at least 80%, at least 85%, at least 86%, at least 87%, at least 88%, at least 89%, at least 90%, at least 91%, at least 92%, at least 93%, at least 94%, at least 95%, at least 96%, at least 97%, at least 98%, at least 99%, or 100% sequence identity to a sequence selected from the group consisting of SEQ ID NOs: 501, 505, and 522.

[1447] In some embodiments, the CD80 polynucleotide (e.g., a RNA, e.g., a mRNA) comprises a nucleotide sequence (e.g., an ORF) encoding an Fc polypeptide, wherein the nucleotide sequence has 94% to 100%, 94% to 95%, or 95% to 100% sequence identity to nucleotides 724 to 1404 of a sequence selected from the group consisting of SEQ ID NOs: 501, 505, and 522.

[1448] In some embodiments, the CD80 polynucleotide (e.g., a RNA, e.g., a mRNA) comprises a nucleotide sequence (e.g., an ORF) encoding a CD80Fc fusion polypeptide, wherein the nucleotide sequence has 80% to 100%, 85% to 100%, 86% to 100%, 90% to 100%, 86% to 95%, 86% to 90%, 90% to 95%, or 95% to 100% sequence identity to a sequence selected from the group consisting of SEQ ID NOs: 501, 505, and 522.

[1449] Modified Nucleotide Sequences Encoding CD80 Polypeptides: In some embodiments, the CD80 polynucleotide (e.g., a RNA, e.g., a mRNA) comprises a chemically modified nucleobase, e.g., 5-methoxyuracil. In some embodiments, the mRNA is a uracil-modified sequence comprising an ORF encoding a CD80 polypeptide or an Fc polypeptide, as disclosed herein, wherein the mRNA comprises a chemically modified nucleobase, e.g., 5-methoxyuracil.

[1450] In certain embodiments, when the 5-methoxyuracil base is connected to a ribose sugar, as it is in polynucleotides, the resulting modified nucleoside or nucleotide is referred to as 5-methoxyuridine. In some embodiments, at least about 25%, at least about 30%, at least about 40%, at least about 50%, at least about 60%, at least about 70%, at least about 80%, at least 90%, at least 95%, at least 99%, or about 100% of the uracil in the CD80 polynucleotide is 5-methoxyuracil. In one embodiment, at least 95% of the uracil in the CD80 polynucleotide is 5-methoxyuracil. In another embodiment, 100% of the uracil in the CD80 polynucleotide is 5-methoxyuracil.

[1451] In some embodiments, where uracil in the CD80 polynucleotide is at least 95% 5-methoxyuracil, overall uracil content can be adjusted such that an mRNA provides suitable protein expression levels while inducing little to no immune response.

[1452] In some embodiments, the uracil content of the CD80 ORF is between about 105% and about 145%, about 105% and about 140%, about 110% and about 140%, about 110% and about 145%, about 115% and about 135%, about 105% and about 135%, about 110% and about 135%, about 115% and about 145%, or about 115% and about 140% of the theoretical minimum uracil content in the corresponding wild-type ORF (% U_{TM}). In other embodiments, the uracil content of the CD80 ORF is between about 117% and about 134% or between 118% and 132% of the % U_{TM}. In some embodiments, the uracil content of the ORF encoding a CD80 polypeptide or an Fc polypeptide is about 115%, about 120%, about 125%, about 130%, about 135%, about 140%, about 145%, or about 150% of the % U_{TM}. In this context, the term “uracil” can refer to 5-methoxyuracil and/or naturally occurring uracil.

[1453] In some embodiments, the uracil content in the ORF of the mRNA encoding a CD80 polypeptide or an Fc polypeptide disclosed herein is less than about 50%, about 40%, about 30%, or about 20% of the total nucleobase content in the ORF. In some embodiments, the uracil content in the ORF is between about 15% and about 25% of the total nucleobase content in the ORF. In other embodiments, the uracil content in the ORF is between about 18% and about 21% of the total nucleobase content in the ORF. In one embodiment, the uracil content in the ORF of the mRNA encoding a CD80 polypeptide or an Fc polypeptide is less than about 21% of the total nucleobase content in the open reading frame. Also in this context, the term “uracil” can refer to 5-methoxyuracil and/or naturally occurring uracil.

[1454] In further embodiments, the ORF of the mRNA encoding a CD80 polypeptide or an Fc polypeptide having 5-methoxyuracil and adjusted uracil content has increased Cytosine (C), Guanine (G), or Guanine/Cytosine (G/C) content (absolute or relative). In some embodiments, the overall increase in C, G, or G/C content (absolute or relative) of the ORF is at least about 2%, at least about 3%, at least about 4%, at least about 5%, at least about 6%, at least about 7%, at least about 10%, at least about 15%, at least about 20%, at least about 40%, at least about 50%, at least about 60%, at least about 70%, at least about 80%, at least about 90%, at least about 95%, or at least about 100% relative to the G/C content (absolute or relative) of the wild-type ORF.

[1455] In some embodiments, the G, the C, or the G/C content in the ORF is less than about 100%, less than about 90%, less than about 85%, or less than about 80% of the theoretical maximum G, C, or G/C content of the corresponding wild type nucleotide sequence encoding the CD80 polypeptide or the Fc polypeptide (% G_{TMX}; % C_{TMX}, or % G/C_{TMX}). In other embodiments, the G, the C, or the G/C content in the ORF is between about 70% and about 80%, between about 71% and about 79%, between about 71% and about 78%, between about 71% and about 77%, or between about 90% and about 95% of the % G_{TMX}, % C_{TMX}, or % G/C_{TMX}.

[1456] In some embodiments, the increases in G and/or C content (absolute or relative) described herein can be conducted by replacing synonymous codons with low G, C, or G/C content with synonymous codons having higher G, C, or G/C content. In other embodiments, the increase in G and/or C content (absolute or relative) is conducted by replacing a codon ending with U with a synonymous codon ending with G or C.

[1457] In further embodiments, the ORF of the mRNA encoding a CD80 polypeptide or an Fc polypeptide of the disclosure comprises 5-methoxyuracil and has an adjusted uracil content containing less uracil pairs (UU) and/or uracil triplets (UUU) and/or uracil quadruplets (UUUU) than the corresponding wild-type nucleotide sequence encoding the CD80 polypeptide or the Fc polypeptide. In some embodiments, the ORF of the mRNA encoding a CD80 polypeptide or an Fc polypeptide of the disclosure contains no uracil pairs and/or uracil triplets and/or uracil quadruplets.

[1458] In some embodiments, uracil pairs and/or uracil triplets and/or uracil quadruplets are reduced below a certain threshold, e.g., no more than 1, 2, 3, 4, 5, 6, 7, 8, 9, 10, 11, 12, 13, 14, 15, 16, 17, 18, 19, or 20 occurrences in the ORF of the mRNA encoding the CD80 polypeptide or an Fc polypeptide. In a particular embodiment, the ORF of the mRNA encoding the CD80 polypeptide or an Fc polypeptide of the disclosure contains less than 20, 19, 18, 17, 16, 15, 14, 13, 12, 11, 10, 9, 8, 7, 6, 5, 4, 3, 2, or 1 non-phenylalanine uracil pairs and/or triplets. In another embodiment, the ORF of the mRNA encoding the CD80 polypeptide or the Fc polypeptide contains no non-phenylalanine uracil pairs and/or triplets.

[1459] In further embodiments, the ORF of the mRNA encoding a CD80 polypeptide or an Fc polypeptide of the disclosure comprises 5-methoxyuracil and has an adjusted uracil content containing less uracil-rich clusters than the corresponding wild-type nucleotide sequence encoding the CD80 polypeptide or an Fc polypeptide. In some embodiments, the ORF of the mRNA encoding the CD80 polypeptide or the Fc polypeptide contains uracil-rich clusters that are shorter in length than corresponding uracil-rich clusters in the corresponding wild-type nucleotide sequence encoding the CD80 polypeptide or the Fc polypeptide.

[1460] In further embodiments, alternative lower frequency codons are employed in the sequence optimization of CD80 polynucleotides of the present disclosure. At least about 5%, at least about 10%, at least about 15%, at least about 20%, at least about 25%, at least about 30%, at least about 35%, at least about 40%, at least about 45%, at least about 50%, at least about 55%, at least about 60%, at least about 65%, at least about 70%, at least about 75%, at least about 80%, at least about 85%, at least about 90%, at least about 95%, at least about 99%, or 100% of the codons in the CD80 polypeptide-encoding or Fc polypeptide-encoding ORF of the 5-methoxyuracil-comprising mRNA are substituted with alternative codons, each alternative codon having a codon frequency lower than the codon frequency of the substituted codon in the synonymous codon set.

[1461] The ORF of the mRNA encoding the CD80 polypeptide or the Fc polypeptide also has adjusted uracil content, as described above. In some embodiments, at least one codon in the ORF of the mRNA encoding the CD80 polypeptide or the Fc polypeptide is substituted with an alternative codon having a codon frequency lower than the codon frequency of the substituted codon in the synonymous codon set.

[1462] In some embodiments, the adjusted uracil content CD80 polypeptide-encoding ORF of the 5-methoxyuracil-comprising mRNA exhibits expression levels of CD80, when administered to a mammalian cell, that are higher than expression levels of CD80 from the corresponding wild-type mRNA. In other embodiments, the expression levels of CD80, when administered to a mammalian cell, are increased relative to a corresponding mRNA containing at least 95% 5-methoxyuracil and having a uracil content of about 160%, about 170%, about 180%, about 190%, or about 200% of the theoretical minimum.

[1463] In yet other embodiments, the expression levels of CD80, when administered to a mammalian cell are increased relative to a corresponding mRNA, wherein at least about 50%, at least about 60%, at least about 70%, at least about 80%, at least about 90%, or about 100% of uracils are 1-methylpseudouracil or pseudouracils. In some embodiments, the mammalian cell is a mouse cell, a rat cell, or a rabbit cell. In other embodiments, the mammalian cell is a monkey cell or a human cell. In some embodiments, the human cell is a HeLa cell, a BJ fibroblast cell, or a peripheral blood mononuclear cell (PBMC). In some embodiments, the CD80 is expressed when the mRNA is administered to a mammalian cell in vivo. In some embodiments, the mRNA is administered to mice, rabbits, rats, monkeys, or humans. In one embodiment, mice are null mice. In some embodiments, the mRNA is administered to mice in an amount of about 0.01 mg/kg, about 0.05 mg/kg, about 0.1 mg/kg, or about 0.15 mg/kg. In some embodiments, the mRNA is administered intravenously or intramuscularly. In other embodiments, the CD80 polypeptide is expressed when the mRNA is administered to a mammalian cell in vitro. In some embodiments, the expression is increased by at least about 2-fold, at least about 5-fold, at least about 10-fold, at least about 50-fold, at least about 500-fold, at least about 1500-fold, or at least about 3000-fold. In other embodiments, the expression is increased by at least about 10%, about 20%, about 30%, about 40%, about 50%, 60%, about 70%, about 80%, about 90%, or about 100%.

[1464] In some embodiments, the adjusted uracil content CD80 polypeptide-encoding ORF of the 5-methoxyuracil-comprising mRNA exhibits increased stability. In some embodiments, the mRNA exhibits increased stability in a cell relative to the stability of a corresponding wild-type mRNA under the same conditions. In some embodiments, the mRNA exhibits increased stability including resistance to nucleases, thermal stability, and/or increased stabilization of secondary structure. In some embodiments, increased stability exhibited by the mRNA is measured by determining the half-life of the mRNA (e.g., in a plasma, cell, or tissue sample) and/or determining the area under the curve (AUC) of the protein expression by the mRNA over time (e.g., in vitro or in vivo). An mRNA is identified as having increased stability if the half-life and/or the AUC is greater than the half-life and/or the AUC of a corresponding wild-type mRNA under the same conditions.

[1465] In some embodiments, the CD80 mRNA of the present disclosure induces a detectably lower immune response (e.g., innate or acquired) relative to the immune response induced by a corresponding wild-type mRNA under the same conditions. In other embodiments, the CD80 mRNA of the present disclosure induces a detectably lower immune response (e.g., innate or acquired) relative to the immune response induced by an mRNA that encodes for a CD80 polypeptide, but does not comprise 5-methoxyuracil under the same conditions, or relative to the immune response induced by an mRNA that encodes for a CD80 polypeptide, and that comprises 5-methoxyuracil but that does not have adjusted uracil content under the same conditions. The innate immune response can be manifested by increased expression of pro-inflammatory cytokines, activation of intracellular PRRs (RIG-I, MDA5, etc), cell death, and/or termination or reduction in protein translation. In some embodiments, a reduction in the innate immune response can be measured by expression or activity level of Type 1 interferons (e.g., IFN-α, IFN-β, IFN-κ, IFN-δ, IFN-ε, IFN-τ, IFN-ω, and IFN-ζ) or the expression of interferon-regulated genes such as the toll-like receptors (e.g., TLR7 and TLR8), and/or by decreased cell death following one or more administrations of the mRNA of the disclosure into a cell.

[1466] In some embodiments, the expression of Type-1 interferons by a mammalian cell in response to the mRNA of the present disclosure is reduced by at least 10%, 20%, 30%, 40%, 50%, 60%, 70%, 80%, 90%, 95%, 99%, 99.9%, or greater than 99.9% relative to a corresponding wild-type mRNA, to an mRNA that encodes a CD80 polypeptide, but does not comprise 5-methoxyuracil, or to an mRNA that encodes a CD80 polypeptide, and that comprises 5-methoxyuracil but that does not have adjusted uracil content. In some embodiments, the interferon is IFN-β. In some embodiments, cell death frequency caused by administration of mRNA of the present disclosure to a mammalian cell is 10%, 25%, 50%, 75%, 85%, 90%, 95%, or over 95% less than the cell death frequency observed with a corresponding wild-type mRNA, an mRNA that encodes for a CD80 polypeptide, but does not comprise 5-methoxyuracil, or an mRNA that encodes for a CD80 polypeptide, and that comprises 5-methoxyuracil but that does not have adjusted uracil content. In some embodiments, the mammalian cell is a BJ fibroblast cell. In other embodiments, the mammalian cell is a splenocyte. In some embodiments, the mammalian cell is that of a mouse or a rat. In other embodiments, the mammalian cell is that of a human. In one embodiment, the mRNA of the present disclosure does not substantially induce an innate immune response of a mammalian cell into which the mRNA is introduced.

[1467] In some embodiments, the Cd80 polynucleotide is an mRNA that comprises an ORF that encodes a CD80 polypeptide or an Fc polypeptide, as disclosed herein, wherein uracil in the mRNA is at least about 95% 5-methoxyuracil, wherein the uracil content of the ORF is between about 115% and about 135% of the theoretical minimum uracil content in the corresponding wild-type ORF, and wherein the uracil content in the ORF encoding the CD80 polypeptide or the Fc polypeptide is less than about 21% of the total nucleobase content in the ORF. In some embodiments, the ORF that encodes the CD80 polypeptide or the Fc polypeptide is further modified to increase G/C content of the ORF (absolute or relative) by at least about 40%, as compared to the corresponding wild-type ORF.

[1468] In yet other embodiments, the ORF encoding the CD80 polypeptide or the Fc polypeptide contains less than 20 non-phenylalanine uracil pairs and/or triplets. In some embodiments, at least one codon in the ORF of the mRNA encoding the CD80 polypeptide or the Fc polypeptide is further substituted with an alternative codon having a codon frequency lower than the codon frequency of the substituted codon in the synonymous codon set. In some embodiments, the expression of the CD80 polypeptide or the Fc polypeptide encoded by an mRNA comprising an ORF wherein uracil in the mRNA is at least about 95% 5-methoxyuracil, and wherein the uracil content of the ORF is between about 115% and about 135% of the theoretical minimum uracil content in the corresponding wild-type ORF, is increased by at least about 10-fold when compared to expression of the CD80 polypeptide or the Fc polypeptide from the corresponding wild-type mRNA. In some embodiments, the mRNA comprises an open ORF wherein uracil in the mRNA is at least about 95% 5-methoxyuracil, and wherein the uracil content of the ORF is between about 115% and about 135% of the theoretical minimum uracil content in the corresponding wild-type ORF, and wherein the mRNA does not substantially induce an innate immune response of a mammalian cell into which the mRNA is introduced.

[1469] Polynucleotide Comprising an mRNA Encoding a CD80 Polypeptide: In certain embodiments, a CD80 polynucleotide of the present disclosure, for example a polynucleotide comprising an mRNA nucleotide sequence encoding a CD80 polypeptide, e.g., a CD80 polypeptide comprising the EC domain of CD80 or a functional portion thereof, comprises from 5′ to 3′ end:
[1470] (i) a 5′ UTR, such as the sequences provided below, comprising a 5′ cap provided below;
[1471] (ii) an open reading frame encoding a CD80 polypeptide (e.g., a sequence optimized nucleic acid sequence encoding CD80 disclosed herein);
[1472] (iii) at least one stop codon;
[1473] (iv) a 3′ UTR, such as the sequences provided below; and
[1474] (v) a poly-A tail provided below.

[1475] In certain embodiments, a CD80 polynucleotide of the present disclosure, for example a polynucleotide comprising an mRNA nucleotide sequence encoding an Fc region polypeptide or a functional portion thereof, comprises from 5′ to 3′ end:
[1476] (i) a 5′ UTR, such as the sequences provided below, comprising a 5′ cap provided below;
[1477] (ii) an open reading frame encoding an Fc region polypeptide or a functional portion thereof;
[1478] (iii) at least one stop codon;
[1479] (iv) a 3′ UTR, such as the sequences provided below; and
[1480] (v) a poly-A tail provided below.

[1481] In certain embodiments, a CD80 polynucleotide of the present disclosure, for example a polynucleotide comprising an mRNA nucleotide sequence encoding a CD80 polypeptide, e.g., a CD80 polypeptide comprising the EC domain of CD80 or a functional portion thereof, comprises from 5′ to 3′ end:
[1482] (i) a 5′ UTR, such as the sequences provided below, comprising a 5′ cap provided below;
[1483] (ii) an open reading frame encoding a CD80 polypeptide (e.g., a sequence optimized nucleic acid sequence encoding CD80 disclosed herein) fused to an Fc region polypeptide or a functional portion thereof;
[1484] (iii) at least one stop codon;
[1485] (iv) a 3′ UTR, such as the sequences provided below; and
[1486] (v) a poly-A tail provided below.

[1487] In some embodiments, the CD80 polynucleotide further comprises a miRNA binding site, e.g., a miRNA binding site that binds to miRNA-122. In some embodiments, the 3′UTR comprises the miRNA binding site.

[1488] In some embodiments, a CD80 polynucleotide of the present disclosure comprises a nucleotide sequence encoding a polypeptide sequence at least 70%, at least 80%, at least 81%, at least 82%, at least 83%, at least 84%, at least 85%, at least 86%, at least 87%, at least 88%, at least 89%, at least 90%, at least 91%, at least 92%, at least 93%, at least 94%, at least 95%, at least 96%, at least 97%, at least 98%, at least 99%, or 100% identical to the protein sequence of CD80 or a functional fragment thereof, e.g., the EC domain of CD80.

[1489] CD80 Compositions and Formulations for Use: Certain aspects of the present disclosure are directed to compositions or formulations comprising any of the CD80 polynucleotides disclosed above. In some embodiments, the composition or formulation comprises:
[1490] (i) a CD80 polynucleotide (e.g., a RNA, e.g., a mRNA) comprising a sequence-optimized nucleotide sequence (e.g., an ORF) encoding a CD80 polypeptide or an Fc polypeptide (e.g., the wild-type sequence, functional fragment, or variant thereof), wherein the CD80 polynucleotide comprises at least one chemically modified nucleobase, e.g., 5-methoxyuracil (e.g., wherein at least about 25%, at least about 30%, at least about 40%, at least about 50%, at least about 60%, at least about 70%, at least about 80%, at least about 90%, at least about 95%, at least about 99%, or 100% of the uracils are 5-methoxyuracils), and wherein the CD80 polynucleotide further comprises a miRNA binding site, e.g., a miRNA binding site that binds to miR-122 (e.g., a miR-122-3p or miR-122-5p binding site); and
[1491] (ii) a delivery agent comprising a compound having Formula (I), e.g., any of Compounds 1-147 (e.g., Compound 18, 25, 26 or 48).

[1492] In some embodiments, the uracil or thymine content of the ORF relative to the theoretical minimum uracil or thymine content of a nucleotide sequence encoding the CD80 polypeptide or the Fc polypeptide (% U_{TM} or % T_{TM}), is between about 100% and about 150%.

[1493] In some embodiments, the CD80 polynucleotides, compositions or formulations above are used to treat a cancer.

### C. Toll Like Receptor 4 (Tlr4)

[1494] In some embodiments, the combination therapies disclosed herein comprise one or more TLR4 polynucleotides (e.g., mRNAs), i.e., polynucleotides comprising one or more ORFs encoding a TLR4 polypeptide (e.g., caTLR4, i.e., a constitutively active TLR4 polypeptide).

[1495] Toll-like Receptors (TLRs) are a family of receptors that recognize ligands having pathogen-associated or endogenous damage-associated molecular patterns. See, e.g., Mehmeti, M., et al., Breast Cancer Res. 17: 130 (2015), doi:10.1186/s13058-015-0640-x; Oblak, A. and Jerala, R., Clin. Dev. Immunol. 2011, doi: 10.1155/2011/609579; and Vaure, C. and Liu, Y., Front. Immunol. 5: 1-15 (2014). TLRs are evolutionarily conserved and have an extracellular leucine-rich repeat domain associated with recognition of ligand, a transmembrane domain, and an intracellular toll/interleukin-1 receptor-like domain associated with signal transduction. See Vaure, C. and Liu, Y.

[1496] TLR4 was the first TLR discovered in humans and has been shown to recognize bacterial lipopolysaccharide (LPS) and other bacterial and viral ligands associated with microbial infections as well as endogenous ligands associated with tissue damage. See Vaure, C. and Liu, Y. TLR4 expressing cells are predominantly of myeloid origin, with TLR4 forming a complex on the cell surface with other proteins required for ligand recognition. Id. Binding of ligands induces TLR4 homodimerization through TIR domain interactions and activates intracellular signaling. Id. TLR4 activation by LPS, for example, leads to synthesis of pro-inflammatory cytokines and chemokines as well as dendritic cell maturation and antigen presentation. See Oblak, A. and Jerala, R. TLR4 also stimulates antibody class switching, affinity maturation, and formation of memory cells associated with development of an adaptive immune response. Id.

[1497] The innate and adaptive immune responses associated with TLR4 are not only required for natural defenses against microbial infections but are also implicated in control of malignant neoplasms. See Oblak, A. and Jerala, R., and Fang et al., Cell Mol. Immunol. 11: 150-159 (2014). For example, dendritic cells stimulated by TLR4 can in turn stimulate T-cell responses such as activation of CD8+ cytotoxic T lymphocytes and CD4⁺ Th1 immunity, which are essential to anti-tumor immune responses. See Fang et al. However, pro-inflammatory responses associated with TLR4 activation have also been associated with cancer development and progression. See Oblak, A. and Jerala, R., and Mehmeti, M., et al. Thus, therapeutic interventions based on TLR4 activation has been challenging, and there is a need in the art for improved TRL4 therapies and therapeutics to treat cancer.

[1498] Toll like receptor 4 (TLR4), also known as CD284, plays a role in pathogen recognition and activation of the innate immune system. Ligands for TLR4 include various proteins and polysaccharides expressed by bacteria (e.g., lipopolysaccharide (LPS), a component of many Gram-negative and some Gram-positive bacteria) and viruses, as well as a variety of endogenous proteins such as low-density lipoprotein, beta-defensins, and heat shock protein. Ligand binding induces TLR4 homodimerization through TIR domain interactions and activates intracellular signaling. TLR4 also stimulates antibody class switching, affinity maturation, and formation of memory cells associated with development of an adaptive immune response.

[1499] The structure of the 95 kDa TLR4 comprises an extracellular domain (608 residues), a single transmembrane domain, and an intracellular domain (187 residues). There are at least three transcript variants for TLR4, transcript variants 1, 3, and 4. The coding sequence (CDS) for wild type TLR4 canonical mRNA sequence, variant 1, is described at the NCBI Reference Sequence database (RefSeq) under accession number NM_138554.4 (“Homo sapiens toll like receptor 4 (TLR4), transcript variant 1, mRNA”). The wild type TLR4 canonical protein sequence, isoform A, is described at the RefSeq database under accession number NP_612564.1 (“toll-like receptor 4 isoform A precursor [Homo sapiens]”). The TLR4 transcript variant 3 (NM_003266.3) comprises an additional internal exon, as compared to isoform 1, which results in translation initiation from a downstream AUG and a polypeptide (isoform C) that lacks the 40 N-terminal amino acids of isoform A. The TLR4 transcript variant 4 (NM_138557.2) lacks an internal exon present in variant 1. Like variant 3, initiation of translation of variant 4 occurs at a downstream AUG, as compared to variant 1, resulting in a polypeptide (isoform D) that lacks the 200 N-terminal amino acids of isoform A. It is noted that the specific nucleic acid sequences encoding the reference protein sequence in the Ref Seq sequences are the coding sequence (CDS) as indicated in the respective RefSeq database entry.

[1500] In certain embodiments, the combination therapies disclosed herein provide a TLR4 polypeptide or a fusion protein thereof. In some embodiments, the TLR4 polypeptide is a constitutively active (ca) TLR4 variant. In some embodiments, the caTLR4 polypeptide is a variant, a peptide or a polypeptide containing a substitution, and insertion and/or an addition, a deletion and/or a covalent modification with respect to the corresponding wild-type TLR4 sequence.

[1501] As used herein, the term “caTLR4” refers to any variant of TLR4 which is constitutively active, including any such variants known in the art, e.g., the TLR4 D229G and T399I SNPs (see Hold et al., PLoS ONE 9(11): el 11460 (2014)) and the variants disclosed by, e.g., Panter and Jerala, J. Biol. Chem. 286(26):23334-44 (2011); Pen et al., J. Immunol. 191(4):1976-83 (2013); Li et al, Oncogene 33:369-77 (2014); and Pato et al., Clin. Exp. Immunol. 182(2):220-29 (2015). In some embodiments, the caTLR4 is a truncated variant of wild type TLR4 that comprises the cytoplasmic (intracellular) (CP) domain, the transmembrane (TM) domain, and a portion of the extracellular (EC) domain of wild-type TLR4, wherein the caTLR4 does not comprise the full EC domain of wild type TLR4.

[1502] In some embodiments, the caTLR4 polypeptide comprises the CP domain and the TM domain, but does not comprise one or more leucine-rich repeat (LRR) domain, which include LRR1, LRR2, LRR3, LRR4, LRR5, LRR6, LRR7, LRR8, LRR9, LRR10, LRR1, LRR12, LRR13, LRR14, LRR15, LRR16, LRR17, or LRR18. In one embodiment, the caTLR4 contains the CP domain and the TM domain, but does not comprise any LRR domains. In certain embodiments, the caTLR4 polypeptide comprises amino acids 618-839 of wild type TLR4 isoform 1 (SEQ ID NO: 523). In one particular embodiment, the caTLR4 polypeptide comprises the amino acid sequence of SEQ ID NO: 525. See TABLE 6. In certain embodiments, the caTLR4 comprises or consists or consists essentially of the CP domain, the TM domain, and an EC fragment.

TABLE 6

| SEQ | | | |
|---|---|---|---|
| ID NO | Description | Sequence | Comments |
| 523 | TLR4, Toll-like | MMSASRLAGTLIPAMAFLSCVRPESWEPCVEVVP | See Toll-like |
| | receptor 4, isoform | NITYQCMELNFYKIPDNLPFSTKNLDLSFNPLRH | receptor 4, |
| | 1 (wtTLR4). | LGSYSFFSFPELQVLDLSRCEIQTIEDGAYQSLS | Uniprot Acc. |
| | Isoform 2 of wt | HLSTLILTGNPIQSLALGAFSGLSSLQKLVAVET | No. 000206. |
| | TLR4 is missing | NLASLENFPIGHLKTLKELNVAHNLIQSFKLPEY | This is the |
| | amino acids 1-40 | FSNLTNLEHLDLSSNKIQSIYCTDLRVLHQMPLL | isoform 1 |
| | of SEQ ID NO: 1, | NLSLDLSLNPMNFIQPGAFKEIRLHKLTLRNNFD | sequence. |
| | and Isoform 3 of | SLNVMKTCIQGLAGLEVHRLVLGEFRNEGNLEKF | This isoform |
| | wt TLR4 is | DKSALEGLCNLTIEEFRLAYLDYYLDDIIDLFNC | has been |
| | missing amino | LTNVSSFSLVSVTIERVKDFSYNFGWQHLELVNC | chosen as the |
| | acids 1-200 of | KFGQFPTLKLKSLKRLTFTSNKGGNAFSEVDLPS | 'canonical' |
| | SEQ ID NO: 1. | LEFLDLSRNGLSFKGCCSQSDFGTTSLKYLDLSF | sequence. All |
| | Signal peptide is | NGVITMSSNFLGLEQLEHLDFQHSNLKQMSEFSV | positional |
| | underlined | FLSLRNLIYLDISHTHTRVAFNGIFNGLSSLEVL | information |
| | (positions 1-23) | KMAGNSFQENFLPDIFTELRNLTFLDLSQCQLEQ | in this entry |
| | | LSPTAFNSLSSLQVLNMSHNNFFSLDTFPYKCLN | refers to it. |
| | | SLQVLDYSLNHIMTSKKQELQHFPSSLAFLNLTQ | |
| | | NDFACTCEHQSFLQWIKDQRQLLVEVERMECATP | |
| | | SDKQGMPVLSLNITCQMNKTIIGVSVLSVLVVSV | |
| | | VAVLVYKFYFHLMLLAGCIKYGRGENIYDAFVIY | |
| | | SSQDEDWVRNELVKNLEEGVPPFQLCLHYRDFIP | |
| | | GVAIAANIIHEGFHKSRKVIVVVSQHFIQSRWCI | |
| | | FEYEIAQTWQFLSSRAGIIFIVLQKVEKTLLRQQ | |
| | | VELYRLLSRNTYLEWEDSVLGRHIFWRRLRKALL | |
| | | DGKSWNPEGTVGTGCNWQEATSI | |
| 524 | Nucleotide | ATGATGTCTGCCTCGCGCCTGGCTGGGACTCTGA | |
| | TLR4, isoform 1. | TCCCAGCCATGGCCTTCCTCTCCTGCGTGAGACC | |
| | Underlined | AGAAAGCTGGGAGCCCTGCGTGGAGGTGGTTCCT | |
| | nucleobases | AATATTACTTATCAATGCATGGAGCTGAATTTCT | |
| | indicate region | ACAAAATCCCCGACAACCTCCCCTTCTCAACCAA | |
| | encoding the | GAACCTGGACCTGAGCTTTAATCCCCTGAGGCAT | |
| | signal peptide (1- | TTAGGCAGCTATAGCTTCTTCAGTTTCCCAGAAC | |
| | 69). | TGCAGGTGCTGGATTTATCCAGGTGTGAAATCCA | |
| | sequence of wt | GACAATTGAAGATGGGGCATATCAGAGCCTAAGC | |
| | | CACCTCTCTACCTTAATATTGACAGGAAACCCCA | |
| | | TCCAGAGTTTAGCCCTGGGAGCCTTTTCTGGACT | |
| | | ATCAAGTTTACAGAAGCTGGTGGCTGTGGAGACA | |
| | | AATCTAGCATCTCTAGAGAACTTCCCCATTGGAC | |
| | | ATCTCAAAACTTTGAAAGAACTTAATGTGGCTCA | |
| | | CAATCTTATCCAATCTTTCAAATTACCTGAGTAT | |
| | | TTTTCTAATCTGACCAATCTAGAGCACTTGGACC | |
| | | TTTCCAGCAACAAGATTCAAAGTATTTATTGCAC | |
| | | AGACTTGCGGGTTCTACATCAAATGCCCCTACTC | |
| | | AATCTCTCTTTAGACCTGTCCCTGAACCCTATGA | |
| | | ACTTTATCCAACCAGGTGCATTTAAAGAAATTAG | |
| | | GCTTCATAAGCTGACTTTAAGAAATAATTTTGAT | |
| | | AGTTTAAATGTAATGAAAACTTGTATTCAAGGTC | |
| | | TGGCTGGTTTAGAAGTCCATCGTTTGGTTCTGGG | |
| | | AGAATTTAGAAATGAAGGAAACTTGGAAAAGTTT | |
| | | GACAAATCTGCTCTAGAGGGCCTGTGCAATTTGA | |
| | | CCATTGAAGAATTCCGATTAGCATACTTAGACTA | |
| | | CTACCTCGATGATATTATTGACTTATTTAATTGT | |
| | | TTGACAAATGTTTCTTCATTTTCCCTGGTGAGTG | |
| | | TGACTATTGAAAGGGTAAAAGACTTTTCTTATAA | |
| | | TTTCGGATGGCAACATTTAGAATTAGTTAACTGT | |
| | | AAATTTGGACAGTTTCCCACATTGAAACTCAAAT | |
| | | CTCTCAAAAGGCTTACTTTCACTTCCAACAAAGG | |
| | | TGGGAATGCTTTTTCAGAAGTTGATCTACCAAGC | |
| | | CTTGAGTTTCTAGATCTCAGTAGAAATGGCTTGA | |
| | | GTTTCAAAGGTTGCTGTTCTCAAAGTGATTTTGG | |
| | | GACAACCAGCCTAAAGTATTTAGATCTGAGCTTC | |
| | | AATGGTGTTATTACCATGAGTTCAAACTTCTTGG | |
| | | GCTTAGAACAACTAGAACATCTGGATTTCCAGCA | |
| | | TTCCAATTTGAAACAAATGAGTGAGTTTTCAGTA | |
| | | TTCCTATCACTCAGAAACCTCATTTACCTTGACA | |
| | | TTTCTCATACTCACACCAGAGTTGCTTTCAATGG | |
| | | CATCTTCAATGGCTTGTCCAGTCTCGAAGTCTTG | |
| | | AAAATGGCTGGCAATTCTTTCCAGGAAAACTTCC | |
| | | TTCCAGATATCTTCACAGAGCTGAGAAACTTGAC | |
| | | CTTCCTGGACCTCTCTCAGTGTCAACTGGAGCAG | |
| | | TTGTCTCCAACAGCATTTAACTCACTCTCCAGTC | |
| | | TTCAGGTACTAAATATGAGCCACAACAACTTCTT | |
| | | TTCATTGGATACGTTTCCTTATAAGTGTCTGAAC | |
| | | TCCCTCCAGGTTCTTGATTACAGTCTCAATCACA | |
| | | TAATGACTTCCAAAAAACAGGAACTACAGCATTT | |
| | | TCCAAGTAGTCTAGCTTTCTTAAATCTTACTCAG | |
| | | AATGACTTTGCTTGTACTTGTGAACACCAGAGTT | |
| | | TCCTGCAATGGATCAAGGACCAGAGGCAGCTCTT | |
| | | GGTGGAAGTTGAACGAATGGAATGTGCAACACCT | |
| | | TCAGATAAGCAGGGCATGCCTGTGCTGAGTTTGA | |
| | | ATATCACCTGTCAGATGAATAAGACCATCATTGG | |
| | | TGTGTCGGTCCTCAGTGTGCTTGTAGTATCTGTT | |
| | | GTAGCAGTTCTGGTCTATAAGTTCTATTTTCACC | |
| | | TGATGCTTCTTGCTGGCTGCATAAAGTATGGTAG | |
| | | AGGTGAAAACATCTATGATGCCTTTGTTATCTAC | |
| | | TCAAGCCAGGATGAGGACTGGGTAAGGAATGAGC | |
| | | TAGTAAAGAATTTAGAAGAAGGGGTGCCTCCATT | |
| | | TCAGCTCTGCCTTCACTACAGAGACTTTATTCCC | |
| | | GGTGTGGCCATTGCTGCCAACATCATCCATGAAG | |
| | | GTTTCCATAAAAGCCGAAAGGTGATTGTTGTGGT | |
| | | GTCCCAGCACTTCATCCAGAGCCGCTGGTGTATC | |
| | | TTTGAATATGAGATTGCTCAGACCTGGCAGTTTC | |
| | | TGAGCAGTCGTGCTGGTATCATCTTCATTGTCCT | |
| | | GCAGAAGGTGGAGAAGACCCTGCTCAGGCAGCAG | |
| | | GTGGAGCTGTACCGCCTTCTCAGCAGGAACACTT | |
| | | ACCTGGAGTGGGAGGACAGTGTCCTGGGGCGGCA | |
| | | CATCTTCTGGAGACGACTCAGAAAAGCCCTGCTG | |
| | | GATGGTAAATCATGGAATCCAGAAGGAACAGTGG | |
| | | GTACAGGATGCAATTGGCAGGAAGCAACATCTAT | |
| | | CTGA | |
| 525 | Constitutively | MAAPGSARRPLLLLLLLLLLGLMHCASAAMPVLS | |
| | active TLR4 | LNITCQMNKTIIGVSVLSVLVVSVVAVLVYKFYF | |
| | (caTLR4) | HLMLLAGCIKYGRGENIYDAFVIYSSQDEDWVRN | |
| | construct, protein | ELVKNLEEGVPPFQLCLHYRDFIPGVAIAANIIH | |
| | sequence. The | EGFHKSRKVIVVVSQHFIQSRWCIFEYEIAQTWQ | |
| | signal peptide | FLSSRAGIIFIVLQKVEKTLLRQQVELYRLLSRN | |
| | (lysosome- | TYLEWEDSVLGRHIFWRRLRKALLDGKSWNPEGT | |
| | associated | VGTGCNWQEATSI | |
| | membrane | | |
| | glycoprotein 1 | | |
| | (LAMP1) signal | | |
| | peptide) is | | |
| | italicized; the | | |
| | extracellular | | |
| | domain is | | |
| | underlined; the | | |
| | transmembrane | | |
| | domain is bolded; | | |
| | and the | | |
| | cytoplasmic | | |
| | domain has dotted | | |
| | underline. | | |
| 526 | Constitutively | ATGGCGGCCCCCGGCAGCGCCCGGCGACCCCTGC | |
| | active TLR4 | TGCTGCTACTGCTGTTGCTGCTGCTCGGCCTCAT | |
| | (caTLR4) | GCATTGTGCGTCAGCAGCAATGCCTGTGCTGAGT | |
| | construct, nucleic | TTGAATATCACCTGTCAGATGAATAAGACCATCA | |
| | acid sequence. The | TTGGTGTGTCGGTCCTCAGTGTGCTTGTAGTATC | |
| | same notation | [chemical structure] | |
| | using in the | [chemical structure] | |
| | protein sequence is | [chemical structure] | |
| | used to denote the | [chemical structure] | |
| | different | [chemical structure] | |
| | component of the | [chemical structure] | |
| | caTRL4 construct. | [chemical structure] | |
| | | [chemical structure] | |
| | | [chemical structure] | |
| | | [chemical structure] | |
| | | [chemical structure] | |
| | | [chemical structure] | |
| | | [chemical structure] | |
| | | [chemical structure] | |
| | | [chemical structure] | |
| | | [chemical structure] | |
| | | [chemical structure] | |

[1503] In some embodiments, the caTLR4 polypeptide comprises one or more amino acids of the extracellular (EC) domain of a full-length TLR4 polypeptide. In certain embodiments, the one or more amino acids of the EC domain comprises, consists of, or consists essentially of M, MP, MPV, MPV, MPVL (SEQ ID NO: 527), MPVLS (SEQ ID NO: 528), MPVLSL (SEQ ID NO: 529), MPVLSLN (SEQ ID NO: 530), MPVLSLN (SEQ ID NO: 531), MPVLSLNI (SEQ ID NO: 532), MPVLSLNIT (SEQ ID NO: 533), MPVLSLNITC (SEQ ID NO: 534), MPVLSLNITCQ (SEQ ID NO: 535), MPVLSLNITCQM (SEQ ID NO: 536), MPVLSLNITCQMN (SEQ ID NO: 537), or MPVLSLNITCQMNK (SEQ ID NO: 538).

[1504] In another embodiment, the caTLR4 polypeptide comprises an EC fragment consisting or consisting essentially of one, two, three, four, five, six, seven, eight, nine, ten, 11, 12, 13, 14, 15, 16, 17, 18, 19, 20, 21, 22, 23, 24, 25, 26, 27, 28, 29, or 30 amino acids of an EC domain of a full-length TLR4 polypeptide. In certain embodiments, the EC fragment is not an LRR region.

[1505] In some embodiments, sequence tags or amino acids, can be added to the TLR4 sequences encoded by the TLR4 polynucleotides disclosed herein (e.g., at the N-terminal or C-terminal ends), e.g., for localization. In some embodiments, amino acid residues located at the carboxy, amino terminal, or internal regions of a TLR4 polypeptide disclosed herein can optionally be deleted providing for fragments.

[1506] In some embodiments, the TLR4 polynucleotide (e.g., a RNA, e.g., a mRNA) comprises a nucleotide sequence (e.g., an ORF) encoding a substitutional variant of a TLR4 sequence, which can comprise one, two, three or more than three substitutions. In some embodiments, the TLR4 substitutional variant can comprise one or more conservative amino acids substitutions. In other embodiments, the TLR4 variant is an insertional variant. In other embodiments, the TLR4 variant is a deletional variant.

[1507] Certain compositions and methods presented in this disclosure refer to the protein or polynucleotide sequences of caTLR4. A person skilled in the art will understand that such disclosures are equally applicable to any other isoforms of caTLR4 known in the art.

[1508] In some embodiments, the caTRL4 polypeptide comprises an amino acid sequence at least about 80%, at least about 85%, at least about 90%, at least about 95%, at least about 95%, about 96%, at least about 97%, at least about 98%, at least about 99%, or about 100% identical to amino acids 30 to 251 of SEQ ID NO: 525.

[1509] In other embodiments, the caTLR4 polypeptide comprises a CP domain of a full-length TLR4 polypeptide, a TM domain of a full-length TLR4 polypeptide, and an EC domain of a full-length TLR4 polypeptide, wherein the CP domain has an amino acid sequence having at least about 80%, at least about 85%, at least about 90%, at least about 95%, at least about 95%, about 96%, at least about 97%, at least about 98%, at least about 99%, or about 100% identical to amino acids 653 to 839 of SEQ ID NO: 523, wherein the TM domain has an amino acid sequence having at least about 80%, at least about 85%, at least about 90%, at least about 95%, at least about 95%, about 96%, at least about 97%, at least about 98%, at least about 99%, or about 100% identical to amino acids 632 to 652 of SEQ ID NO: 523, and/or wherein the EC fragment has an amino acid sequence consisting of or consisting essentially of M, MP, MPV, MPV, MPVL (SEQ ID NO: 527), MPVLS (SEQ ID NO: 528), MPVLSL (SEQ ID NO: 529), MPVLSLN (SEQ ID NO:530), MPVLSLN (SEQ ID NO: 531), MPVLSLNI (SEQ ID NO: 532), MPVLSLNIT (SEQ ID NO:533), MPVLSLNITC (SEQ ID NO:534), MPVLSLNITCQ (SEQ ID NO:535), MPVLSLNITCQM (SEQ ID NO: 536), MPVLSLNITCQMN (SEQ ID NO:537), or MPVLSLNITCQMNK (SEQ ID NO:538).

[1510] In certain embodiments, the caTLR4 polypeptide can be fused to a signal peptide. In one embodiment, a signal peptide is a naturally occurring TLR4 signal peptide. In other embodiments, the signal peptide comprises a heterologous peptide, e.g., a peptide derived from a protein other than TLR4. In one embodiment, a signal peptide is a signal peptide of a lysosome-associated membrane glycoprotein 1 (LAMP-1) protein. In another embodiment, a signal peptide is an IgK signal peptide, e.g., a human IgK signal peptide or a murine IgK signal peptide. In other embodiments, the signal peptide comprises an amino acid sequence having at least about 80%, at least about 85%, at least about 90%, at least about 95%, at least about 95%, about 96%, at least about 97%, at least about 98%, at least about 99%, or about 100% identical to amino acids 1 to 29 of SEQ ID NO: 525.

[1511] In other embodiments, the caTLR4 polypeptide can be a fusion protein, which is fused to one or more heterologous polypeptide.

[1512] In some embodiments, a combination therapy disclosed herein includes any TLR4 polypeptide, e.g., a caTLR4 polypeptide, encoded by the sequence-optimized TLR4 polynucleotides disclosed herein or a nucleotide sequence comprising the sequence-optimized polynucleotides disclosed herein.

[1513] TLR4 Polynucleotides and Open Reading Frames (ORFs): The combination therapies disclosed herein can include any TLR4 polynucleotides (e.g., DNA or RNA, e.g., mRNA) disclosed herein. In certain embodiments, the present disclosure provides TLR4 polynucleotides (e.g., a RNA, e.g., a mRNA) that comprise a nucleotide sequence (e.g., an ORF) encoding one or more TLR4 polypeptides, e.g., caTLR4 polynucleotides. In some embodiments, a TRL4 polynucleotide included in a combination therapy disclosed herein can encode a TLR4 polypeptide selected from:
[1514] (i) a caTLR4 polypeptide comprising a CP domain, a TM domain, and an EC domain without one or more LRR region;
[1515] (ii) a caTRL4 polypeptide comprising a CP domain, a TM domain, and an EC fragment comprising, consisting essentially of, or consisting of M, MP, MPV, MPV, MPVL (SEQ ID NO: 527), MPVLS (SEQ ID NO:528), MPVLSL (SEQ ID NO:529), MPVLSLN (SEQ ID NO:530), MPVLSLN (SEQ ID NO:531), MPVLSLNI (SEQ ID NO:532), MPVLSLNIT (SEQ ID NO:533), MPVLSLNITC (SEQ ID NO:534), MPVLSLNITCQ (SEQ ID NO:535), MPVLSLNITCQM (SEQ ID NO:536), MPVLSLNITCQMN (SEQ ID NO:537), or MPVLSLNITCQMNK (SEQ ID NO:538); and
[1516] (iii) a fusion protein comprising (i) a caTLR4 polypeptide, a functional fragment or a variant thereof, and (ii) a heterologous protein.

[1517] In some embodiments, a TLR4 polynucleotides included in a combination therapy disclosed herein can also encode:
[1518] (i) a full-length or mature TLR4 polypeptide (e.g., having the same or essentially the same length as wild-type TLR4 isoform 1, 2, or 3);
[1519] (ii) a functional fragment of any of the TLR4 isoforms described herein (e.g., a truncated (e.g., deletion of carboxy, amino terminal, or internal regions) sequence shorter than one of wild-type isoforms 1, 2, or 3; but still retaining TLR4 activity);
[1520] (iii) a variant thereof (e.g., full-length, mature, or truncated TLR4 isoform 1, 2, or 3 proteins in which one or more amino acids have been replaced, e.g., variants that retain all or most of the TLR4 activity of the polypeptide with respect to a reference isoform); or
[1521] (iv) a fusion protein comprising (i) the full-length or mature TLR4 polypeptide, a functional fragment, or a variant thereof, and (ii) a heterologous protein.

[1522] In certain embodiments, the encoded TLR4 polypeptide, e.g., caTLR4, is a mammalian TLR4 polypeptide, such as a human TLR4 polypeptide, a functional fragment or a variant thereof.

[1523] In some embodiments, the TLR4 polynucleotide (e.g., a RNA, e.g., a mRNA) increases TLR4, e.g., caTLR4, protein expression levels and/or detectable TLR4, e.g., caTLR4, activity levels in cells when introduced in those cells, e.g., by at least 10%, at least 15%, at least 20%, at least 25%, at least 30%, at least 35%, at least 40%, at least 45%, at least 50%, at least 55%, at least 60%, at least 65%, at least 70%, at least 75%, at least 80%, at least 85%, at least 90%, at least 95%, or at least 100%, compared to TLR4, e.g., caTLR4, protein expression levels and/or detectable TLR4, e.g., caTLR4, activity levels in the cells prior to the administration of the TLR4 polynucleotide.

[1524] The TLR4, e.g., caTLR4, protein expression levels and/or TLR4, e.g., caTLR4, activity can be measured according to methods know in the art. In some embodiments, the TLR4 polynucleotide (e.g., a RNA, e.g., a mRNA) is introduced to the cells in vitro. In some embodiments, the TLR4 polynucleotide (e.g., a RNA, e.g., a mRNA) is introduced to the cells in vivo.

[1525] In some embodiments, the TLR4 polynucleotide (e.g., a RNA, e.g., a mRNA) comprises a codon optimized nucleic acid sequence, wherein the open reading frame (ORF) of the codon optimized nucleic sequence is derived from a wild-type TLR4 sequence. For example, for TLR4 polynucleotides disclosed herein comprising a sequence optimized ORF encoding TLR4, the corresponding wild type sequence is the native TLR4.

[1526] In some embodiments, the TLR4 polynucleotide (e.g., a RNA, e.g., a mRNA) comprises a nucleotide sequence (e.g., an ORF) that encodes a TLR4, e.g., caTLR4, polypeptide with mutations that do not alter TLR4, e.g., caTLR4, activity. Such mutant TLR4, e.g., caTLR4, polypeptides can be referred to as function-neutral. In some embodiments, the TLR4 polynucleotide comprises an ORF that encodes a mutant TLR4, e.g., caTLR4, polypeptide comprising one or more function-neutral point mutations.

[1527] In some embodiments, the mutant TLR4 polypeptide has higher TLR4 activity than the corresponding wild-type TLR4. In some embodiments, the mutant TLR4 polypeptide has a TLR4 activity that is at least 10%, at least 15%, at least 20%, at least 25%, at least 30%, at least 35%, at least 40%, at least 45%, at least 50%, at least 55%, at least 60%, at least 65%, at least 70%, at least 75%, at least 80%, at least 85%, at least 90%, at least 95%, or at least 100% higher than the activity of the corresponding wild-type TLR4

[1528] In some embodiments, the TLR4 polynucleotide (e.g., a RNA, e.g., a mRNA) comprises a nucleotide sequence (e.g., an ORF) encoding a TLR4 fragment, e.g., caTLR4, that has higher TLR4 activity than the corresponding mature TLR4. Thus, in some embodiments the TLR4 fragment, e.g., caTLR4, has a TLR4 activity which is at least 10%, at least 15%, at least 20%, at least 25%, at least 30%, at least 35%, at least 40%, at least 45%, at least 50%, at least 55%, at least 60%, at least 65%, at least 70%, at least 75%, at least 80%, at least 85%, at least 90%, at least 95%, or at least 100% higher than the TLR4 activity of the corresponding mature TLR4.

[1529] In some embodiments, the TLR4 polynucleotide (e.g., a RNA, e.g., a mRNA) comprises a nucleotide sequence (e.g., an ORF) encoding a TLR4 polypeptide, e.g., caTLR4, that is at least 1%, 2%, 3%, 4%, 5%, 6%, 7%, 8%, 9%10%11, 1%1, 12%, 3%, 14%, 15%, 16%, 17%, 18%, 19%, 20%, 21%, 22%, 23%, 24%, or 25% shorter than the amino acid sequence as set forth in amino acids 30 to 251 of SEQ ID NO: 525.

[1530] In some embodiments, the TLR4 polynucleotide (e.g., a RNA, e.g., a mRNA) comprises a nucleotide sequence (e.g., an ORF) encoding a TLR4 polypeptide, e.g., caTLR4, wherein the TLR4 polypeptide comprises an amino acid sequence at least 70%, at least 75%, at least 80%, at least 85%, at least 90%, at least 95%, at least 96%, at least 97%, at least 98%, at least 99%, or 100% identical to amino acids 30 to 251 of SEQ ID NO: 525.

[1531] In some embodiments, the TLR4 polynucleotide (e.g., a RNA, e.g., a mRNA) comprises a nucleotide sequence (e.g., an ORF) encoding a TLR4 polypeptide, e.g., caTLR4, wherein the TLR4 polypeptide comprises an amino acid sequence at least 60%, at least 65%, at least 70%, at least 75%, at least 80%, at least 85%, at least 90%, at least 95%, at least 96%, at least 97%, at least 98%, at least 99%, or 100% identical to SEQ ID NO: 525.

[1532] In some embodiments, the TLR4 polynucleotide (e.g., a RNA, e.g., a mRNA) comprises a nucleotide sequence (e.g., an ORF) encoding a caTLR4 polypeptide, wherein the nucleotide sequence has 85% to 100%, 90% to 100%, 95% to 100%, 80% to 95%, 85% to 95%, 85% to 90%, 90% to 95%, or 95% to 100% sequence identity nucleotides 88-753 of SEQ ID NO: 541.

[1533] In some embodiments, the TLR4 polynucleotide (e.g., a RNA, e.g., a mRNA) comprises a nucleotide sequence (e.g., an ORF) encoding a caTLR4 polypeptide, wherein the nucleotide sequence has 60% to 100%, 65% to 100%, 70% to 100%, 75% to 100%, 80% to 100%, 85% to 100%, 90% to 100%, 95% to 100%, 80% to 95%, 85% to 95%, 85% to 90%, 90% to 95%, or 95% to 100% sequence identity to SEQ ID NO: 541.

[1534] In some embodiments, the TLR4 polynucleotide (e.g., a RNA, e.g., a mRNA) comprises a nucleotide sequence (e.g., an ORF) encoding a caTLR4 polypeptide, wherein the nucleotide sequence has at least 86%, at least 87%, at least 88%, at least 89%, at least 90%, at least 91%, at least 92%, at least 93%, at least 94%, at least 95%, at least 96%, at least 97%, at least 98%, at least 99%, or 100% sequence identity to nucleotides 88-753 of SEQ ID NO: 539 or 549.

[1535] In some embodiments, the TLR4 polynucleotide (e.g., a RNA, e.g., a mRNA) comprises a nucleotide sequence (e.g., an ORF) encoding a caTLR4 polypeptide, wherein the nucleotide sequence has at least 80%, at least 85%, at least 86%, at least 87%, at least 88%, at least 89%, at least 90%, at least 91%, at least 92%, at least 93%, at least 94%, at least 95%, at least 96%, at least 97%, at least 98%, at least 99%, or 100% sequence identity to SEQ ID NO: 539 or 549.

[1536] In some embodiments, the TLR4 polynucleotide (e.g., a RNA, e.g., a mRNA) comprises a nucleotide sequence (e.g., an ORF) encoding a caTLR4 polypeptide, wherein the nucleotide sequence has 86% to 100%, 90% to 100%, 86% to 95%, 86% to 90%, 90% to 95%, or 95% to 100% sequence identity to nucleotides 88-753 of SEQ ID NO: 539 or 549.

[1537] In some embodiments, the TLR4 polynucleotide (e.g., a RNA, e.g., a mRNA) comprises a nucleotide sequence (e.g., an ORF) encoding a caTLR4 polypeptide, wherein the nucleotide sequence has 80% to 100%, 85% to 100%, 86% to 100%, 90% to 100%, 86% to 95%, 86% to 90%, 90% to 95%, or 95% to 100% sequence identity to SEQ ID NO: 539 or 549.

[1538] In some embodiments, the TLR4 polynucleotide (e.g., a RNA, e.g., a mRNA) comprises a nucleotide sequence (e.g., an ORF) encoding a caTLR4 polypeptide, wherein the nucleotide sequence has at least 87%, at least 88%, at least 89%, at least 90%, at least 91%, at least 92%, at least 93%, at least 94%, at least 95%, at least 96%, at least 97%, at least 98%, at least 99%, or 100% sequence identity to nucleotides 88-753 of a sequence selected from the group consisting of SEQ ID NOs: 552, 554, and 556.

[1539] In some embodiments, the TLR4 polynucleotide (e.g., a RNA, e.g., a mRNA) comprises a nucleotide sequence (e.g., an ORF) encoding a caTLR4 polypeptide, wherein the nucleotide sequence has at least 80%, at least 85%, at least 87%, at least 88%, at least 89%, at least 90%, at least 91%, at least 92%, at least 93%, at least 94%, at least 95%, at least 96%, at least 97%, at least 98%, at least 99%, or 100% sequence identity to a sequence selected from the group consisting of SEQ ID NOs: 552, 554, and 556.

[1540] In some embodiments, the TLR4 polynucleotide (e.g., a RNA, e.g., a mRNA) comprises a nucleotide sequence (e.g., an ORF) encoding a caTLR4 polypeptide, wherein the nucleotide sequence has 87% to 100%, 90% to 100%, 87% to 95%, 87% to 90%, 90% to 95%, or 95% to 100% sequence identity to nucleotides 88-753 of a sequence selected from the group consisting of SEQ ID NOs: 552, 554, and 556.

[1541] In some embodiments, the TLR4 polynucleotide (e.g., a RNA, e.g., a mRNA) comprises a nucleotide sequence (e.g., an ORF) encoding a caTLR4 polypeptide, wherein the nucleotide sequence has 80% to 100%, 85% to 100%, 87% to 100%, 90% to 100%, 87% to 95%, 87% to 90%, 90% to 95%, or 95% to 100% sequence identity to SEQ ID NOs: 552, 554, or 556.

[1542] In some embodiments, the TLR4 polynucleotide (e.g., a RNA, e.g., a mRNA) comprises a nucleotide sequence (e.g., an ORF) encoding a caTLR4 polypeptide, wherein the nucleotide sequence has at least 88%, at least 89%, at least 90%, at least 91%, at least 92%, at least 93%, at least 94%, at least 95%, at least 96%, at least 97%, at least 98%, at least 99%, or 100% sequence identity to nucleotides 88-753 of a sequence selected from the group consisting of SEQ ID NOs: 542, 543, 555, 557, 559, and 563.

[1543] In some embodiments, the TLR4 polynucleotide (e.g., a RNA, e.g., a mRNA) comprises a nucleotide sequence (e.g., an ORF) encoding a caTLR4 polypeptide, wherein the nucleotide sequence has at least 80%, at least 85%, at least 88%, at least 89%, at least 90%, at least 91%, at least 92%, at least 93%, at least 94%, at least 95%, at least 96%, at least 97%, at least 98%, at least 99%, or 100% sequence identity to a sequence selected from the group consisting of SEQ ID NOs: 542, 543, 555, 557, 559, and 563.

[1544] In some embodiments, the TLR4 polynucleotide (e.g., a RNA, e.g., a mRNA) comprises a nucleotide sequence (e.g., an ORF) encoding a caTLR4 polypeptide, wherein the nucleotide sequence has 88% to 100%, 90% to 100%, 88% to 95%, 88% to 90%, 90% to 95%, or 95% to 100% sequence identity to nucleotides 88-753 of a sequence selected from the group consisting of SEQ ID NOs: 542, 543, 555, 557, 559, and 563.

[1545] In some embodiments, the TLR4 polynucleotide (e.g., a RNA, e.g., a mRNA) comprises a nucleotide sequence (e.g., an ORF) encoding a caTLR4 polypeptide, wherein the nucleotide sequence has 80% to 100%, 85% to 100%, 88% to 100%, 90% to 100%, 88% to 95%, 88% to 90%, 90% to 95%, or 95% to 100% sequence identity to a sequence selected from the group consisting of SEQ ID NOs: 542, 543, 555, 557, 559, and 563.

[1546] In some embodiments, the TLR4 polynucleotide (e.g., a RNA, e.g., a mRNA) comprises a nucleotide sequence (e.g., an ORF) encoding a caTLR4 polypeptide, wherein the nucleotide sequence has at least 89%, at least 90%, at least 91%, at least 92%, at least 93%, at least 94%, at least 95%, at least 96%, at least 97%, at least 98%, at least 99%, or 100% sequence identity to nucleotides 88-753 of a sequence selected from the group consisting of SEQ ID NOs: 546, 550, 551, 553, 561, and 562.

[1547] In some embodiments, the TLR4 polynucleotide (e.g., a RNA, e.g., a mRNA) comprises a nucleotide sequence (e.g., an ORF) encoding a caTLR4 polypeptide, wherein the nucleotide sequence has at least 80%, at least 85%, at least 89%, at least 90%, at least 91%, at least 92%, at least 93%, at least 94%, at least 95%, at least 96%, at least 97%, at least 98%, at least 99%, or 100% sequence identity to a sequence selected from the group consisting of SEQ ID NOs: 546, 550, 551, 553, 561, and 562.

[1548] In some embodiments, the TLR4 polynucleotide (e.g., a RNA, e.g., a mRNA) comprises a nucleotide sequence (e.g., an ORF) encoding a caTLR4 polypeptide, wherein the nucleotide sequence has 89% to 100%, 95% to 100%, or 89% to 95% sequence identity to nucleotides 88-753 of a sequence selected from the group consisting of SEQ ID NOs: 546, 550, 551, 553, 561, and 562.

[1549] In some embodiments, the TLR4 polynucleotide (e.g., a RNA, e.g., a mRNA) comprises a nucleotide sequence (e.g., an ORF) encoding a caTLR4 polypeptide, wherein the nucleotide sequence has 80% to 100%, 85% to 100%, 89% to 100%, 95% to 100%, or 89% to 95% sequence identity to a sequence selected from the group consisting of SEQ ID NOs: 546, 550, 551, 553, 561, and 562.

[1550] In some embodiments, the TLR4 polynucleotide (e.g., a RNA, e.g., a mRNA) comprises a nucleotide sequence (e.g., an ORF) encoding a caTLR4 polypeptide, wherein the nucleotide sequence has at least 90%, at least 91%, at least 92%, at least 93%, at least 94%, at least 95%, at least 96%, at least 97%, at least 98%, at least 99%, or 100% sequence identity to nucleotides 88-753 of a sequence selected from the group consisting of SEQ ID NOs: 540, 544, 547, 548, and 558.

[1551] In some embodiments, the TLR4 polynucleotide (e.g., a RNA, e.g., a mRNA) comprises a nucleotide sequence (e.g., an ORF) encoding a caTLR4 polypeptide, wherein the nucleotide sequence has at least 80%, at least 85%, at least 90%, at least 91%, at least 92%, at least 93%, at least 94%, at least 95%, at least 96%, at least 97%, at least 98%, at least 99%, or 100% sequence identity to a sequence selected from the group consisting of SEQ ID NOs: 540, 544, 547, 548, and 558.

[1552] In some embodiments, the TLR4 polynucleotide (e.g., a RNA, e.g., a mRNA) comprises a nucleotide sequence (e.g., an ORF) encoding a caTLR4 polypeptide, wherein the nucleotide sequence has 90% to 100%, 90% to 95%, or 95% to 100% sequence identity to nucleotides 88-753 of a sequence selected from the group consisting of SEQ ID NOs: 540, 544, 547, 548, and 558.

[1553] In some embodiments, the TLR4 polynucleotide (e.g., a RNA, e.g., a mRNA) comprises a nucleotide sequence (e.g., an ORF) encoding a caTLR4 polypeptide, wherein the nucleotide sequence has 80% to 100%, 85% to 100%, 90% to 100%, 90% to 95%, or 95% to 100% sequence identity to a sequence selected from the group consisting of SEQ ID NOs: 540, 544, 547, 548, and 558.

[1554] In some embodiments, the TLR4 polynucleotide (e.g., a RNA, e.g., a mRNA) comprises a nucleotide sequence (e.g., an ORF) encoding a caTLR4 polypeptide, wherein the nucleotide sequence has at least 91%, at least 92%, at least 93%, at least 94%, at least 95%, at least 96%, at least 97%, at least 98%, at least 99%, or 100% sequence identity to nucleotides 88-753 of SEQ ID NO: 545 or 560.

[1555] In some embodiments, the TLR4 polynucleotide (e.g., a RNA, e.g., a mRNA) comprises a nucleotide sequence (e.g., an ORF) encoding a caTLR4 polypeptide, wherein the nucleotide sequence has at least 80%, at least 85%, at least 91%, at least 92%, at least 93%, at least 94%, at least 95%, at least 96%, at least 97%, at least 98%, at least 99%, or 100% sequence identity to SEQ ID NO: 545 or 560.

[1556] In some embodiments, the TLR4 polynucleotide (e.g., a RNA, e.g., a mRNA) comprises a nucleotide sequence (e.g., an ORF) encoding a caTLR4 polypeptide, wherein the nucleotide sequence has 91% to 100%, 91% to 95%, or 95% to 100% sequence identity to nucleotides 88-753 of SEQ ID NO: 545 or 560.

[1557] In some embodiments, the TLR4 polynucleotide (e.g., a RNA, e.g., a mRNA) comprises a nucleotide sequence (e.g., an ORF) encoding a caTLR4 polypeptide, wherein the nucleotide sequence has 80% to 100%, 85% to 100%, 90% to 100%, 91% to 100%, 91% to 95%, or 95% to 100% sequence identity to SEQ ID NO: 545 or 560.

[1558] In some embodiments, the TLR4 polynucleotide (e.g., a RNA, e.g., a mRNA) comprises from about 600 to about 100,000 nucleotides (e.g., from 600 to 650, from 600 to 675, from 600 to 700, from 600 to 725, from 600 to 750, from 600 to 775, from 600 to 800, from 600 to 900, from 600 to 1000, from 600 to 1100, from 600 to 1200, from 600 to 1300, from 600 to 1400, from 600 to 1500, from 700 to 800, from 700 to 900, from 700 to 1000, from 700 to 1100, from 700 to 1200, from 700 to 1300, from 700 to 1400, from 700 to 1500, from 753 to 800, from 753 to 900, from 753 to 1000, from 753 to 1200, from 753 to 1400, from 753 to 1600, from 753 to 1800, from 753 to 2000, from 753 to 3000, from 753 to 5000, from 753 to 7000, from 753 to 10,000, from 753 to 25,000, from 753 to 50,000, from 753 to 70,000, or from 753 to 100,000.).

[1559] In some embodiments, the TLR4 polynucleotide (e.g., a RNA, e.g., a mRNA) comprises a nucleotide sequence (e.g., an ORF) encoding a TLR4 polypeptide, e.g., caTLR4, wherein the length of the nucleotide sequence (e.g., an ORF) is at least 300 nucleotides in length (e.g., at least or greater than about 300, 400, 500, 600, 700, 750, 753, 800, 900, 1000, 1100, 1200, 1300, 1400, 1500, 1600, 1700, 1800, 1900, 2000, 2100, 2200, 2300, 2400, 2500, 2600, 2700, 2800, 2900, 3000, 3100, 3200, 3300, 3400, 3500, 3600, 3700, 3800, 3900, 4000, 4100, 4200, 4300, 4400, 4500, 4600, 4700, 4800, 4900, 5000, 5100, 5200, 5300, 5400, 5500, 5600, 5700, 5800, 5900, 6000, 7000, 8000, 9000, 10,000, 20,000, 30,000, 40,000, 50,000, 60,000, 70,000, 80,000, 90,000 or up to and including 100,000 nucleotides).

[1560] In some embodiments, the TLR4 polynucleotide (e.g., a RNA, e.g., a mRNA) comprises a nucleotide sequence (e.g., an ORF) encoding a TLR4 polypeptide, e.g., caTLR4, that further comprises at least one nucleic acid sequence that is noncoding, e.g., a miRNA binding site.

[1561] In some embodiments, the TLR4 polynucleotide (e.g., a RNA, e.g., a mRNA) comprises a nucleotide sequence (e.g., an ORF) encoding a TLR4 polypeptide, e.g., caTLR4, that is single stranded or double stranded.

[1562] In some embodiments, the TLR4 polynucleotide comprising a nucleotide sequence (e.g., an ORF) encoding a TLR4 polypeptide, e.g., caTLR4, is DNA or RNA. In some embodiments, the TLR4 polynucleotide is RNA. In some embodiments, the TLR4 polynucleotide is, or functions as, a messenger RNA (mRNA). In some embodiments, the TLR4 mRNA comprises a nucleotide sequence (e.g., an ORF) that encodes at least one TLR4 polypeptide, e.g., caTLR4, and is capable of being translated to produce the encoded TLR4 polypeptide, e.g., caTLR4, in vitro, in vivo, in situ or ex vivo.

[1563] In some embodiments, the TLR4 polynucleotide (e.g., a RNA, e.g., a mRNA) comprises a sequence-optimized nucleotide sequence (e.g., an ORF) encoding a TLR4 polypeptide, e.g., caTLR4, (e.g., the wild-type sequence, functional fragment, or variant thereof), wherein the polynucleotide comprises at least one chemically modified nucleobase, e.g., 5-methoxyuracil. In some embodiments, the polynucleotide further comprises a miRNA binding site, e.g., a miRNA binding site that binds to miR-122. In some embodiments, the polynucleotide disclosed herein is formulated with a delivery agent, e.g., a compound having Formula (I), e.g., any of Compounds 1-147.

[1564] TLR4 polynucleotide signal sequences: The TLR4 polynucleotides (e.g., a RNA, e.g., a mRNA) can also comprise nucleotide sequences that encode additional features that facilitate trafficking of the encoded polypeptides to therapeutically relevant sites. One such feature that aids in protein trafficking is the signal sequence, or targeting sequence. The peptides encoded by these signal sequences are known by a variety of names, including targeting peptides, transit peptides, and signal peptides. In some embodiments, the TLR4 polynucleotide (e.g., a RNA, e.g., a mRNA) comprises a nucleotide sequence (e.g., an ORF) that encodes a signal peptide operably linked a nucleotide sequence that encodes a TLR4 polypeptide, e.g., caTLR4, described herein.

[1565] In some embodiments, the signal sequence or signal peptide is a polynucleotide or polypeptide, respectively, which is from about 9 to 200 nucleotides (3-70 amino acids) in length that, optionally, is incorporated at the 5′ (or N-terminus) of the coding region or the polypeptide, respectively. Addition of these sequences results in trafficking the encoded polypeptide to a desired site, such as the endoplasmic reticulum or the mitochondria through one or more targeting pathways. Some signal peptides are cleaved from the protein, for example by a signal peptidase after the proteins are transported to the desired site.

[1566] In some embodiments, the TLR4 polynucleotide comprises a nucleotide sequence encoding a TLR4 polypeptide, e.g., caTLR4, wherein the nucleotide sequence further comprises a 5′ nucleic acid sequence encoding a signal peptide. In one embodiment, a signal peptide is a naturally occurring TLR4 signal peptide, e.g., the signal peptide corresponding to amino acids 1-23 of wild-type TLR4. In other embodiments, the signal peptide is a heterologous signal peptide. In one embodiment, a signal peptide is a signal peptide of a lysosome-associated membrane glycoprotein 1 (LAMP-1) protein. In another embodiment, a signal peptide is an IgK signal peptide, e.g., a human IgK signal peptide or a murine IgK signal peptide. In other embodiments, the signal peptide comprises an amino acid sequence having at least about 80%, at least about 85%, at least about 90%, at least about 95%, at least about 95%, about 96%, at least about 97%, at least about 98%, at least about 99%, or about 100% identical to amino acids 1 to 29 of SEQ ID NO: 525.

[1567] TLR4 Fusion Proteins: In some embodiments, the TLR4 polynucleotide (e.g., a RNA, e.g., a mRNA) can comprise more than one nucleic acid sequence (e.g., an ORF) encoding a polypeptide of interest. In some embodiments, the TLR4 polynucleotides comprises a single ORF encoding a TLR4 polypeptide, e.g., caTLR4, a functional fragment, or a variant thereof. However, in some embodiments, the TLR4 polynucleotide can comprise more than one ORF, for example, a first ORF encoding a TLR4 polypeptide, e.g., caTLR4 (a first polypeptide of interest), a functional fragment, or a variant thereof, and a second ORF expressing a second polypeptide of interest. In some embodiments, two or more polypeptides of interest can be genetically fused, i.e., two or more polypeptides can be encoded by the same ORF. In some embodiments, the TLR4 polynucleotide can comprise a nucleic acid sequence encoding a linker (e.g., a G4S peptide linker or another linker known in the art) between two or more polypeptides of interest.

[1568] In some embodiments, the TLR4 polynucleotide (e.g., a RNA, e.g., a mRNA) can comprise two, three, four, or more ORFs, each expressing a polypeptide of interest.

[1569] In some embodiments, the TLR4 polynucleotide (e.g., a RNA, e.g., a mRNA) can comprise a first nucleic acid sequence (e.g., a first ORF) encoding a TLR4 polypeptide, e.g., caTLR4, and a second nucleic acid sequence (e.g., a second ORF) encoding a second polypeptide of interest.

[1570] Sequence-optimized TLR4 polynucleotides: In some embodiments, the TLR4 polynucleotide comprises a sequence-optimized nucleotide sequence encoding a TLR4 polypeptide, e.g., caTLR4. In some embodiments, the TLR4 polynucleotide comprises an open reading frame (ORF) encoding a TLR4 polypeptide, e.g., caTLR4, wherein the ORF has been sequence optimized.

[1571] Exemplary sequence-optimized nucleotide sequences encoding caTLR4 are shown in TABLE 7. In some embodiments, the sequence optimized caTLR4 sequences in TABLE 7, fragments, and variants thereof are used to practice the methods disclosed herein.

TABLE 7
Sequence optimized ORFs encoding caTLR4

| SEQ | | |
|---|---|---|
| ID NO | Name | Sequence |
| 539 | TLR4ca- | ATGGCCGCCCCCGGTTCCGCCCGGCGCCCACTCTTGCTCCTCCTCCTC |
| | CO01 | CTGCTCCTACTCGGCCTCATGCACTGCGCCAGCGCCGCCATGCCCGTA |
| | | CTCAGCCTCAACATAACCTGCCAGATGAATAAGACCATCATCGGCGTG |
| | | AGCGTCCTCAGCGTTCTCGTCGTCTCCGTCGTAGCAGTACTCGTTTAC |
| | | AAGTTCTACTTCCACCTCATGCTCCTCGCCGGGTGTATCAAGTACGGC |
| | | CGCGGGGAAAACATCTACGACGCCTTCGTCATCTATAGCAGCCAGGAC |
| | | GAGGACTGGGTCCGGAATGAGCTGGTGAAGAACCTGGAGGAAGGCGTC |
| | | CCGCCCTTCCAGCTGTGTCTGCACTACCGGGATTTCATCCCCGGGGTG |
| | | GCGATCGCCGCGAACATCATCCACGAGGGATTCCACAAGTCCCGGAAG |
| | | GTGATCGTGGTCGTGAGCCAGCACTTCATCCAAAGCCGGTGGTGCATC |
| | | TTCGAGTACGAGATCGCCCAGACCTGGCAGTTTCTGTCCTCCAGGGCG |
| | | GGAATCATCTTCATAGTGCTGCAGAAGGTGGAAAAAACCCTCCTGCGG |
| | | CAGCAGGTGGAGCTGTACAGGCTGTTGAGCAGGAACACCTATCTGGAG |
| | | TGGGAGGACAGCGTGCTGGGACGCCACATCTTCTGGAGGCGGCTGCGG |
| | | AAAGCTCTGCTGGACGGGAAGTCTTGGAACCCGGAGGGGACGGTGGGC |
| | | ACCGGTTGCAACTGGCAGGAGGCCACCTCCATC |
| 540 | TLR4ca- | ATGGCCGCCCCAGGCTCCGCCAGGCGGCCGCTCCTCCTCCTCCTTCTA |
| | CO02 | CTCCTCCTCCTCGGCTTGATGCACTGCGCCAGCGCCGCGATGCCCGTT |
| | | CTCAGCCTCAACATCACGTGCCAGATGAACAAGACCATCATCGGAGTC |
| | | TCCGTCCTCAGCGTTCTCGTCGTCAGCGTCGTAGCCGTCCTCGTCTAC |
| | | AAGTTCTATTTCCACCTCATGCTCCTGGCCGGGTGCATCAAGTACGGG |
| | | CGCGGCGAGAACATCTACGACGCCTTCGTCATATACTCCAGCCAGGAC |
| | | GAGGACTGGGTCAGGAACGAGCTGGTGAAGAACCTCGAGGAGGGGGTC |
| | | CCGCCCTTTCAGCTGTGCCTGCACTACCGGGACTTCATCCCCGGCGTG |
| | | GCCATCGCCGCCAACATCATCCACGAGGGGTTCCACAAGAGCAGGAAG |
| | | GTGATAGTGGTGGTGAGCCAGCACTTCATTCAGAGCCGGTGGTGCATC |
| | | TTCGAGTATGAGATCGCCCAGACCTGGCAATTCCTGTCCTCCCGGGCA |
| | | GGCATCATCTTCATCGTGCTGCAGAAGGTGGAGAAGACCCTGCTGAGG |
| | | CAGCAGGTGGAGCTGTACAGGCTGCTGAGCAGGAACACTTACCTGGAA |
| | | TGGGAGGACAGCGTGCTGGGCAGGCATATCTTCTGGAGGAGGCTGCGG |
| | | AAGGCCCTGCTGGACGGCAAGAGCTGGAACCCCGAGGGCACCGTGGGG |
| | | ACCGGCTGTAACTGGCAGGAAGCCACGAGCATC |
| 541 | TLR4ca- | ATGGCCGCCCCCGGCAGCGCCAGGCGGCCCCTCCTACTCCTCCTTTTG |
| | CO03 | CTCCTCCTCCTCGGGCTCATGCACTGCGCGTCCGCCGCCATGCCGGTC |
| | | CTCAGCCTCAACATCACCTGCCAGATGAACAAGACGATCATCGGCGTC |
| | | TCCGTCCTCTCCGTCCTCGTCGTCTCCGTAGTTGCCGTCTTGGTCTAC |
| | | AAATTCTACTTCCATCTTATGCTCCTTGCCGGGTGTATAAAGTACGGC |
| | | AGGGGGGAGAACATCTACGACGCCTTCGTCATCTACAGCAGCCAGGAC |
| | | GAAGACTGGGTTCGGAACGAGCTGGTGAAGAACCTGGAGGAGGGCGTG |
| | | CCCCCCTTCCAGCTGTGTCTGCATTACCGGGACTTCATCCCGGGGGTG |
| | | GCCATAGCCGCCAACATCATCCATGAGGGCTTCCACAAGTCCCGGAAG |
| | | GTGATCGTGGTGGTGAGCCAGCACTTCATTCAATCCAGGTGGTGCATC |
| | | TTCGAGTACGAGATCGCGCAGACCTGGCAGTTCCTGAGCTCCCGCGCC |
| | | GGGATCATCTTCATCGTCCTCCAGAAAGTGGAGAAGACGCTGCTGCGG |
| | | CAGCAGGTGGAACTGTACCGTCTGCTCTCCCGGAACACCTACCTGGAG |
| | | TGGGAGGATAGCGTCCTGGGCCGGCACATCTTCTGGCGGCGGCTCCGG |
| | | AAGGCGCTGCTCGACGGGAAAAGCTGGAACCCGGAGGGCACCGTGGGC |
| | | ACTGGCTGCAATTGGCAGGAAGCAACGTCCATC |
| 542 | TLR4ca- | ATGGCCGCCCCCGGGTCCGCGAGGCGGCCCCTACTCCTCCTCCTTCTC |
| | CO04 | CTTCTTCTACTCGGCCTCATGCATTGCGCCAGCGCCGCCATGCCCGTC |
| | | CTCAGCCTCAACATCACCTGCCAGATGAACAAGACCATCATCGGGGTG |
| | | AGCGTCCTCAGCGTCCTCGTCGTCAGCGTCGTCGCGGTCCTCGTATAT |
| | | AAGTTCTACTTTCATCTCATGCTCCTCGCCGGCTGCATCAAGTACGGC |
| | | AGGGGCGAGAACATCTACGACGCCTTCGTCATCTACTCCAGCCAAGAC |
| | | GAGGATTGGGTTAGGAACGAGCTGGTGAAGAACCTGGAGGAGGGCGTG |
| | | CCCCCCTTCCAGCTCTGCCTCCACTACCGGGACTTTATCCCCGGTGTG |
| | | GCGATCGCCGCGAACATCATCCACGAGGGCTTCCACAAGAGCAGGAAA |
| | | GTGATCGTGGTGGTGTCCCAGCACTTCATCCAGTCCCGGTGGTGCATC |
| | | TTCGAGTACGAGATCGCCCAAACCTGGCAGTTCCTAAGCTCCAGGGCC |
| | | GGCATCATCTTCATTGTGCTCCAGAAGGTGGAGAAGACCCTGCTGAGG |
| | | CAGCAGGTGGAACTGTACCGCCTGCTGAGCAGGAACACCTACCTGGAG |
| | | TGGGAGGATAGCGTCCTGGGGCGGCACATCTTCTGGAGGCGCCTGAGG |
| | | AAGGCGCTGCTGGACGGCAAGTCCTGGAACCCCGAAGGCACCGTCGGG |
| | | ACGGGCTGCAATTGGCAGGAGGCCACCTCCATC |
| 543 | TLR4ca- | ATGGCCGCCCCCGGCAGCGCCAGACGACCCCTCCTCCTCTTGCTCCTC |
| | CO05 | CTTCTCCTCTTGGGCCTCATGCACTGCGCCAGCGCCGCGATGCCGGTC |
| | | CTCTCCCTTAACATCACCTGCCAGATGAACAAGACAATCATCGGGGTA |
| | | TCCGTCCTTTCCGTCCTTGTCGTCAGCGTCGTCGCCGTACTCGTTTAC |
| | | AAGTTCTACTTCCACCTTATGCTCTTGGCCGGGTGCATCAAATACGGC |
| | | CGCGGCGAGAATATATACGACGCGTTCGTGATCTACAGCTCACAGGAC |
| | | GAGGACTGGGTCCGCAACGAGCTGGTGAAGAACCTGGAGGAGGGGGTG |
| | | CCCCCCTTCCAGCTGTGTCTGCACTACAGGGACTTCATCCCCGGCGTG |
| | | GCCATCGCCGCCAACATCATCCACGAGGGGTTCCACAAGAGCAGAAAG |
| | | GTGATCGTGGTGGTCAGCCAGCACTTCATCCAGTCCAGGTGGTGCATC |
| | | TTCGAGTATGAGATCGCCCAGACCTGGCAGTTTCTGTCCTCCAGGGCC |
| | | GGGATCATCTTCATCGTGCTGCAGAAGGTGGAGAAGACCCTGCTCAGG |
| | | CAGCAGGTGGAGCTCTACAGGCTGCTGAGCAGGAATACCTACCTGGAA |
| | | TGGGAGGACAGCGTGCTGGGTCGCCACATCTTCTGGAGGCGCCTGCGG |
| | | AAGGCCCTGCTGGATGGCAAGAGCTGGAACCCCGAAGGGACCGTGGGT |
| | | ACCGGCTGCAACTGGCAGGAGGCCACCAGCATA |
| 544 | TLR4ca- | ATGGCCGCCCCGGGCAGCGCCCGCAGGCCCCTCCTCCTCTTGCTCCTC |
| | CO06 | CTCCTCCTCCTCGGATTGATGCACTGCGCCAGCGCCGCGATGCCCGTC |
| | | CTCTCCCTCAACATCACGTGCCAGATGAACAAGACCATTATCGGCGTT |
| | | TCCGTCCTCAGCGTCCTCGTCGTCAGCGTCGTAGCCGTCTTGGTTTAC |
| | | AAGTTCTACTTTCACTTGATGCTCCTCGCCGGCTGTATCAAGTACGGC |
| | | CGGGGCGAGAACATATACGACGCCTTCGTCATCTACAGCAGCCAGGAC |
| | | GAGGACTGGGTCCGCAACGAGCTGGTGAAGAACCTGGAGGAGGGCGTG |
| | | CCCCCTTTTCAGCTGTGCCTCCATTACCGGGACTTCATTCCCGGCGTG |
| | | GCCATCGCCGCCAACATCATCCACGAAGGCTTCCACAAGTCCAGGAAG |
| | | GTGATCGTGGTGGTGAGCCAGCACTTCATCCAGAGCAGGTGGTGCATC |
| | | TTCGAGTACGAGATCGCCCAGACCTGGCAGTTCCTGAGCAGCCGGGCC |
| | | GGCATCATCTTCATCGTGCTCCAGAAGGTCGAGAAGACCCTCCTGAGG |
| | | CAGCAGGTGGAGCTGTACAGGCTCCTTAGCCGGAACACGTACCTGGAG |
| | | TGGGAAGACTCCGTGCTGGGCCGGCACATCTTCTGGAGGCGACTGAGG |
| | | AAGGCCCTGCTCGACGGCAAGTCCTGGAACCCCGAGGGCACCGTGGGC |
| | | ACCGGCTGCAACTGGCAGGAGGCCACCAGCATC |
| 545 | TLR4ca- | ATGGCCGCCCCGGGGAGCGCCCGCCGGCCCCTCCTCCTCCTTCTCCTT |
| | CO07 | CTCCTCCTCCTAGGGCTCATGCATTGCGCCAGCGCCGCAATGCCCGTA |
| | | CTCAGCCTCAACATCACCTGCCAGATGAACAAGACGATCATCGGCGTT |
| | | AGCGTACTCAGCGTTCTCGTCGTCAGCGTCGTCGCGGTCCTCGTCTAC |
| | | AAATTCTACTTCCACCTCATGCTCCTAGCCGGCTGCATCAAATACGGC |
| | | AGGGGAGAGAACATCTACGACGCCTTCGTAATCTACAGCAGCCAGGAC |
| | | GAGGACTGGGTCCGCAACGAGCTGGTGAAGAACCTGGAGGAGGGCGTG |
| | | CCCCCCTTCCAGCTGTGCCTCCACTACAGGGACTTCATCCCAGGTGTG |
| | | GCGATCGCCGCCAACATAATCCACGAGGGCTTCCACAAGTCCAGGAAG |
| | | GTGATCGTGGTGGTGAGCCAGCACTTTATCCAGAGCAGGTGGTGTATC |
| | | TTCGAGTACGAGATCGCCCAGACCTGGCAGTTCCTCAGCAGTCGCGCC |
| | | GGCATCATCTTCATCGTGCTCCAGAAGGTGGAGAAGACCCTGCTGCGG |
| | | CAGCAGGTGGAGCTCTACCGGCTGCTGTCGCGCAACACCTACCTCGAG |
| | | TGGGAGGACAGCGTGCTGGGGCGACATATCTTTTGGCGAAGGCTGAGG |
| | | AAGGCCCTGCTGGACGGCAAGAGCTGGAACCCGGAGGGCACCGTGGGC |
| | | ACCGGATGTAACTGGCAAGAGGCCACCAGCATC |
| 546 | TLR4ca- | ATGGCCGCCCCCGGCAGCGCCAGGCGGCCCCTCCTCCTCTTGCTACTC |
| | CO08 | CTACTCCTCCTCGGCCTTATGCATTGCGCCTCCGCCGCCATGCCCGTC |
| | | CTCAGCCTTAACATCACCTGCCAGATGAACAAGACCATAATCGGCGTC |
| | | TCCGTCCTCTCGGTCCTAGTCGTCAGCGTCGTAGCCGTCCTTGTCTAC |
| | | AAGTTCTACTTCCACCTTATGTTGCTCGCCGGCTGCATCAAGTACGGC |
| | | AGGGGCGAGAATATCTACGACGCCTTCGTAATCTATAGCTCGCAAGAC |
| | | GAGGACTGGGTTAGGAACGAGCTGGTGAAGAATCTGGAGGAGGGGGTG |
| | | CCCCCATTTCAGCTGTGCCTGCATTACAGGGACTTCATCCCCGGCGTG |
| | | GCCATCGCCGCCAATATCATCCACGAAGGCTTCCACAAGTCCCGGAAG |
| | | GTGATCGTGGTGGTGTCGCAGCACTTTATCCAGAGCAGGTGGTGCATC |
| | | TTCGAGTACGAGATCGCCCAGACCTGGCAGTTCCTGAGCAGCCGCGCC |
| | | GGGATAATTTTCATCGTGCTGCAGAAGGTGGAAAAGACGCTGCTCAGG |
| | | CAGCAGGTGGAGCTCTACCGGCTGCTGAGCAGGAACACCTACCTGGAA |
| | | TGGGAGGACTCCGTGCTGGGCCGCCACATCTTCTGGCGGAGGCTGCGG |
| | | AAGGCCCTGCTGGATGGCAAGAGCTGGAACCCCGAGGGCACCGTGGGC |
| | | ACCGGCTGCAATTGGCAGGAGGCGACCAGCATC |
| 547 | TLR4ca- | ATGGCCGCCCCCGGCTCCGCCCGGCGGCCCCTCCTCCTCCTCTTACTC |
| | CO09 | CTCCTCCTCCTCGGACTCATGCACTGCGCCAGCGCCGCCATGCCCGTC |
| | | CTCTCCTTAAACATCACCTGCCAGATGAACAAGACCATCATCGGCGTC |
| | | AGCGTCCTCAGCGTACTCGTAGTCAGCGTCGTAGCGGTCCTCGTCTAC |
| | | AAGTTCTACTTCCACCTCATGTTACTTGCCGGCTGCATCAAGTACGGC |
| | | AGGGGCGAGAACATCTACGACGCGTTCGTCATCTATAGCAGCCAAGAC |
| | | GAGGACTGGGTCCGCAATGAGCTGGTCAAGAACCTCGAAGAGGGGGTG |
| | | CCCCCCTTCCAGCTGTGCCTGCACTACAGGGACTTCATCCCCGGGGTC |
| | | GCCATAGCGGCCAACATCATACACGAAGGCTTTCACAAGAGCCGGAAG |
| | | GTGATCGTGGTGGTGTCCCAGCACTTCATCCAGTCCCGGTGGTGCATC |
| | | TTCGAGTACGAGATCGCGCAGACCTGGCAGTTCCTGAGCAGCAGAGCC |
| | | GGCATCATCTTTATCGTGCTGCAGAAGGTGGAGAAGACCCTGCTGCGC |
| | | CAGCAGGTGGAGCTGTACAGGCTGCTGAGCAGGAACACCTACCTCGAG |
| | | TGGGAGGACTCCGTGCTGGGCCGACACATCTTCTGGCGGCGCCTGCGC |
| | | AAGGCCCTGCTGGACGGGAAAAGCTGGAACCCCGAGGGCACCGTGGGC |
| | | ACCGGGTGCAACTGGCAGGAAGCGACCAGCATC |
| 548 | TLR4ca- | ATGGCCGCCCCGGGGAGCGCCAGGAGGCCCCTACTCCTCCTCCTCCTC |
| | CO10 | CTTCTTCTACTCGGCTTAATGCATTGCGCCAGCGCCGCCATGCCCGTC |
| | | CTTAGCCTTAACATCACTTGTCAGATGAACAAGACCATCATCGGGGTC |
| | | AGCGTCCTCAGCGTCCTCGTCGTATCGGTAGTCGCCGTCCTCGTCTAC |
| | | AAGTTCTATTTCCACCTCATGCTCCTCGCCGGCTGCATCAAATACGGG |
| | | AGGGGGGAGAACATCTACGACGCCTTCGTTATCTACAGCAGCCAGGAC |
| | | GAGGACTGGGTCCGGAACGAACTGGTGAAAAACCTGGAAGAGGGGGTG |
| | | CCCCCCTTCCAGCTGTGTCTGCACTACAGGGACTTCATCCCCGGTGTG |
| | | GCCATCGCGGCCAACATCATCCACGAGGGGTTCCACAAAAGCAGGAAG |
| | | GTGATCGTGGTGGTGAGCCAGCACTTCATCCAGAGCAGGTGGTGCATC |
| | | TTCGAGTACGAGATCGCCCAGACCTGGCAGTTCCTGTCGAGCAGGGCG |
| | | GGGATCATCTTCATCGTGCTCCAGAAGGTGGAGAAGACCCTGCTGCGA |
| | | CAGCAGGTCGAGCTGTACCGGCTGCTGAGCAGGAACACCTATCTGGAG |
| | | TGGGAAGACAGCGTGCTGGGCCGCCATATCTTCTGGAGGCGCCTGAGG |
| | | AAGGCCCTGCTGGACGGCAAGAGCTGGAATCCCGAGGGCACCGTGGGC |
| | | ACGGGGTGCAACTGGCAGGAGGCCACCAGCATC |
| 549 | TLR4ca- | ATGGCGGCCCCCGGCTCCGCCAGGCGCCCCCTCCTCCTCCTACTCCTC |
| | CO11 | CTCCTCCTCCTCGGCCTAATGCACTGCGCCAGCGCCGCTATGCCCGTC |
| | | CTCAGCCTCAATATCACTTGTCAGATGAACAAGACCATCATCGGCGTC |
| | | AGCGTCCTCTCAGTCCTCGTAGTCAGCGTCGTCGCCGTTCTCGTCTAC |
| | | AAGTTCTACTTCCATCTCATGCTTTTGGCGGGCTGCATCAAGTACGGC |
| | | CGAGGGGAGAATATCTACGACGCGTTCGTGATCTACTCCAGCCAGGAC |
| | | GAGGACTGGGTCAGGAACGAGCTGGTGAAGAATCTGGAGGAGGGGGTG |
| | | CCCCCCTTCCAGCTGTGCCTGCATTACCGGGACTTCATTCCCGGTGTG |
| | | GCCATCGCCGCCAATATCATCCACGAGGGCTTCCACAAGTCCAGGAAG |
| | | GTGATCGTGGTCGTGTCCCAGCACTTCATCCAAAGCCGGTGGTGCATC |
| | | TTCGAGTACGAGATTGCGCAGACCTGGCAATTCCTCAGCTCCAGGGCC |
| | | GGCATCATATTCATTGTGCTGCAAAAAGTGGAGAAGACGCTGCTGCGG |
| | | CAGCAAGTGGAGCTGTACCGCCTGCTGAGCAGGAACACCTACCTCGAG |
| | | TGGGAGGATTCCGTGCTCGGCAGGCACATCTTCTGGAGGAGGCTCCGC |
| | | AAGGCCCTGCTGGACGGCAAAAGCTGGAACCCCGAGGGGACAGTGGGC |
| | | ACAGGCTGCAACTGGCAGGAGGCGACCAGCATC |
| 550 | TLR4ca- | ATGGCCGCCCCCGGCAGCGCCCGGCGGCCTCTCCTCCTCCTCCTCTTG |
| | CO12 | CTCCTCCTCCTCGGCCTCATGCACTGCGCCAGCGCAGCCATGCCCGTA |
| | | CTCAGCTTGAACATCACGTGCCAGATGAACAAAACCATCATCGGCGTC |
| | | AGCGTACTCTCAGTGCTCGTCGTCAGCGTCGTCGCCGTACTCGTATAC |
| | | AAGTTCTACTTTCACTTAATGCTACTCGCCGGCTGCATCAAGTACGGC |
| | | CGCGGCGAAAACATCTACGACGCCTTCGTCATCTACTCCAGTCAGGAC |
| | | GAGGACTGGGTCAGGAACGAGCTGGTGAAGAACCTGGAGGAGGGCGTG |
| | | CCCCCCTTCCAGCTGTGCCTGCATTACCGGGATTTCATCCCGGGGGTG |
| | | GCCATTGCCGCGAACATCATCCACGAGGGCTTTCACAAGAGCAGGAAA |
| | | GTGATCGTGGTTGTGAGCCAGCACTTTATCCAGTCCAGGTGGTGCATC |
| | | TTTGAGTACGAGATCGCCCAGACCTGGCAGTTCCTGAGCAGCAGGGCC |
| | | GGCATCATCTTTATAGTGCTGCAGAAAGTTGAGAAGACCCTGCTGAGG |
| | | CAGCAGGTCGAGCTGTACAGGCTGCTCTCCAGGAACACCTACCTGGAG |
| | | TGGGAGGACTCCGTGCTCGGACGCCACATCTTTTGGAGGAGGCTGAGG |
| | | AAGGCCCTCCTGGACGGGAAAAGCTGGAACCCGGAGGGCACGGTGGGA |
| | | ACCGGGTGCAACTGGCAGGAGGCCACCAGCATC |
| 551 | TLR4ca- | ATGGCCGCCCCCGGGTCCGCCAGGCGGCCCCTCCTACTCCTCCTCTTG |
| | CO13 | CTCCTCCTACTCGGGCTAATGCATTGCGCCTCCGCCGCCATGCCCGTA |
| | | TTGAGCCTCAACATCACCTGCCAGATGAACAAGACGATCATCGGCGTT |
| | | AGCGTCCTCAGCGTTCTCGTAGTCTCCGTAGTCGCCGTCCTCGTCTAC |
| | | AAGTTCTATTTTCATTTGATGCTCCTGGCCGGCTGCATCAAATACGGC |
| | | AGGGGCGAAAACATCTACGACGCCTTCGTGATCTACTCCAGCCAGGAC |
| | | GAGGACTGGGTCCGCAATGAGCTGGTGAAGAACCTGGAGGAGGGGGTG |
| | | CCCCCCTTCCAGCTCTGCCTGCACTACCGTGACTTTATCCCCGGCGTG |
| | | GCCATCGCGGCCAACATCATACACGAGGGATTTCACAAGTCCCGCAAG |
| | | GTCATCGTGGTGGTGAGCCAACACTTCATCCAGTCGCGGTGGTGCATT |
| | | TTTGAGTACGAGATCGCCCAAACCTGGCAATTCCTGAGCTCCAGGGCC |
| | | GGGATCATCTTCATCGTGCTGCAGAAGGTCGAGAAGACCTTGCTGAGG |
| | | CAGCAGGTGGAGCTCTACAGGCTGCTCTCGAGGAACACCTACCTGGAG |
| | | TGGGAGGACAGCGTCCTGGGGCGGCACATCTTCTGGAGGAGGCTGAGG |
| | | AAGGCCCTGCTGGACGGCAAGAGCTGGAACCCCGAGGGCACCGTCGGC |
| | | ACCGGGTGTAACTGGCAGGAGGCCACCAGCATC |
| 552 | TLR4ca- | ATGGCCGCCCCCGGGAGCGCCCGTCGCCCCCTCCTCTTGCTACTCCTC |
| | CO14 | CTCTTGCTCCTGGGCCTCATGCATTGCGCGTCCGCGGCCATGCCCGTC |
| | | CTCAGCCTCAACATCACCTGCCAGATGAACAAAACGATCATCGGAGTA |
| | | AGCGTCCTCAGCGTCCTCGTCGTTTCCGTCGTGGCCGTACTCGTCTAC |
| | | AAATTCTACTTTCACCTTATGTTACTCGCCGGGTGCATCAAGTACGGA |
| | | AGGGGCGAGAACATCTACGACGCCTTCGTCATCTACAGCTCCCAGGAC |
| | | GAGGACTGGGTCCGCAACGAGCTGGTGAAGAACCTGGAAGAGGGCGTG |
| | | CCGCCCTTTCAGCTGTGCTTGCACTACCGGGACTTCATACCTGGCGTG |
| | | GCAATCGCCGCCAATATAATCCACGAGGGCTTCCACAAAAGCCGGAAG |
| | | GTGATCGTGGTGGTGAGCCAGCACTTTATCCAGTCCCGGTGGTGCATT |
| | | TTCGAGTACGAGATCGCGCAGACATGGCAGTTCCTGAGCAGCAGGGCC |
| | | GGCATCATCTTCATCGTGCTGCAGAAGGTCGAGAAGACGCTGCTGCGG |
| | | CAGCAGGTGGAGCTGTACCGGCTGCTGAGCCGGAACACCTACCTGGAG |
| | | TGGGAGGATAGCGTGCTCGGGCGGCACATCTTCTGGCGGCGTCTGAGG |
| | | AAGGCCCTCCTCGACGGCAAGAGCTGGAACCCGGAGGGCACGGTGGGC |
| | | ACAGGGTGCAACTGGCAAGAGGCCACGTCCATA |
| 553 | TLR4ca- | ATGGCCGCCCCCGGATCCGCCAGGCGGCCGTTACTACTCCTACTCCTC |
| | CO15 | CTCCTACTCCTCGGCCTAATGCATTGCGCGAGCGCCGCTATGCCCGTC |
| | | CTCAGCCTCAACATAACGTGTCAGATGAACAAGACGATCATCGGGGTC |
| | | AGCGTCCTCTCCGTCCTCGTCGTCTCCGTCGTCGCCGTTCTCGTCTAC |
| | | AAGTTCTACTTCCACCTCATGCTCCTCGCCGGCTGCATCAAGTACGGC |
| | | AGGGGCGAGAACATCTACGACGCTTTCGTCATCTACAGCAGCCAGGAC |
| | | GAGGACTGGGTCCGGAACGAGCTGGTGAAGAACCTGGAGGAGGGCGTC |
| | | CCGCCCTTCCAGCTGTGCCTCCACTATCGGGACTTCATCCCCGGCGTG |
| | | GCCATCGCCGCCAACATCATCCACGAGGGCTTTCACAAGAGCCGAAAG |
| | | GTGATCGTGGTGGTGTCCCAACACTTTATACAGAGCCGGTGGTGCATC |
| | | TTCGAGTACGAGATCGCCCAGACCTGGCAGTTCCTGTCCAGCCGCGCA |
| | | GGGATCATCTTCATCGTCCTGCAGAAGGTGGAGAAAACCCTGCTGCGG |
| | | CAGCAGGTGGAGCTGTACAGGCTGCTGTCCCGGAACACCTACCTGGAG |
| | | TGGGAGGATAGCGTGCTGGGGAGGCACATCTTTTGGAGGAGGCTGAGG |
| | | AAGGCCCTGCTGGACGGCAAAAGCTGGAACCCCGAGGGGACCGTGGGA |
| | | ACCGGCTGCAACTGGCAAGAGGCCACCAGCATC |
| 554 | TLR4ca- | ATGGCCGCCCCCGGCTCCGCCCGGCGCCCCCTCCTCCTCCTCTTGCTC |
| | CO16 | CTCCTACTCCTTGGCCTCATGCACTGCGCCAGCGCGGCCATGCCGGTC |
| | | CTCTCCTTGAACATAACCTGCCAGATGAATAAGACCATCATCGGCGTC |
| | | AGCGTCCTCAGCGTCCTCGTCGTCAGCGTCGTGGCGGTCCTCGTTTAC |
| | | AAATTCTACTTCCACCTCATGTTATTGGCCGGCTGCATAAAGTACGGG |
| | | AGGGGCGAGAACATATACGACGCCTTCGTCATCTACAGCTCCCAGGAC |
| | | GAGGACTGGGTCAGGAACGAGCTGGTGAAAAACCTGGAGGAGGGTGTG |
| | | CCACCGTTCCAGCTGTGCCTGCACTACCGGGACTTCATACCCGGCGTG |
| | | GCCATCGCCGCCAATATCATCCATGAGGGCTTCCACAAGTCCAGGAAG |
| | | GTGATCGTGGTGGTGAGCCAACACTTCATCCAGTCCCGGTGGTGTATC |
| | | TTCGAGTACGAGATCGCCCAGACCTGGCAGTTCCTGTCCAGCCGGGCC |
| | | GGCATCATCTTCATCGTGCTGCAGAAGGTCGAGAAGACCCTGCTGCGA |
| | | CAGCAGGTGGAGCTGTATCGCCTGCTCAGCAGGAATACATACCTGGAG |
| | | TGGGAGGACAGTGTGCTGGGCCGGCACATCTTCTGGAGAAGGCTCAGG |
| | | AAGGCCCTGCTGGACGGCAAATCGTGGAACCCCGAGGGCACCGTGGGC |
| | | ACTGGTTGTAACTGGCAGGAGGCCACCTCCATC |
| 555 | TLR4ca- | ATGGCCGCCCCCGGCAGCGCCAGGCGCCCCCTCCTTCTCCTCCTCCTA |
| | CO17 | TTGCTCTTGTTGGGCCTCATGCACTGCGCCAGCGCCGCGATGCCCGTC |
| | | CTCTCCTTGAACATCACCTGCCAGATGAACAAGACCATCATCGGGGTC |
| | | AGCGTCCTTTCCGTCCTCGTCGTTTCCGTTGTCGCCGTCCTGGTGTAC |
| | | AAGTTCTACTTCCATTTGATGCTACTCGCCGGCTGCATCAAGTACGGC |
| | | AGGGGAGAGAACATCTACGACGCCTTCGTGATCTACAGCTCGCAGGAC |
| | | GAGGACTGGGTCAGGAACGAGCTGGTGAAGAACCTGGAGGAGGGGGTG |
| | | CCCCCCTTCCAGCTGTGTCTACATTACAGGGACTTCATTCCGGGCGTC |
| | | GCCATCGCCGCCAACATCATCCACGAAGGCTTCCACAAGAGCCGAAAG |
| | | GTGATCGTGGTGGTGTCCCAGCATTTCATACAATCGCGCTGGTGCATA |
| | | TTTGAGTACGAGATTGCCCAGACCTGGCAGTTCCTAAGCAGCCGGGCG |
| | | GGGATCATCTTTATCGTGCTGCAGAAGGTCGAGAAGACCCTACTGAGA |
| | | CAGCAGGTGGAGCTGTACCGGCTGCTCTCGAGGAACACCTACCTGGAG |
| | | TGGGAGGACAGCGTGCTGGGGCGGCACATCTTCTGGAGGCGGCTGAGG |
| | | AAGGCCCTGCTGGATGGGAAAAGCTGGAACCCCGAGGGCACAGTGGGG |
| | | ACCGGCTGCAACTGGCAGGAGGCGACGAGCATC |
| 556 | TLR4ca- | ATGGCGGCCCCGGGCAGCGCCAGGAGGCCCCTCCTCCTCCTCCTCCTC |
| | CO18 | TTATTGCTCTTGGGCCTCATGCACTGCGCCAGCGCCGCCATGCCGGTC |
| | | CTCAGCCTAAATATCACCTGCCAGATGAATAAGACCATCATCGGGGTC |
| | | AGCGTCCTTAGCGTCCTCGTAGTCAGCGTCGTAGCGGTCCTTGTCTAC |
| | | AAGTTTTACTTTCACCTCATGCTCTTAGCCGGCTGCATCAAGTACGGC |
| | | CGGGGGGAGAACATCTACGACGCCTTCGTTATCTACTCCAGCCAAGAC |
| | | GAGGATTGGGTTCGTAACGAGCTGGTGAAGAACCTGGAGGAGGGCGTG |
| | | CCCCCCTTCCAGCTGTGCCTGCACTACCGGGACTTTATCCCCGGCGTG |
| | | GCCATCGCCGCCAACATCATCCATGAGGGCTTCCACAAAAGCCGCAAG |
| | | GTGATAGTGGTGGTGAGCCAGCACTTTATCCAGTCCAGGTGGTGTATC |
| | | TTCGAGTACGAGATCGCCCAGACCTGGCAGTTCCTGAGCTCCAGGGCC |
| | | GGAATCATCTTCATTGTGCTGCAGAAGGTGGAGAAAACCCTCCTCCGC |
| | | CAACAGGTCGAGCTGTACAGGCTGCTGTCCCGCAATACCTATCTGGAG |
| | | TGGGAAGACAGCGTCCTCGGGCGGCACATCTTCTGGCGCCGCCTGCGG |
| | | AAGGCCCTGCTGGATGGCAAGAGCTGGAACCCCGAAGGAACCGTCGGC |
| | | ACGGGTTGCAACTGGCAAGAGGCCACCTCCATC |
| 557 | TLR4ca- | ATGGCCGCCCCCGGGTCCGCGAGGCGGCCACTCCTCCTCCTCTTGCTC |
| | CO19 | CTCCTCCTTCTCGGCCTCATGCACTGTGCGAGCGCCGCCATGCCGGTC |
| | | CTCAGCCTTAACATCACCTGCCAGATGAACAAGACCATAATCGGGGTC |
| | | AGCGTCCTCTCCGTTCTCGTCGTCTCGGTAGTCGCCGTCTTAGTCTAC |
| | | AAGTTCTATTTCCACCTCATGCTTCTCGCGGGCTGCATCAAGTACGGC |
| | | AGGGGGGAGAACATCTACGACGCCTTCGTCATCTACTCCAGCCAGGAC |
| | | GAGGACTGGGTCCGGAACGAACTGGTGAAGAACCTGGAGGAGGGCGTG |
| | | CCCCCCTTCCAGCTGTGCCTGCACTACCGGGACTTCATCCCCGGAGTG |
| | | GCCATCGCCGCCAACATCATCCATGAGGGATTTCACAAGTCCCGGAAA |
| | | GTGATCGTGGTGGTGAGCCAGCACTTCATCCAGAGCAGGTGGTGCATC |
| | | TTTGAGTATGAGATCGCTCAGACCTGGCAGTTCCTGTCCTCCCGGGCC |
| | | GGAATAATTTTCATCGTTCTGCAGAAGGTGGAAAAGACCCTGCTGAGA |
| | | CAGCAGGTGGAGCTCTACAGGCTGCTCAGCAGGAACACCTACCTGGAG |
| | | TGGGAGGACTCCGTACTGGGGCGGCACATCTTCTGGCGGCGCCTGAGG |
| | | AAGGCCCTTCTCGACGGCAAGAGCTGGAACCCCGAGGGTACCGTCGGC |
| | | ACCGGATGCAACTGGCAGGAGGCCACCAGTATC |
| 558 | TLR4ca- | ATGGCCGCCCCCGGCAGCGCGCGGCGTCCCCTCCTCCTCCTCCTCCTA |
| | CO20 | CTCCTCCTCCTCGGGCTCATGCATTGCGCCTCCGCCGCCATGCCGGTC |
| | | CTCAGCCTCAACATCACCTGCCAGATGAACAAGACCATCATCGGCGTT |
| | | AGCGTCCTCAGCGTCCTGGTGGTGTCCGTCGTCGCCGTTCTCGTCTAC |
| | | AAGTTCTACTTTCACCTCATGCTCCTCGCCGGGTGCATCAAGTACGGC |
| | | AGGGGCGAAAACATCTACGACGCCTTCGTCATCTACTCCAGCCAGGAC |
| | | GAGGACTGGGTCCGTAACGAGCTCGTAAAGAACCTGGAGGAGGGCGTG |
| | | CCTCCCTTCCAGCTGTGCCTGCACTACAGGGACTTCATCCCAGGGGTG |
| | | GCCATCGCCGCCAACATTATCCACGAGGGCTTCCACAAGAGCAGGAAA |
| | | GTGATCGTGGTGGTGAGCCAGCACTTCATCCAGTCCCGGTGGTGCATC |
| | | TTCGAATATGAGATCGCCCAGACCTGGCAGTTTCTGTCCTCCCGGGCC |
| | | GGCATCATTTTCATCGTGCTTCAGAAGGTCGAAAAGACCCTGCTGAGG |
| | | CAACAGGTGGAACTCTATAGGCTCCTGAGCCGTAACACCTACCTCGAA |
| | | TGGGAGGACAGCGTGCTGGGCCGCCACATCTTCTGGAGGAGGCTGAGG |
| | | AAGGCCCTGCTGGACGGCAAGAGCTGGAACCCCGAGGGCACCGTGGGT |
| | | ACCGGGTGCAACTGGCAGGAGGCCACCAGCATA |
| 559 | TLR4ca- | ATGGCCGCGCCGGGCTCCGCCAGGAGGCCCCTCCTCCTACTCCTCTTG |
| | CO21 | CTCCTACTCCTCGGCCTCATGCACTGCGCGTCCGCGGCGATGCCCGTC |
| | | CTCAGCCTCAACATTACCTGCCAAATGAACAAAACCATCATAGGCGTC |
| | | AGCGTCCTCTCCGTCCTCGTAGTCAGCGTCGTCGCCGTTCTCGTCTAC |
| | | AAGTTCTACTTCCACTTGATGCTACTCGCCGGCTGTATAAAGTACGGC |
| | | CGGGGGGAGAACATCTACGACGCCTTCGTCATCTACAGCTCGCAGGAC |
| | | GAGGACTGGGTCCGGAACGAGCTGGTGAAAAACCTGGAAGAGGGCGTT |
| | | CCCCCATTCCAGCTGTGCCTGCACTACCGGGACTTTATCCCGGGGGTG |
| | | GCCATCGCCGCCAATATCATCCATGAGGGCTTCCACAAGAGCCGGAAG |
| | | GTGATCGTCGTCGTCAGCCAACACTTCATCCAGTCCAGGTGGTGCATC |
| | | TTCGAGTACGAGATCGCCCAGACCTGGCAGTTCCTGTCCTCCCGCGCC |
| | | GGCATCATCTTCATCGTGCTGCAGAAGGTCGAGAAGACCCTGCTGCGG |
| | | CAGCAGGTGGAGCTGTATCGCCTGCTCTCCCGAAACACTTACCTCGAG |
| | | TGGGAGGATAGCGTGCTCGGCCGGCACATCTTCTGGAGGAGGCTGAGG |
| | | AAGGCTCTCCTGGACGGCAAGAGCTGGAACCCCGAGGGAACCGTGGGC |
| | | ACCGGGTGCAACTGGCAAGAGGCCACCAGCATC |
| 560 | TLR4ca- | ATGGCCGCCCCCGGCAGCGCCCGGAGGCCCCTCCTCCTCCTCCTTCTC |
| | CO22 | CTACTCTTGCTCGGGCTCATGCATTGCGCCTCCGCCGCCATGCCCGTA |
| | | TTGTCCCTCAACATCACGTGCCAGATGAACAAGACTATCATCGGCGTT |
| | | AGCGTACTCAGCGTCCTCGTTGTCAGCGTCGTCGCCGTACTCGTCTAT |
| | | AAGTTTTACTTCCACCTTATGCTCCTCGCCGGCTGCATCAAGTACGGC |
| | | AGGGGCGAGAACATCTACGACGCCTTCGTGATCTACAGCAGCCAGGAC |
| | | GAGGACTGGGTTAGGAACGAGCTGGTGAAGAACCTGGAGGAGGGCGTG |
| | | CCCCCCTTTCAGCTGTGCCTCCACTATAGGGACTTCATCCCCGGGGTG |
| | | GCCATCGCCGCCAACATCATACATGAGGGGTTCCACAAGAGCAGGAAG |
| | | GTGATCGTGGTGGTCAGCCAGCACTTCATCCAGAGCAGATGGTGCATA |
| | | TTCGAGTACGAGATCGCCCAGACCTGGCAGTTCCTGAGCAGCAGGGCC |
| | | GGCATCATCTTCATTGTGCTGCAGAAGGTAGAAAAGACGCTGCTCAGG |
| | | CAGCAAGTGGAGCTGTACCGGCTCCTGAGCAGGAACACCTACCTGGAG |
| | | TGGGAGGACAGCGTGCTGGGCCGGCACATCTTCTGGCGACGGCTGAGG |
| | | AAGGCCCTGCTGGACGGCAAGTCCTGGAACCCCGAGGGCACCGTGGGG |
| | | ACCGGCTGTAACTGGCAGGAGGCTACTAGCATC |
| 561 | TLR4ca- | ATGGCGGCCCCCGGCAGCGCGCGCCGGCCCCTCCTCCTCTTGTTACTC |
| | CO23 | TTGTTGCTCCTCGGTCTAATGCACTGCGCCAGCGCCGCCATGCCCGTC |
| | | CTCAGCCTTAACATCACGTGCCAAATGAACAAGACTATCATCGGGGTC |
| | | AGCGTCCTCTCCGTACTTGTAGTTAGCGTTGTCGCCGTCTTAGTCTAC |
| | | AAGTTCTACTTCCACCTCATGCTCCTGGCCGGCTGCATAAAGTACGGT |
| | | AGGGGCGAGAATATATACGACGCCTTCGTGATCTACTCCAGCCAGGAC |
| | | GAGGACTGGGTCAGGAACGAGTTAGTGAAAAACCTGGAGGAGGGGGTG |
| | | CCCCCCTTCCAGCTGTGCCTGCACTACCGGGACTTCATCCCGGGCGTG |
| | | GCCATCGCCGCCAACATCATCCACGAGGGCTTCCACAAAAGCCGGAAG |
| | | GTGATAGTGGTGGTGAGCCAGCACTTCATCCAGTCCAGGTGGTGCATA |
| | | TTCGAGTACGAGATCGCCCAGACCTGGCAGTTCCTGTCCAGTAGGGCC |
| | | GGCATCATCTTCATTGTGCTCCAGAAGGTGGAGAAGACCCTGCTGCGG |
| | | CAGCAGGTCGAGCTGTACCGGCTGCTGTCCCGCAACACCTACCTGGAA |
| | | TGGGAAGACAGCGTGCTGGGCCGGCACATCTTCTGGAGGCGGCTGAGG |
| | | AAGGCCCTGCTGGACGGCAAGTCATGGAACCCCGAGGGCACCGTGGGC |
| | | ACCGGCTGCAACTGGCAGGAGGCCACCAGCATC |
| 562 | TLR4ca- | ATGGCCGCCCCCGGCAGCGCCCGCCGTCCACTCTTGCTCCTCCTCCTT |
| | CO24 | CTCCTCCTCCTTGGGCTCATGCATTGTGCCAGCGCGGCCATGCCAGTC |
| | | CTCAGCCTCAATATCACCTGTCAGATGAACAAGACGATCATCGGCGTC |
| | | AGCGTCCTTAGCGTACTCGTCGTCTCAGTGGTCGCCGTCCTTGTCTAT |
| | | AAGTTTTATTTCCACCTCATGCTACTCGCCGGCTGTATCAAGTACGGC |
| | | CGGGGCGAGAACATCTACGACGCCTTCGTCATCTACAGCTCTCAGGAC |
| | | GAGGACTGGGTAAGGAATGAGCTGGTGAAGAACCTGGAGGAAGGGGTG |
| | | CCACCCTTCCAGCTGTGCCTGCACTACCGGGACTTCATCCCCGGGGTG |
| | | GCCATCGCCGCCAACATCATCCACGAAGGGTTCCACAAGAGCAGGAAG |
| | | GTGATAGTGGTGGTCAGCCAGCACTTCATCCAAAGCAGGTGGTGCATC |
| | | TTCGAGTACGAGATCGCCCAGACCTGGCAGTTCCTTAGCAGCAGGGCC |
| | | GGGATCATCTTCATCGTGCTGCAGAAGGTGGAGAAGACGCTCCTGAGG |
| | | CAGCAAGTGGAGCTGTACAGGCTGCTGTCAAGGAACACCTACCTGGAG |
| | | TGGGAGGACAGCGTGCTGGGCAGGCACATCTTTTGGCGGAGACTGAGG |
| | | AAGGCCCTCCTGGACGGCAAGTCCTGGAACCCGGAGGGGACCGTGGGG |
| | | ACGGGCTGCAACTGGCAGGAGGCCACCTCCATA |
| 563 | TLR4ca- | ATGGCCGCGCCCGGCAGCGCCAGGCGCCCCCTCCTCCTCCTATTACTC |
| | CO25 | CTACTCCTCCTCGGCCTCATGCACTGCGCCTCGGCCGCCATGCCCGTC |
| | | CTCTCCCTCAACATCACGTGCCAGATGAATAAGACCATCATCGGCGTC |
| | | AGCGTCCTATCCGTCCTCGTCGTAAGCGTCGTTGCCGTACTCGTCTAC |
| | | AAGTTCTATTTTCACCTAATGCTTCTCGCCGGGTGCATCAAGTACGGG |
| | | AGGGGCGAGAACATCTACGACGCCTTCGTCATCTACTCGAGCCAGGAC |
| | | GAGGACTGGGTCCGGAACGAGCTGGTGAAGAACCTGGAGGAGGGCGTG |
| | | CCCCCCTTCCAGCTCTGCCTGCACTACCGGGATTTTATCCCCGGCGTG |
| | | GCCATCGCCGCCAACATCATCCATGAGGGCTTCCATAAGTCCAGGAAG |
| | | GTGATCGTGGTCGTGTCCCAGCACTTTATCCAGAGCAGGTGGTGCATC |
| | | TTCGAGTACGAGATCGCCCAAACCTGGCAGTTTCTGAGCTCCCGGGCC |
| | | GGCATCATCTTCATCGTACTGCAGAAGGTGGAGAAGACCCTGCTCAGG |
| | | CAGCAGGTGGAGCTGTACCGCCTGCTCTCCAGGAACACCTACCTGGAG |
| | | TGGGAGGACAGCGTCCTGGGAAGGCACATCTTCTGGCGGCGGCTCCGT |
| | | AAGGCCCTGCTGGATGGAAAGAGCTGGAACCCCGAGGGCACCGTGGGG |
| | | ACCGGCTGCAACTGGCAGGAGGCGACCTCCATC |

[1572] The sequence-optimized TLR4 polynucleotide sequences disclosed herein are distinct from the corresponding wild type TLR4 nucleotide acid sequences and from other known sequence-optimized nucleotide sequences, e.g., these sequence-optimized nucleic acids have unique compositional characteristics. See FIGS. 89A to 90.

[1573] In some embodiments, the percentage of uracil or thymine nucleobases in a sequence-optimized TLR4 polynucleotide sequence (e.g., encoding a TLR4, e.g., caTLR4, polypeptide, a functional fragment, or a variant thereof) is modified (e.g., reduced) with respect to the percentage of uracil or thymine nucleobases in the reference wild-type nucleotide sequence. Such a sequence is referred to as a uracil-modified or thymine-modified sequence. The percentage of uracil or thymine content in a nucleotide sequence can be determined by dividing the number of uracils or thymines in a sequence by the total number of nucleotides and multiplying by 100.

[1574] In some embodiments, the sequence-optimized TLR4 polynucleotide sequence has a lower uracil or thymine content than the uracil or thymine content in the reference wild-type sequence. In some embodiments, the uracil or thymine content in a sequence-optimized nucleotide sequence is greater than the uracil or thymine content in the reference wild-type sequence and still maintain beneficial effects, e.g., increased expression and/or reduced TLR response when compared to the reference wild-type sequence.

[1575] The uracil or thymine content of wild-type caTLR4 is about 26%. In some embodiments, the uracil or thymine content of a uracil- or thymine-modified sequence encoding a caTLR4 polypeptide is less than 25%. In some embodiments, the uracil or thymine content of a uracil- or thymine-modified sequence encoding a caTLR4 polypeptide disclosed herein is less than 25%, less than 24%, less than 23%, less than 22%, less than 21%, less than 20%, less than 19%, less that 18%, less than 17%, or less than 16%. In some embodiments, the uracil or thymine content is not less than 18%, 17%, or 16. The uracil or thymine content of a sequence disclosed herein, i.e., its total uracil or thymine content is abbreviated herein as % U_{TL} or % T_{TL}.

[1576] In some embodiments, the uracil or thymine content (% U_{TL} or % T_{TL}) of a uracil-or thymine-modified sequence encoding a caTLR4 polypeptide disclosed herein is between 16% and 25%, between 16% and 24%, between 17% and 24%, between 17% and 23%, between 18% and 23%, between 18% and 22%, between 19% and 22%, between 19% and 21%, between 19% and 21%, between 19% and 20%, or between 19% and 20%.

[1577] In some embodiments, the uracil or thymine content (% U_{TL} or % T_{TL}) of a uracil-or thymine-modified sequence encoding a caTLR4 polypeptide disclosed herein is between 17% and 23%, between 17% and 22%, between 16% and 23%, between 16% and 22%, between 16% and 21%, between 17% and 21%, between 18% and 21%, between 18% and 20%, between 18% and 19%, between or between 19% and 20%.

[1578] In a particular embodiment, the uracil or thymine content (% U_{TL} or % T_{TL}) of a uracil- or thymine modified sequence encoding a caTLR4 polypeptide disclosed herein is between about 18% and about 21% or 19% and 20%.

[1579] A uracil- or thymine-modified sequence encoding a caTLR4 polypeptide disclosed herein can also be described according to its uracil or thymine content relative to the uracil or thymine content in the corresponding wild-type nucleic acid sequence (% U_{WT} or % T_{WT}), or according to its uracil or thymine content relative to the theoretical minimum uracil or thymine content of a nucleic acid encoding the wild-type protein sequence (% Um or (% T_{TM}).

[1580] The phrases “uracil or thymine content relative to the uracil or thymine content in the wild type nucleic acid sequence,” refers to a parameter determined by dividing the number of uracils or thymines in a sequence-optimized nucleic acid by the total number of uracils or thymines in the corresponding wild-type nucleic acid sequence and multiplying by 100. This parameter is abbreviated herein as % U_{WT} or % T_{WT}.

[1581] In some embodiments, the % U_{WT} or % T_{WT} of a uracil- or thymine-modified sequence encoding a caTLR4 polypeptide disclosed herein is above 50%, above 55%, above 60%, above 65%, above 70%, above 75%, above 80%, above 85%, above 90%, or above 95%.

[1582] In some embodiments, the % U_{WT} or % T_{WT} of a uracil- or thymine modified sequence encoding a caTLR4 polypeptide disclosed herein is between 60% and 88%, between 61% and 87%, between 62% and 86%, between 63% and 85%, between 64% and 84%, between 65% and 83%, between 66% and 82%, between 67% and 81%, between 68% and 80%, between 69% and 79%, or between 70% and 78%.

[1583] In some embodiments, the % U_{WT} or % T_{WT} of a uracil- or thymine-modified sequence encoding a caTLR4 polypeptide disclosed herein is between 68% and 79%, between 68% and 80%, between 68% and 81%, between 68% and 77%, between 69% and 77%, between 69% and 78%, between 69% and 79%, between 69% and 80%, between 69% and 81%, between 70% and 76%, between 70% and 77%, between 70% and 78%, or between 70% and 79.

[1584] In a particular embodiment, the % U_{WT} or % T_{WT} of a uracil- or thymine-modified sequence encoding a caTLR4 polypeptide disclosed herein is between about 70% and about 78%, e.g., between 70% and 77%.

[1585] For DNA it is recognized that thymine is present instead of uracil, and one would substitute T where U appears. Thus, all the disclosures related to, e.g., % U_{TM}, % U_{WT}, or % U_{TL}, with respect to RNA are equally applicable to % T_{TM}, % T_{WT}, or % T_{TL} with respect to DNA.

[1586] In some embodiments, the % U_{TM} of a uracil-modified sequence encoding a caTLR4 polypeptide disclosed herein is below 300%, below 295%, below 290%, below 285%, below 280%, below 275%, below 270%, below 265%, below 260%, below 255%, below 250%, below 245%, below 240%, below 235%, below 230%, below 225%, below 220%, below 215%, below 200%, below 195%, below 190%, below 185%, below 180%, below 175%, below 170%, below 165%, below 160%, below 155%, below 150%, below 145%, below 140%, below 139%, below 138%, below 137%, below 136%, below 135%, below 134%, below 133%, below 132%, below 131%, below 130%, below 129%, below 128%, below 127%, below 126%, below 125%, below 124%, below 123%, below 122%, below 121%, below 120%, below 119%, below 118%, below 117%, below 116%, or below 115%.

[1587] In some embodiments, the % U_{TM} of a uracil-modified sequence encoding a caTLR4 polypeptide disclosed herein is above 100%, above 101%, above 102%, above 103%, above 104%, above 105%, above 106%, above 107%, above 108%, above 109%, above 110%, above 111%, above 112%, above 113%, above 114%, above 115%, above 116%, above 117%, above 118%, above 119%, above 120%, above 121%, above 122%, above 123%, above 124%, above 125%, or above 126%, above 127%, above 128%, above 129%, or above 130%.

[1588] In some embodiments, the % U_{TM} of a uracil-modified sequence encoding a caTLR4 polypeptide disclosed herein is between 122% and 124%, between 121% and 125%, between 120% and 126%, between 119% and 127%, between 118% and 128%, between 117% and 129%, between 116% and 130%, between 115% and 131%, between 114% and 132%, between 113% and 133%, between 112% and 134%, between 111% and 135%, or between 110% and 136%.

[1589] In some embodiments, the % U_{TM} of a uracil-modified sequence encoding a caTLR4 polypeptide disclosed herein is between about 115% and about 129%, e.g., between 116% and 128%.

[1590] In some embodiments, a uracil-modified sequence encoding a TLR4 polypeptide, e.g., caTLR4, disclosed herein has a reduced number of consecutive uracils with respect to the corresponding wild-type nucleic acid sequence. For example, two consecutive leucines can be encoded by the sequence CUUUUG, which includes a four uracil cluster. Such a subsequence can be substituted, e.g., with CUGCUC, which removes the uracil cluster.

[1591] As discussed above, the number of phenylalanines in a sequence establishes a minimum number of uracil pairs (UU) that cannot be eliminated without altering the number of phenylalanines in the encoded polypeptide.

[1592] Wild type caTLR4 contains 23 uracil pairs (UU), and 8 uracil triplets (UUU). In some embodiments, a uracil-modified sequence encoding a caTLR4 polypeptide disclosed herein has a reduced number of uracil triplets (UUU) with respect to the wild-type nucleic acid sequence. In some embodiments, a uracil-modified sequence encoding a caTLR4 polypeptide disclosed herein contains 8, 7, 6, 5, 4, 3, 2, 1 or no uracil triplets (UUU).

[1593] In some embodiments, a uracil-modified sequence encoding a TLR4 polypeptide, e.g., caTLR4, has a reduced number of uracil pairs (UU) with respect to the number of uracil pairs (UU) in the wild-type nucleic acid sequence. In some embodiments, a uracil-modified sequence encoding a TLR4 polypeptide, e.g., caTLR4, disclosed herein has a number of uracil pairs (UU) corresponding to the minimum possible number of uracil pairs (UU) in the wild-type nucleic acid sequence, e.g., 11 uracil pairs in the case of wild type caTLR4.

[1594] In some embodiments, a uracil-modified sequence encoding a TLR4 polypeptide, e.g., caTLR4, disclosed herein has at least 1, 2, 3, 4, 5, 6, 7, 8, 9, 10, 11, 12, or 13 uracil pairs (UU) less than the number of uracil pairs (UU) in the wild-type nucleic acid sequence. In some embodiments, a uracil-modified sequence encoding a caTLR4 polypeptide disclosed herein has between 10 and 22 uracil pairs (UU).

[1595] In some embodiments, a uracil-modified sequence encoding a TLR4 polypeptide, e.g., caTLR4, disclosed herein has a % UU_{wt} less than 99%, less than 95%, less than 90%, less than 85%, less than 80%, less than 75%, less than 70%, less than 65%, less than 60%, less than 65%, less than 60%, less than 55%, less than 50%, less than 40%, less than 30%, or less than 20%.

[1596] In some embodiments, a uracil-modified sequence encoding a TLR4 polypeptide, e.g., caTLR4, has a % UU_{wt} between 99% and 38%. In a particular embodiment, a uracil-modified sequence encoding a TLR4 polypeptide, e.g., caTLR4, disclosed herein has a % UU_{wt} between 43% and 96%.

[1597] In some embodiments, the TLR4 polynucleotide comprises a uracil-modified sequence encoding a TLR4 polypeptide, e.g., caTLR4, disclosed herein. In some embodiments, the uracil-modified sequence encoding a TLR4 polypeptide, e.g., caTLR4, comprises at least one chemically modified nucleobase, e.g., 5-methoxyuracil. In some embodiments, at least 95% of a nucleobase (e.g., uracil) in a uracil-modified sequence encoding a TLR4 polypeptide, e.g., caTLR4, are modified nucleobases. In some embodiments, at least 95% of uracil in a uracil-modified sequence encoding a TLR4 polypeptide, e.g., caTLR4, is 5-methoxyuracil. In some embodiments, the polynucleotide comprising a uracil-modified sequence further comprises a miRNA binding site, e.g., a miRNA binding site that binds to miR142 or miR122. In some embodiments, the polynucleotide comprising a uracil-modified sequence is formulated with a delivery agent, e.g., a compound having Formula (I), e.g., any of Compounds 1-147.

[1598] In some embodiments, the “guanine content of the sequence optimized ORF encoding TLR4, e.g., caTLR4, with respect to the theoretical maximum guanine content of a nucleotide sequence encoding the TLR4 polypeptide, e.g., caTLR4,” abbreviated as % G_{TMX} is at least 69%, at least 70%, at least 75%, at least about 80%, at least about 85%, at least about 90%, at least about 95%, or about 100%. In some embodiments, the % G_{TMX} is between about 70% and about 80%, between about 71% and about 79%, between about 71% and about 78%, or between about 71% and about 77%.

[1599] In some embodiments, the “cytosine content of the ORF relative to the theoretical maximum cytosine content of a nucleotide sequence encoding the TLR4 polypeptide, e.g., caTLR4,” abbreviated as % C_{TMX}, is at least 59%, at least 60%, at least about 65%, at least about 70%, at least about 75%, at least about 80%, at least about 85%, at least about 90%, at least about 95%, or about 100%. In some embodiments, the % C_{TMX} is between about 60% and about 80%, between about 62% and about 80%, between about 63% and about 79%, or between about 68% and about 76%.

[1600] In some embodiments, the “guanine and cytosine content (G/C) of the ORF relative to the theoretical maximum G/C content in a nucleotide sequence encoding the TLR4 polypeptide, e.g., caTLR4,” abbreviated as % G/C_{TMX} is at least about 81%, at least about 85%, at least about 90%, at least about 95%, or about 100%. The % G/C_{TMX} is between about 80% and about 100%, between about 85% and about 99%, between about 90% and about 97%, or between about 91% and about 96%.

[1601] In some embodiments, the “G/C content in the ORF relative to the G/C content in the corresponding wild-type ORF,” abbreviated as % G/C_{WT} is at least 102%, at least 103%, at least 104%, at least 105%, at least 106%, at least 107%, at least 110%, at least 115%, or at least 120%.

[1602] In some embodiments, the average G/C content in the 3rd codon position in the ORF is at least 20%, at least 21%, at least 22%, at least 23%, at least 24%, at least 25%, at least 26%, at least 27%, at least 28%, at least 29%, or at least 30% higher than the average G/C content in the 3rd codon position in the corresponding wild-type ORF.

[1603] In some embodiments, the TLR4 polynucleotide comprises an open reading frame (ORF) encoding a TLR4 polypeptide, e.g., caTLR4, wherein the ORF has been sequence optimized, and wherein each of % U_{TL}, % U_{WT}, % UM, % G_{TL}, % G_{WT}, % G_{TMX}, % C_{TL}, % C_{WT}, % C_{TMX}, % G/C_{TL}, % G/C_{WT}, or % G/C_{TMX}, alone or in a combination thereof is in a range between (i) a maximum corresponding to the parameter's maximum value (MAX) plus about 0.5, 1, 1.5, 2, 2.5, 3, 3.5, 4, 4.5, 5, 5.5, 6, 6.5, 7, 7.5, 8, 8.5, 9, 9.5, or 10 standard deviations (STD DEV), and (ii) a minimum corresponding to the parameter's minimum value (MIN) less 0.5, 1, 1.5, 2, 2.5, 3, 3.5, 4, 4.5, 5, 5.5, 6, 6.5, 7, 7.5, 8, 8.5, 9, 9.5, or 10 standard deviations (STD DEV).

[1604] In some embodiments, the TLR4 polynucleotide (e.g., a RNA, e.g., a mRNA) comprises a nucleotide sequence (e.g., an ORF) encoding a TLR4 polypeptide, e.g., caTLR4, wherein the TLR4 polypeptide comprises an amino acid sequence at least 70%, at least 75%, at least 80%, at least 85%, at least 90%, at least 95%, at least 96%, at least 97%, at least 98%, at least 99%, or 100% identical to amino acids 30 to 251 of SEQ ID NO: 525.

[1605] In some embodiments, the TLR4 polynucleotide (e.g., a RNA, e.g., a mRNA) comprises a nucleotide sequence (e.g., an ORF) encoding a TLR4 polypeptide, e.g., caTLR4, wherein the TLR4 polypeptide comprises an amino acid sequence at least 60%, at least 65%, at least 70%, at least 75%, at least 80%, at least 85%, at least 90%, at least 95%, at least 96%, at least 97%, at least 98%, at least 99%, or 100% identical to SEQ ID NO: 525.

[1606] In some embodiments, the TLR4 polynucleotide (e.g., a RNA, e.g., a mRNA) comprises a nucleotide sequence (e.g., an ORF) encoding a caTLR4 polypeptide, wherein the nucleotide sequence has 85% to 100%, 90% to 100%, 95% to 100%, 80% to 95%, 85% to 95%, 85% to 90%, 90% to 95%, or 95% to 100% sequence identity to amino acids 30 to 251 of SEQ ID NO: 541.

[1607] In some embodiments, the TLR4 polynucleotide (e.g., a RNA, e.g., a mRNA) comprises a nucleotide sequence (e.g., an ORF) encoding a caTLR4 polypeptide, wherein the nucleotide sequence has 60% to 100%, 65% to 100%, 70% to 100%, 75% to 100%, 80% to 100%, 85% to 100%, 90% to 100%, 95% to 100%, 80% to 95%, 85% to 95%, 85% to 90%, 90% to 95%, or 95% to 100% sequence identity to SEQ ID NO: 541.

[1608] In some embodiments, the TLR4 polynucleotide (e.g., a RNA, e.g., a mRNA) comprises a nucleotide sequence (e.g., an ORF) encoding a caTLR4 polypeptide, wherein the nucleotide sequence has at least 86%, at least 87%, at least 88%, at least 89%, at least 90%, at least 91%, at least 92%, at least 93%, at least 94%, at least 95%, at least 96%, at least 97%, at least 98%, at least 99%, or 100% sequence identity to amino acids 30 to 251 of SEQ ID NO: 539 or 549.

[1609] In some embodiments, the TLR4 polynucleotide (e.g., a RNA, e.g., a mRNA) comprises a nucleotide sequence (e.g., an ORF) encoding a caTLR4 polypeptide, wherein the nucleotide sequence has at least 80%, at least 85%, at least 86%, at least 87%, at least 88%, at least 89%, at least 90%, at least 91%, at least 92%, at least 93%, at least 94%, at least 95%, at least 96%, at least 97%, at least 98%, at least 99%, or 100% sequence identity to SEQ ID NO: 539 or 549.

[1610] In some embodiments, the TLR4 polynucleotide (e.g., a RNA, e.g., a mRNA) comprises a nucleotide sequence (e.g., an ORF) encoding a caTLR4 polypeptide, wherein the nucleotide sequence has 86% to 100%, 90% to 100%, 86% to 95%, 86% to 90%, 90% to 95%, or 95% to 100% sequence identity to amino acids 30 to 251 of SEQ ID NO: 539 or 549.

[1611] In some embodiments, the TLR4 polynucleotide (e.g., a RNA, e.g., a mRNA) comprises a nucleotide sequence (e.g., an ORF) encoding a caTLR4 polypeptide, wherein the nucleotide sequence has 80% to 100%, 85% to 100%, 86% to 100%, 90% to 100%, 86% to 95%, 86% to 90%, 90% to 95%, or 95% to 100% sequence identity to SEQ ID NO: 539 or 549.

[1612] In some embodiments, the TLR4 polynucleotide (e.g., a RNA, e.g., a mRNA) comprises a nucleotide sequence (e.g., an ORF) encoding a caTLR4 polypeptide, wherein the nucleotide sequence has at least 87%, at least 88%, at least 89%, at least 90%, at least 91%, at least 92%, at least 93%, at least 94%, at least 95%, at least 96%, at least 97%, at least 98%, at least 99%, or 100% sequence identity to amino acids 30 to 251 of a sequence selected from the group consisting of SEQ ID NOs: 552, 554, and 556.

[1613] In some embodiments, the TLR4 polynucleotide (e.g., a RNA, e.g., a mRNA) comprises a nucleotide sequence (e.g., an ORF) encoding a caTLR4 polypeptide, wherein the nucleotide sequence has at least 80%, at least 85%, at least 87%, at least 88%, at least 89%, at least 90%, at least 91%, at least 92%, at least 93%, at least 94%, at least 95%, at least 96%, at least 97%, at least 98%, at least 99%, or 100% sequence identity to a sequence selected from the group consisting of SEQ ID NOs: 552, 554, and 556.

[1614] In some embodiments, the TLR4 polynucleotide (e.g., a RNA, e.g., a mRNA) comprises a nucleotide sequence (e.g., an ORF) encoding a caTLR4 polypeptide, wherein the nucleotide sequence has 87% to 100%, 90% to 100%, 87% to 95%, 87% to 90%, 90% to 95%, or 95% to 100% sequence identity to amino acids 30 to 251 of a sequence selected from the group consisting of SEQ ID NOs: 552, 554, and 556.

[1615] In some embodiments, the TLR4 polynucleotide (e.g., a RNA, e.g., a mRNA) comprises a nucleotide sequence (e.g., an ORF) encoding a caTLR4 polypeptide, wherein the nucleotide sequence has 80% to 100%, 85% to 100%, 87% to 100%, 90% to 100%, 87% to 95%, 87% to 90%, 90% to 95%, or 95% to 100% sequence identity to SEQ ID NOs: 552, 554, and 556.

[1616] In some embodiments, the TLR4 polynucleotide (e.g., a RNA, e.g., a mRNA) comprises a nucleotide sequence (e.g., an ORF) encoding a caTLR4 polypeptide, wherein the nucleotide sequence has at least 88%, at least 89%, at least 90%, at least 91%, at least 92%, at least 93%, at least 94%, at least 95%, at least 96%, at least 97%, at least 98%, at least 99%, or 100% sequence identity to amino acids 30 to 251 of a sequence selected from the group consisting of SEQ ID NOs: 542, 543, 555, 557, 559, and 563.

[1617] In some embodiments, the TLR4 polynucleotide (e.g., a RNA, e.g., a mRNA) comprises a nucleotide sequence (e.g., an ORF) encoding a caTLR4 polypeptide, wherein the nucleotide sequence has at least 80%, at least 85%, at least 88%, at least 89%, at least 90%, at least 91%, at least 92%, at least 93%, at least 94%, at least 95%, at least 96%, at least 97%, at least 98%, at least 99%, or 100% sequence identity to a sequence selected from the group consisting of SEQ ID NOs: 542, 543, 555, 557, 559, and 563.

[1618] In some embodiments, the TLR4 polynucleotide (e.g., a RNA, e.g., a mRNA) comprises a nucleotide sequence (e.g., an ORF) encoding a caTLR4 polypeptide, wherein the nucleotide sequence has 88% to 100%, 90% to 100%, 88% to 95%, 88% to 90%, 90% to 95%, or 95% to 100% sequence identity to amino acids 30 to 251 of a sequence selected from the group consisting of SEQ ID NOs: 542, 543, 555, 557, 559, and 563.

[1619] In some embodiments, the TLR4 polynucleotide (e.g., a RNA, e.g., a mRNA) comprises a nucleotide sequence (e.g., an ORF) encoding a caTLR4 polypeptide, wherein the nucleotide sequence has 80% to 100%, 85% to 100%, 88% to 100%, 90% to 100%, 88% to 95%, 88% to 90%, 90% to 95%, or 95% to 100% sequence identity to a sequence selected from the group consisting of SEQ ID NOs: 542, 543, 555, 557, 559, and 563.

[1620] In some embodiments, the TLR4 polynucleotide (e.g., a RNA, e.g., a mRNA) comprises a nucleotide sequence (e.g., an ORF) encoding a caTLR4 polypeptide, wherein the nucleotide sequence has at least 89%, at least 90%, at least 91%, at least 92%, at least 93%, at least 94%, at least 95%, at least 96%, at least 97%, at least 98%, at least 99%, or 100% sequence identity to amino acids 30 to 251 of a sequence selected from the group consisting of SEQ ID NOs: 546, 550, 551, 553, 561, and 562.

[1621] In some embodiments, the TLR4 polynucleotide (e.g., a RNA, e.g., a mRNA) comprises a nucleotide sequence (e.g., an ORF) encoding a caTLR4 polypeptide, wherein the nucleotide sequence has at least 80%, at least 85%, at least 89%, at least 90%, at least 91%, at least 92%, at least 93%, at least 94%, at least 95%, at least 96%, at least 97%, at least 98%, at least 99%, or 100% sequence identity to a sequence selected from the group consisting of SEQ ID NOs: 546, 550, 551, 553, 561, and 562.

[1622] In some embodiments, the TLR4 polynucleotide (e.g., a RNA, e.g., a mRNA) comprises a nucleotide sequence (e.g., an ORF) encoding a caTLR4 polypeptide, wherein the nucleotide sequence has 89% to 100%, 95% to 100%, or 89% to 95% sequence identity to amino acids 30 to 251 of a sequence selected from the group consisting of SEQ ID NOs: 546, 550, 551, 553, 561, and 562.

[1623] In some embodiments, the TLR4 polynucleotide (e.g., a RNA, e.g., a mRNA) comprises a nucleotide sequence (e.g., an ORF) encoding a caTLR4 polypeptide, wherein the nucleotide sequence has 80% to 100%, 85% to 100%, 89% to 100%, 95% to 100%, or 89% to 95% sequence identity to a sequence selected from the group consisting of SEQ ID NOs: 546, 550, 551, 553, 561, and 562.

[1624] In some embodiments, the TLR4 polynucleotide (e.g., a RNA, e.g., a mRNA) comprises a nucleotide sequence (e.g., an ORF) encoding a caTLR4 polypeptide, wherein the nucleotide sequence has at least 90%, at least 91%, at least 92%, at least 93%, at least 94%, at least 95%, at least 96%, at least 97%, at least 98%, at least 99%, or 100% sequence identity to amino acids 30 to 251 of a sequence selected from the group consisting of SEQ ID NOs: 540, 544, 547, 548, and 558.

[1625] In some embodiments, the TLR4 polynucleotide (e.g., a RNA, e.g., a mRNA) comprises a nucleotide sequence (e.g., an ORF) encoding a caTLR4 polypeptide, wherein the nucleotide sequence has at least 80%, at least 85%, at least 90%, at least 91%, at least 92%, at least 93%, at least 94%, at least 95%, at least 96%, at least 97%, at least 98%, at least 99%, or 100% sequence identity to a sequence selected from the group consisting of SEQ ID NOs: 540, 544, 547, 548, and 558.

[1626] In some embodiments, the TLR4 polynucleotide (e.g., a RNA, e.g., a mRNA) comprises a nucleotide sequence (e.g., an ORF) encoding a caTLR4 polypeptide, wherein the nucleotide sequence has 90% to 100%, 90% to 95%, or 95% to 100% sequence identity to amino acids 30 to 251 of a sequence selected from the group consisting of SEQ ID NOs: 540, 544, 547, 548, and 558.

[1627] In some embodiments, the TLR4 polynucleotide (e.g., a RNA, e.g., a mRNA) comprises a nucleotide sequence (e.g., an ORF) encoding a caTLR4 polypeptide, wherein the nucleotide sequence has 80% to 100%, 85% to 100%, 90% to 100%, 90% to 95%, or 95% to 100% sequence identity to a sequence selected from the group consisting of SEQ ID NOs: 540, 544, 547, 548, and 558.

[1628] In some embodiments, the TLR4 polynucleotide (e.g., a RNA, e.g., a mRNA) comprises a nucleotide sequence (e.g., an ORF) encoding a caTLR4 polypeptide, wherein the nucleotide sequence has at least 91%, at least 92%, at least 93%, at least 94%, at least 95%, at least 96%, at least 97%, at least 98%, at least 99%, or 100% sequence identity to amino acids 30 to 251 of SEQ ID NOs: 545 or 560.

[1629] In some embodiments, the TLR4 polynucleotide (e.g., a RNA, e.g., a mRNA) comprises a nucleotide sequence (e.g., an ORF) encoding a caTLR4 polypeptide, wherein the nucleotide sequence has at least 80%, at least 85%, at least 91%, at least 92%, at least 93%, at least 94%, at least 95%, at least 96%, at least 97%, at least 98%, at least 99%, or 100% sequence identity to SEQ ID NOs: 545 or 560.

[1630] In some embodiments, the TLR4 polynucleotide (e.g., a RNA, e.g., a mRNA) comprises a nucleotide sequence (e.g., an ORF) encoding a caTLR4 polypeptide, wherein the nucleotide sequence has 91% to 100%, 91% to 95%, or 95% to 100% sequence identity to amino acids 30 to 251 of SEQ ID NOs: 545 or 560.

[1631] In some embodiments, the TLR4 polynucleotide (e.g., a RNA, e.g., a mRNA) comprises a nucleotide sequence (e.g., an ORF) encoding a caTLR4 polypeptide, wherein the nucleotide sequence has 80% to 100%, 85% to 100%, 90% to 100%, 91% to 100%, 91% to 95%, or 95% to 100% sequence identity to SEQ ID NOs: 545 or 560.

[1632] Modified Nucleotide Sequences Encoding TLR4 Polypeptides: In some embodiments, the TLR4 polynucleotide (e.g., a RNA, e.g., a mRNA) comprises a chemically modified nucleobase, e.g., 5-methoxyuracil. In some embodiments, the mRNA is a uracil-modified sequence comprising an ORF encoding a TLR4 polypeptide, e.g., caTLR4, wherein the mRNA comprises a chemically modified nucleobase, e.g., 5-methoxyuracil.

[1633] In certain embodiments, when the 5-methoxyuracil base is connected to a ribose sugar, as it is in polynucleotides, the resulting modified nucleoside or nucleotide is referred to as 5-methoxyuridine. In some embodiments, uracil in the TLR4 polynucleotide is at least about 25%, at least about 30%, at least about 40%, at least about 50%, at least about 60%, at least about 70%, at least about 80%, at least 90%, at least 95%, at least 99%, or about 100% 5-methoxyuracil. In one embodiment, uracil in the TLR4 polynucleotide is at least 95% 5-methoxyuracil. In another embodiment, uracil in the TLR4 polynucleotide is 100% 5-methoxyuracil.

[1634] In embodiments where uracil in the TLR4 polynucleotide is at least 95% 5-methoxyuracil, overall uracil content can be adjusted such that an mRNA provides suitable protein expression levels while inducing little to no immune response. In some embodiments, the uracil content of the ORF is between about 105% and about 145%, about 105% and about 140%, about 110% and about 140%, about 110% and about 145%, about 115% and about 135%, about 105% and about 135%, about 110% and about 135%, about 115% and about 145%, or about 115% and about 140% of the theoretical minimum uracil content in the corresponding wild-type ORF (% U_{TM}). In other embodiments, the uracil content of the ORF is between about 117% and about 134% or between 118% and 132% of the % U_{TM}. In some embodiments, the uracil content of the ORF encoding a TLR4 polypeptide, e.g., caTLR4, is about 115%, about 120%, about 125%, about 130%, about 135%, about 140%, about 145%, or about 150% of the % U_{TM}. In this context, the term “uracil” can refer to 5-methoxyuracil and/or naturally occurring uracil.

[1635] In some embodiments, the uracil content in the ORF of the mRNA encoding a TLR4 polypeptide, e.g., caTLR4, of the disclosure is less than about 50%, about 40%, about 30%, or about 20% of the total nucleobase content in the ORF. In some embodiments, the uracil content in the ORF is between about 15% and about 25% of the total nucleobase content in the ORF. In other embodiments, the uracil content in the ORF is between about 18% and about 21% of the total nucleobase content in the ORF. In one embodiment, the uracil content in the ORF of the mRNA encoding a TLR4 polypeptide, e.g., caTLR4, is less than about 21% of the total nucleobase content in the open reading frame. In this context, the term “uracil” can refer to 5-methoxyuracil and/or naturally occurring uracil.

[1636] In further embodiments, the ORF of the mRNA encoding a TLR4 polypeptide, e.g., caTLR4, having 5-methoxyuracil and adjusted uracil content has increased Cytosine (C), Guanine (G), or Guanine/Cytosine (G/C) content (absolute or relative). In some embodiments, the overall increase in C, G, or G/C content (absolute or relative) of the ORF is at least about 2%, at least about 3%, at least about 4%, at least about 5%, at least about 6%, at least about 7%, at least about 10%, at least about 15%, at least about 20%, at least about 40%, at least about 50%, at least about 60%, at least about 70%, at least about 80%, at least about 90%, at least about 95%, or at least about 100% relative to the G/C content (absolute or relative) of the wild-type ORF.

[1637] In some embodiments, the G, the C, or the G/C content in the ORF is less than about 100%, less than about 90%, less than about 85%, or less than about 80% of the theoretical maximum G, C, or G/C content of the corresponding wild type nucleotide sequence encoding the TLR4 polypeptide, e.g., caTLR4(% G_{TMX}; % C_{TMX}, or % G/C_{TMX}).

[1638] In other embodiments, the G, the C, or the G/C content in the ORF is between about 70% and about 80%, between about 71% and about 79%, between about 71% and about 78%, between about 71% and about 77%, or between about 90% and about 95% of the % G_{TMX}, C_{TMX}, or % G/C_{TMX}.

[1639] In some embodiments, the increases in G and/or C content (absolute or relative) described herein can be conducted by replacing synonymous codons with low G, C, or G/C content with synonymous codons having higher G, C, or G/C content. In other embodiments, the increase in G and/or C content (absolute or relative) is conducted by replacing a codon ending with U with a synonymous codon ending with G or C.

[1640] In further embodiments, the ORF of the mRNA encoding a TLR4 polypeptide, e.g., caTLR4, comprises 5-methoxyuracil and has an adjusted uracil content containing less uracil pairs (UU) and/or uracil triplets (UUU) and/or uracil quadruplets (UUUU) than the corresponding wild-type nucleotide sequence encoding the TLR4 polypeptide, e.g., caTLR4. In some embodiments, the ORF of the mRNA encoding a TLR4 polypeptide, e.g., caTLR4, contains no uracil pairs and/or uracil triplets and/or uracil quadruplets. In some embodiments, uracil pairs and/or uracil triplets and/or uracil quadruplets are reduced below a certain threshold, e.g., no more than 1, 2, 3, 4, 5, 6, 7, 8, 9, 10, 11, 12, 13, 14, 15, 16, 17, 18, 19, or 20 occurrences in the ORF of the mRNA encoding the TLR4 polypeptide, e.g., caTLR4. In a particular embodiment, the ORF of the mRNA encoding the TLR4 polypeptide, e.g., caTLR4, of the disclosure contains less than 20, 19, 18, 17, 16, 15, 14, 13, 12, 11, 10, 9, 8, 7, 6, 5, 4, 3, 2, or 1 non-phenylalanine uracil pairs and/or triplets. In another embodiment, the ORF of the mRNA encoding the TLR4 polypeptide, e.g., caTLR4, contains no non-phenylalanine uracil pairs and/or triplets.

[1641] Polynucleotide Comprising an mRNA Encoding a TLR4 Polypeptide: In certain embodiments, a TLR4 polynucleotide of the present disclosure, for example a TLR4 polynucleotide comprising an mRNA nucleotide sequence encoding a TLR4 polypeptide, e.g., caTLR4, comprises from 5′ to 3′ end:
[1642] (i) a 5′ UTR, such as the sequences provided below, comprising a 5′ cap provided below;
[1643] (ii) an open reading frame encoding a TLR4 polypeptide, e.g., caTLR4, (e.g., a sequence optimized nucleic acid sequence encoding TLR4, e.g., caTLR4, disclosed herein);
[1644] (iii) at least one stop codon;
[1645] (iv) a 3′ UTR, such as the sequences provided below; and
[1646] (v) a poly-A tail provided below.

[1647] In some embodiments, the TLR4 polynucleotide further comprises a miRNA binding site, e.g, a miRNA binding site that binds to miRNA-122. In some embodiments, the 3′UTR comprises the miRNA binding site.

[1648] In some embodiments, a TLR4 polynucleotide of the present disclosure comprises a nucleotide sequence encoding a TLR4 polypeptide sequence at least 70%, at least 80%, at least 81%, at least 82%, at least 83%, at least 84%, at least 85%, at least 86%, at least 87%, at least 88%, at least 89%, at least 90%, at least 91%, at least 92%, at least 93%, at least 94%, at least 95%, at least 96%, at least 97%, at least 98%, at least 99%, or 100% identical to the protein sequence of caTLR4.

[1649] Compositions and formulations for use comprising TLR4 polynucleotides: Certain aspects of the disclosure are directed to compositions or formulations comprising any of the TLR4 polynucleotides disclosed above.

[1650] In some embodiments, the composition or formulation comprises:
[1651] (i) a TLR4 polynucleotide (e.g., a RNA, e.g., a mRNA) comprising a sequence-optimized nucleotide sequence (e.g., an ORF) encoding a caTLR4 polypeptide (e.g., the wild-type sequence, functional fragment, or variant thereof), wherein the TLR4 polynucleotide comprises at least one chemically modified nucleobase, e.g., 5-methoxyuracil (e.g., wherein at least about 25%, at least about 30%, at least about 40%, at least about 50%, at least about 60%, at least about 70%, at least about 80%, at least about 90%, at least about 95%, at least about 99%, or 100% of the uracils are 5-methoxyuracils), and wherein the TLR4 polynucleotide further comprises a miRNA binding site, e.g., a miRNA binding site that binds to miR-122 (e.g., a miR-122-3p or miR-122-5p binding site); and
[1652] (ii) a delivery agent comprising a compound having Formula (I), e.g., any of Compounds 1-147 (e.g., Compound 18, 25, 26 or 48).

[1653] In some embodiments, the uracil or thymine content of the ORF relative to the theoretical minimum uracil or thymine content of a TLR4 nucleotide sequence encoding the caTLR4 polypeptide (% U_{TM} or % T_{TM}), is between about 100% and about 150%.

[1654] In some embodiments, the TLR4 polynucleotides, compositions or formulations above are used to treat a cancer. D. INTERLEUKIN 18 (IL18)

[1655] In some embodiments, the combination therapies disclosed herein comprise one or more IL18 polynucleotides (e.g., mRNAs). As used herein, the term “IL polynucleotide” refers to a polynucleotide (e.g., an mRNA) comprising an ORF encoding an IL18 polypeptide disclosed herein.

[1656] Interleukin-18 (“IL18”), also known as interferon-gamma inducing factor, is a key regulator of immune responses and inflammation. IL18 is constitutively expressed in several cell types, including dendritic cells and macrophages. IL18 works by binding to the IL18 receptor, and together with IL12, it induces cell-mediated immunity by stimulating natural killer (NK) cells and some types of T-cells to produce the cytokine interferon-γ (INF-γ), which plays an important role in activating macrophages and other immune cells. Dinarello, C. A. et al., Frontiers in Immunology 4:article 289 (2013).

[1657] IL18 has also been found to induce strong inflammatory reactions and its expression has been associated with systemic lupus, rheumatoid arthritis, Type-1 diabetes, Crohn's disease, psoriasis and graft versus host disease. Id. However, in some disease models, such as age-related macular degeneration and some cancer models, expression of IL18 has been found to be protective rather than causative. Doyle, S. L. et al. Sci Transl Med 6 (230): 230ra44(2014).

[1658] The ability of IL18 to activate NK cells has been studied as a method for targeting cancer cells with the immune system. Fabbi, M. et al., J Leukocyte Biol. 97: 665-675 (2015). However, certain studies have suggested that IL18 may support tumor progression in advanced gastric cancer. Indeed, it stimulates the production of the proangiogenic factor, thrombospondin-1, in IL18R-expressing gastric cancer cells through the activation of the c-Jun N-terminal kinase. Kim, J. et al., (2006) Biochem. Biophys. Res. Commun. 344, 1284-1289. In another study, VEGF stimulates IL18 production and processing in gastric cancer cells, and IL18, in turn, promotes cell migration through tensin down-regulation and actin polymerization. Kim, K. E. et al., (2007) Oncogene 26, 1468-1476.

[1659] Other studies have also indicated that IL18 converts a subset of Kit-NK cells into Kit+NK cells, which overexpress PD-L1 and mediate immune-ablative functions, in mouse models. Indeed, the silencing of IL18 in tumors or its blockade by ILT8BP restores NK cell-dependent immune surveillance. Terme, M. et al., (2012) Cancer Res. 72, 2757-2767. Therefore, there remains a need to identify an improved IL18 product that has an anti-tumor efficacy without the pro-tumor effect.

[1660] The wild type IL18 gene encodes a 192 amino acid preprotein. The preprotein is cleaved by caspase-1 to remove the 35 amino acid signal peptide, leaving a mature protein 157 amino acids in length. Gracie, J. A. et al., J. Leukocyte Biol. 73:213-224 (2003). See also, GenBank Accession Numbers NM_001562.3 for the Homo sapiens interleukin-18 isoform 1 precursor mRNA sequence and NP_001553.1 for the corresponding IL18 isoform 1 preprotein. Following cleavage by caspase-1, mature IL18 is secreted from the cell in which it was formed. In one embodiment, the polynucleotide of the disclosure encodes a mature IL18 polypeptide.

[1661] IL18 signaling occurs through a heterodimeric receptor present on NK cells and some types of T cells. IL18 first binds with low affinity to the IL18 receptor alpha chain (IL18Rα) followed by recruitment of IL18 receptor beta chain (IL18Rβ) to form a high affinity complex. Gracie, J. A. et al., J Leukocyte Biol. 73:213-224 (2003). This heterotrimer complex interacts with Toll-Interleukin-1 receptor (TIR) which recruits MyD88, IRAK and TRAF-6 to cause the degradation of IκB, activation of NFκB and subsequent activation of proinflammatory genes. Dinarello, C. A. et al., Frontiers in Immunology 4:article 289 (2013). Therefore, the IL18 polypeptide encoded by the polynucleotides can bind to an IL18 receptor alpha chain and/or form a heterodimer with the IL18Rα chain and the IL18Rβ chain.

[1662] The coding sequence (CDS) for the wild type IL18 mRNA sequence, isoform 1, is described at the NCBI Reference Sequence database (RefSeq) under accession number NM_001562.3 (“Homo sapiens interleukin 18 (IL18), transcript variant 1, mRNA”). In one embodiment, the polynucleotide of the disclosure encodes the wild-type IL18 polypeptide, isoform 1. The wild type IL18 protein sequence, isoform 1, is described at the RefSeq database under accession number NP_001553.1 (“interleukin-18 isoform 1 precursor [Homo sapiens]”).

[1663] “IL18 polypeptide” as used herein refers to a mature IL18 polypeptide or a variant, mutant, or derivative thereof that has one or more IL18 function. In one embodiment, the IL18 polypeptide can comprise a signal peptide that is heterologous to the mature IL18 polypeptide. In another embodiment, an IL18 polypeptide comprises a signal peptide that is naturally occurring within the mature IL18 polypeptide. IL18 isoform 2 lacks an in-frame coding exon compared to isoform 1. Isoform 2 is shorter and can be resistant to proteolytic activation, compared to isoform 1. Wild type IL18 isoform 2 mRNA is described at the RefSeq database under accession number NM_001243211.1 (“Homo sapiens interleukin 18 (IL18), transcript variant 2, mRNA”) and the wild type IL18 isoform 2 protein is described in the RefSeq database under accession number NP_001230140.1 (“interleukin-18 isoform 2 [Homo sapiens]”).Isoform 1 is 193 amino acids in length and isoform 2 is 189 amino acids in length.

[1664] In some embodiments, sequence tags or amino acids, can be added to the sequences encoded by the polynucleotides of the disclosure (e.g., at the N-terminal or C-terminal ends), e.g., for localization. In some embodiments, amino acid residues located at the carboxy, amino terminal, or internal regions of an IL18 polypeptide disclosed herein can optionally be deleted providing for fragments.

[1665] In some embodiments, the IL18 polynucleotide (e.g., a RNA, e.g., a mRNA) comprising a nucleotide sequence (e.g., an ORF) encoding IL18 encodes a substitutional variant of an IL18 isoform 1 or 2 sequence, which can comprise one, two, three or more than three substitutions. In some embodiments, the substitutional IL18 variant can comprise one or more conservative amino acids substitutions. In other embodiments, the IL18 variant is an insertional variant. In other embodiments, the variant is a deletional variant.

[1666] Certain compositions and methods presented in this disclosure refer to polynucleotide sequences comprising an ORF encoding IL18, or to IL18 proteins or polypeptides. A person skilled in the art will understand that such disclosures are equally applicable to human IL18, isoform 1, as well as any other isoforms of IL18 known in the art.

[1667] In some embodiments, the IL18 polypeptide comprises an amino acid sequence at least about 80%, at least about 85%, at least about 90%, at least about 95%, at least about 95%, about 96%, at least about 97%, at least about 98%, at least about 99%, or about 100% identical to amino acids 37 to 193 of SEQ ID NO: 564, or SEQ ID NO: 566.

[1668] The IL18 polynucleotides (e.g., a RNA, e.g., a mRNA) disclosed herein can also comprise nucleotide sequences that encode additional features that facilitate trafficking of the encoded polypeptides to therapeutically relevant sites. One such feature that aids in protein trafficking is the signal sequence, or targeting sequence. The peptides encoded by these signal sequences are known by a variety of names, including targeting peptides, transit peptides, and signal peptides. In some embodiments, the IL18 polynucleotide (e.g., a RNA, e.g., a mRNA) comprises a nucleotide sequence (e.g., an ORF) that encodes a signal peptide operably linked a nucleotide sequence that encodes an IL18 polypeptide described herein.

[1669] In some embodiments, the “signal sequence” or “signal peptide” is a polynucleotide or polypeptide, respectively, which is from about 9 to 200 nucleotides (3-70 amino acids) in length that, optionally, is incorporated at the 5′ (or N-terminus) of the coding region or the IL18 polypeptide, respectively. Addition of these sequences results in trafficking the encoded IL18 polypeptide to a desired site, such as the endoplasmic reticulum or the mitochondria through one or more targeting pathways. Some signal peptides are cleaved from the protein, for example by a signal peptidase after the proteins are transported to the desired site.

[1670] Any heterologous signal sequence known in the art can be used in the present disclosure. In one embodiment, a signal peptide useful for the disclosure is a naturally occurring IL18 signal peptide.

[1671] In another embodiment, a signal peptide useful for the disclosure is a signal peptide of human IL2 protein. In some embodiment, the signal peptide comprises an amino acid sequence at least about 70%, at least about 80%, at least about 85%, at least about 90%, at least about 95%, at least about 95%, about 96%, at least about 97%, at least about 98%, at least about 99%, or about 100% identical to MYRMQLLSCIALSLALVTNS (SEQ ID NO: 568).

[1672] In another embodiment, a signal peptide useful for the disclosure is a signal peptide is a human Lambda signal peptide. In some embodiment, the signal peptide comprises an amino acid sequence at least about 70%, at least about 80%, at least about 85%, at least about 90%, at least about 95%, at least about 95%, about 96%, at least about 97%, at least about 98%, at least about 99%, or about 100% identical to MAWTVLLLGLLSHCTGSVTS (SEQ ID NO: 569).

(SEQ ID NO: 569)
MAWTVLLLGLLSHCTGSVTS.

[1673] In another embodiment, a signal peptide useful for the disclosure is a signal peptide is a human IL1ra signal peptide. In some embodiment, the signal peptide comprises an amino acid sequence at least about 70%, at least about 80%, at least about 85%, at least about 90%, at least about 95%, at least about 95%, about 96%, at least about 97%, at least about 98%, at least about 99%, or about 100% identical to

(SEQ ID NO: 570)
MEICRGLRSHLITLLLFLFHSETIC.

[1674] In another embodiment, a signal peptide useful for the disclosure is a signal peptide of tissue plasminogen activator (tPA). In other embodiments, the signal peptide comprises an amino acid sequence having at least about 80%, at least about 85%, at least about 90%, at least about 95%, at least about 95%, about 96%, at least about 97%, at least about 98%, at least about 99%, or about 100% identical to

(SEQ ID NO: 571)
MDAMKRGLCCVLLLCGAVFVSPSQEIHARFRRGAR.

[1675] In certain embodiments, the IL18 polypeptide comprises one or more amino acid substitutions, mutations, deletions, or insertions. In one embodiment, the IL18 polypeptide comprises one or more amino acid substitutions or mutations that allow a cleavage by a caspase enzyme. In another embodiment, the IL18 polypeptide comprises one or more amino acid substitutions or mutations at the caspase cleavage site. In other embodiments, the one or more amino acid substitutions or mutations are at amino acids 71 corresponding to SEQ ID NO: 564 (full-length wild type IL18, isoform 1), at amino acid 76 corresponding to SEQ ID NO: 564 (full-length wild type IL18 isoform 1), or at amino acids 71 and 76 corresponding to SEQ ID NO: 564. In some embodiments, the amino acid substitutions or mutations are D71S, D76N, or both D71S and D76N. In some embodiments, the IL18 comprises SEQ ID NO: 578 (IL18 double mutant) without the signal peptide.

[1676] In other embodiments, the IL18 polypeptide can be a fusion protein, which is fused to one or more heterologous polypeptides.

[1677] In some embodiments, the IL18 polynucleotides disclosed herein can comprise an ORF encoding any IL18 polypeptide disclosed herein, e.g., an IL18 polypeptide encoded by a sequence-optimized IL18 polynucleotides disclosed herein or by a nucleotide sequence comprising a sequence-optimized IL18 polynucleotides disclosed herein.

[1678] IL18 Polynucleotides and Open Reading Frames (ORFs): The IL18 polynucleotides used in the combination therapies disclose herein include any IL18 polynucleotides (e.g., DNA or RNA, e.g., mRNA) provided in the present disclosure. In certain embodiments, the IL18 polynucleotide (e.g., a RNA, e.g., a mRNA) that comprise a nucleotide sequence (e.g., an ORF) encoding one or more IL18 polypeptides, e.g., IL18 polynucleotides.

[1679] In some embodiments, the IL18 polynucleotide can encode:
[1680] (i) a mature IL18 polypeptide (e.g., having the same or essentially the same length as wild-type IL18 isoform 1 or 2) with or without a signal peptide;
[1681] (ii) a functional fragment of any of the IL18 isoforms described herein (e.g., a truncated (e.g., deletion of carboxy, amino terminal, or internal regions) sequence shorter than one of wild-type isoforms 1 or 2; but still retaining IL18 activity);
[1682] (iii) a variant thereof (e.g., full-length, mature, or truncated IL18 isoform 1 or 2 proteins in which one or more amino acids have been replaced, e.g., D71S, D76N, or both D71S and D76N, or variants that retain all or most of the IL18 activity of the polypeptide with respect to a reference isoform;
[1683] (iv) an IL18 polypeptide of any one of (i) to (iii) fused to a signal peptide, e.g., tPA signal peptide, IL2 signal peptide, human immunoglobulin Lambda chain (hIgLC) signal peptide, human interleukin-1 receptor antagonist (hIL-1ra) signal peptide, or any combination thereof.
[1684] (v) a fusion protein comprising (i) the mature IL18 polypeptide, a functional fragment or a variant thereof, and (ii) a heterologous protein.

[1685] In certain embodiments, the encoded IL18 polypeptide, is a mammalian IL18 polypeptide, such as a human IL18 polypeptide, a functional fragment or a variant thereof.

[1686] In some embodiments, the IL18 polynucleotide (e.g., a RNA, e.g., a mRNA) increases IL18 protein expression levels and/or detectable IL18 activity levels in cells when introduced in those cells, e.g., by at least 10%, at least 15%, at least 20%, at least 25%, at least 30%, at least 35%, at least 40%, at least 45%, at least 50%, at least 55%, at least 60%, at least 65%, at least 70%, at least 75%, at least 80%, at least 85%, at least 90%, at least 95%, or at least 100%, compared to IL18 protein expression levels and/or detectable IL18 activity levels in the cells prior to the administration of the IL18 polynucleotide. The IL18 protein expression levels and/or IL18 activity can be measured according to methods know in the art. In some embodiments, the IL18 polynucleotide is introduced to the cells in vitro. In some embodiments, the IL18 polynucleotide is introduced to the cells in vivo.

[1687] In some embodiments, the IL18 polynucleotide (e.g., a RNA, e.g., a mRNA) comprises a codon optimized nucleic acid sequence, wherein the open reading frame (ORF) of the codon optimized nucleic sequence is derived from a wild-type IL18 sequence. For example, for IL18 polynucleotides comprising a sequence optimized ORF encoding IL18, the corresponding wild type sequence is the native IL18.

[1688] In some embodiments, the IL18 polynucleotide (e.g., a RNA, e.g., a mRNA) comprises a nucleotide sequence (e.g., an ORF) that encodes a IL18 polypeptide with mutations that do not alter IL18 activity. Such mutant IL18 polypeptides can be referred to as function-neutral. In some embodiments, the IL18 polynucleotide comprises an ORF that encodes a mutant IL18 polypeptide comprising one or more function-neutral point mutations.

[1689] In some embodiments, the mutant IL18 polypeptide has higher IL18 activity than the corresponding wild-type IL18. In some embodiments, the mutant IL18 polypeptide has an IL18 activity that is at least 10%, at least 15%, at least 20%, at least 25%, at least 30%, at least 35%, at least 40%, at least 45%, at least 50%, at least 55%, at least 60%, at least 65%, at least 70%, at least 75%, at least 80%, at least 85%, at least 90%, at least 95%, or at least 100% higher than the activity of the corresponding wild-type IL18.

[1690] In some embodiments, the IL18 polynucleotide (e.g., a RNA, e.g., a mRNA) comprises a nucleotide sequence (e.g., an ORF) encoding an IL18 fragment that has higher IL18 activity than the corresponding full-length IL18. Thus, in some embodiments the IL18 fragment has an IL18 activity which is at least 10%, at least 15%, at least 20%, at least 25%, at least 30%, at least 35%, at least 40%, at least 45%, at least 50%, at least 55%, at least 60%, at least 65%, at least 70%, at least 75%, at least 80%, at least 85%, at least 90%, at least 95%, or at least 100% higher than the IL18 activity of the corresponding full-length IL18.

[1691] In some embodiments, the IL18 polynucleotide (e.g., a RNA, e.g., a mRNA) comprises a nucleotide sequence (e.g., an ORF) encoding an IL18 polypeptide that is at least 1%, 2%, 3%, 4%, 5%, 6%, 7%, 8%, 9%, 10, 1%, 12%, 13%, 14%, 15%, 16%, 1⁷%, 187%, 19%, 20%, 21%, 22%, 23%, 24%, or 25% shorter than the amino acid sequence as set forth in amino acids 30 to 251 of SEQ ID NO: 564, 566, 572, 574, 576, 577 or 578 (with or without signal peptide).

[1692] In other embodiments, the IL18 polynucleotide (e.g., a RNA, e.g., a mRNA) encodes an amino acid sequence having 85% to 100%, 90% to 100%, 95% to 100%, 80% to 95%, 85% to 95%, 85% to 90%, 90% to 95%, or 95% to 100% sequence identity to SEQ ID NO: 564, 566, 572, 574, 576, 577 or 578 (with or without signal peptide).

[1693] In some embodiments, the IL18 polynucleotide (e.g., a RNA, e.g., a mRNA) comprises a nucleotide sequence (e.g., an ORF) encoding an IL18 polypeptide, wherein the nucleotide sequence has 85% to 100%, 90% to 100%, 95% to 100%, 80% to 95%, 85% to 95%, 85% to 90%, 90% to 95%, or 95% to 100% sequence identity to SEQ ID NO: 564, 566, 572, 574, 576, 577 or 578 (with or without signal peptide).

[1694] In some embodiments, the IL18 polynucleotide (e.g., a RNA, e.g., a mRNA) comprises a nucleotide sequence (e.g., an ORF) encoding an IL18 polypeptide, wherein the nucleotide sequence has 86% to 100%, 90% to 100%, 86% to 95%, 86% to 90%, 90% to 95%, or 95% to 100% sequence identity to SEQ ID NO: 564, 566, 572, 574, 576, 577 or 578 (with or without signal peptide).

[1695] In some embodiments, the IL18 polynucleotide (e.g., a RNA, e.g., a mRNA) comprises a nucleotide sequence (e.g., an ORF) encoding an IL18 polypeptide, wherein the nucleotide sequence has 87% to 100%, 90% to 100%, 87% to 95%, 87% to 90%, 90% to 95%, or 95% to 100% sequence identity to SEQ ID NO: 564, 566, 572, 574, 576, 577 or 578 (with or without signal peptide).

[1696] In some embodiments, the IL18 polynucleotide (e.g., a RNA, e.g., a mRNA) comprises a nucleotide sequence (e.g., an ORF) encoding an IL18 polypeptide, wherein the nucleotide sequence has 88% to 100%, 90% to 100%, 88% to 95%, 88% to 90%, 90% to 95%, or 95% to 100% sequence identity to SEQ ID NO: 564, 566, 572, 574, 576, 577 or 578 (with or without signal peptide).

[1697] In some embodiments, the IL18 polynucleotide (e.g., a RNA, e.g., a mRNA) comprises a nucleotide sequence (e.g., an ORF) encoding an IL18 polypeptide, wherein the nucleotide sequence has 89% to 100%, 95% to 100%, or 89% to 95% sequence identity to SEQ ID NO: 564, 566, 572, 574, 576, 577 or 578 (with or without signal peptide).

[1698] In some embodiments, the IL18 polynucleotide (e.g., a RNA, e.g., a mRNA) comprises a nucleotide sequence (e.g., an ORF) encoding an IL18 polypeptide, wherein the nucleotide sequence has 90% to 100%, 90% to 95%, or 95% to 100% sequence identity to SEQ ID NO: 564, 566, 572, 574, 576, 577 or 578 (with or without signal peptide).

[1699] In some embodiments, the IL18 polynucleotide (e.g., a RNA, e.g., a mRNA) comprises a nucleotide sequence (e.g., an ORF) encoding an IL18 polypeptide, wherein the nucleotide sequence has 91% to 100%, 91% to 95%, or 95% to 100% sequence identity to SEQ ID NO: 564, 566, 572, 574, 576, 577 or 578 (with or without signal peptide).

[1700] In some embodiments, the IL18 polynucleotide (e.g., a RNA, e.g., a mRNA) comprises from about 500 to about 100,000 nucleotides (e.g., from 500 to 650, from 500 to 675, from 500 to 700, from 500 to 725, from 500 to 750, from 500 to 775, from 500 to 800, from 500 to 900, from 500 to 1000, from 500 to 1100, from 500 to 1200, from 500 to 1300, from 500 to 1400, from 500 to 1500, from 567 to 800, from 567 to 900, from 567 to 1000, from 567 to 1100, from 567 to 1200, from 567 to 1300, from 567 to 1400, from 567 to 1500, from 579 to 800, from 579 to 900, from 579 to 1000, from 579 to 1200, from 579 to 1400, from 579 to 1600, from 579 to 1800, from 579 to 2000, from 579 to 3000, from 579 to 5000, from 579 to 7000, from 579 to 10,000, from 579 to 25,000, from 579 to 50,000, from 579 to 70,000, or from 579 to 100,000.).

[1701] In some embodiments, the IL18 polynucleotide (e.g., a RNA, e.g., a mRNA) comprises a nucleotide sequence (e.g., an ORF) encoding an IL18 polypeptide, wherein the length of the nucleotide sequence (e.g., an ORF) is at least 300 nucleotides in length (e.g., at least or greater than about 300, 400, 500, 567, 579, 600, 700, 750, 800, 900, 1000, 1100, 1200, 1300, 1400, 1500, 1600, 1700, 1800, 1900, 2000, 2100, 2200, 2300, 2400, 2500, 2600, 2700, 2800, 2900, 3000, 3100, 3200, 3300, 3400, 3500, 3600, 3700, 3800, 3900, 4000, 4100, 4200, 4300, 4400, 4500, 4600, 4700, 4800, 4900, 5000, 5100, 5200, 5300, 5400, 5500, 5600, 5700, 5800, 5900, 6000, 7000, 8000, 9000, 10,000, 20,000, 30,000, 40,000, 50,000, 60,000, 70,000, 80,000, 90,000 or up to and including 100,000 nucleotides).

[1702] In some embodiments, the IL18 polynucleotide (e.g., a RNA, e.g., a mRNA) comprises a nucleotide sequence (e.g., an ORF) encoding an IL18 polypeptide that further comprises at least one nucleic acid sequence that is noncoding, e.g., a miRNA binding site.

[1703] In some embodiments, the IL18 polynucleotide (e.g., a RNA, e.g., a mRNA) comprises a nucleotide sequence (e.g., an ORF) encoding an IL18 polypeptide that is single stranded or double stranded.

[1704] In some embodiments, the IL18 polynucleotide comprising a nucleotide sequence (e.g., an ORF) encoding an IL18 polypeptide is DNA or RNA. In some embodiments, the IL18 polynucleotide is RNA. In some embodiments, the IL18 polynucleotide is, or functions as, a messenger RNA (mRNA). In some embodiments, the mRNA comprises a nucleotide sequence (e.g., an ORF) that encodes at least one IL18 polypeptide, and is capable of being translated to produce the encoded IL18 polypeptide in vitro, in vivo, in situ or ex vivo.

[1705] In some embodiments, the IL18 polynucleotide (e.g., a RNA, e.g., a mRNA) comprises a sequence-optimized nucleotide sequence (e.g., an ORF) encoding an IL18 polypeptide (e.g., the wild-type sequence, functional fragment, or variant thereof), wherein the polynucleotide comprises at least one chemically modified nucleobase, e.g., 5-methoxyuracil. In some embodiments, the IL18 polynucleotide further comprises a miRNA binding site, e.g., a miRNA binding site that binds to miR-122. In some embodiments, the polynucleotide disclosed herein is formulated with a delivery agent, e.g., a compound having Formula (I), e.g., any of Compounds 1-147.

[1706] IL18 fusion proteins: In some embodiments, the IL18 polynucleotide (e.g., a RNA, e.g., a mRNA) can comprise more than one nucleic acid sequence (e.g., an ORF) encoding a polypeptide of interest. In some embodiments, IL18 polynucleotides disclosed herein comprise a single ORF encoding an IL18 polypeptide, a functional fragment, or a variant thereof. However, in some embodiments, the IL18 polynucleotides disclosed herein can comprise more than one ORF, for example, a first ORF encoding an IL18 polypeptide (a first polypeptide of interest), a functional fragment, or a variant thereof, and a second ORF expressing a second polypeptide of interest. In some embodiments, two or more polypeptides of interest can be genetically fused, i.e., two or more polypeptides can be encoded by the same ORF. In some embodiments, the IL18 polynucleotide can comprise a nucleic acid sequence encoding a linker (e.g., a G4S peptide linker or another linker known in the art) between two or more polypeptides of interest.

[1707] In some embodiments, the IL18 polynucleotide (e.g., a RNA, e.g., a mRNA) can comprise two, three, four, or more ORFs, each expressing a polypeptide of interest.

[1708] In some embodiments, the IL18 polynucleotide (e.g., a RNA, e.g., a mRNA) can comprise a first nucleic acid sequence (e.g., a first ORF) encoding an IL18 polypeptide and a second nucleic acid sequence (e.g., a second ORF) encoding a second polypeptide of interest.

[1709] Sequence-Optimized Nucleotide Sequences Encoding IL18 Polypeptides: In some embodiments, the IL18 polynucleotide (e.g., a RNA, e.g., a mRNA) comprises a sequence-optimized nucleotide sequence encoding an IL18 polypeptide disclosed herein. In some embodiments, the IL18 polynucleotide (e.g., a RNA, e.g., a mRNA) comprises an open reading frame (ORF) encoding an IL18 polypeptide, wherein the ORF has been sequence optimized.

[1710] Exemplary sequence-optimized nucleotide sequences encoding IL18, are shown in TABLE 8. In some embodiments, the sequence optimized IL18, sequences in TABLE 8, fragments, and variants thereof are used to practice the methods disclosed herein.

TABLE 8
Sequence of fusions constructs encoding IL18 (SEQ ID NOS: 579-582) and their
corresponding optimized ORFs (SEQ ID NO: 583-807)

| SEQ | | |
|---|---|---|
| ID NO | Name | Sequence |
| 579 | tPA_IL18-WT | MDAMKRGLCCVLLLCGAVFVSPSQEIHARFRRGARYFGKLESKLSVIR |
| | amino acid | NLNDQVLFIDQGNRPLFEDMTDSDCRDNAPRTTFIISMYKDSQPRGMA |
| | sequence | VTISVKCEKISTLSCENKIISFKEMNPPDNIKDTKSDIIFFQRSVPGH |
| | | DNKMQFESSSYEGYFLACEKERDLFKLILKKEDELGDRSIMFTVQNED |
| 580 | tPA_IL18-WT | ATGGATGCAATGAAGAGAGGGCTCTGCTGTGTGCTGCTGCTGTGTGGA |
| | nucleotide | GCAGTCTTCGTTTCGCCCAGCCAGGAAATCCATGCCCGATTCAGAAGA |
| | sequence | GGAGCCAGATACTTTGGCAAGCTTGAATCTAAATTATCAGTCATAAGA |
| | | AATTTGAATGACCAAGTTCTCTTCATTGACCAAGGAAATCGGCCTCTA |
| | | TTTGAAGATATGACTGATTCTGACTGTAGAGATAATGCACCCCGGACC |
| | | ATATTTATTATAAGTATGTATAAAGATAGCCAGCCTAGAGGTATGGCT |
| | | GTAACTATCTCTGTGAAGTGTGAGAAAATTTCAACTCTCTCCTGTGAG |
| | | AACAAAATTATTTCCTTTAAGGAAATGAATCCTCCTGATAACATCAAG |
| | | GATACAAAAAGTGACATCATATTCTTTCAGAGAAGTGTCCCAGGACAT |
| | | GATAATAAGATGCAATTTGAATCTTCATCATACGAAGGATACTTTCTA |
| | | GCTTGTGAAAAAGAGAGAGACCTTTTTAAACTCATTTTGAAAAAAGAG |
| | | GATGAATTGGGGGATAGATCTATAATGTTCACTGTTCAAAACGAAGAC |
| 581 | IL2sp_IL18- | MYRMQLLSCIALSLALVTNSYFGKLESKLSVIRNLNDQVLFIDQGNRP |
| | WT | LFEDMTDSDCRDNAPRTIFIISMYKDSQPRGMAVTISVKCEKISTLSC |
| | | ENKIISFKEMNPPDNIKDTKSDIIFFQRSVPGHDNKMQFESSSYEGYF |
| | | LACEKERDLFKLILKKEDELGDRSIMFTVQNED |
| 582 | IL2sp_IL18- | ATGTACAGGATGCAACTCCTGTCTTGCATTGCACTAAGTCTTGCACTT |
| | WT | GTCACAAACAGTTACTTTGGCAAGCTTGAATCTAAATTATCAGTCATA |
| | | AGAAATTTGAATGACCAAGTTCTCTTCATTGACCAAGGAAATCGGCCT |
| | | CTATTTGAAGATATGACTGATTCTGACTGTAGAGATAATGCACCCCGG |
| | | ACCATATTTATTATAAGTATGTATAAAGATAGCCAGCCTAGAGGTATG |
| | | GCTGTAACTATCTCTGTGAAGTGTGAGAAAATTTCAACTCTCTCCTGT |
| | | GAGAACAAAATTATTTCCTTTAAGGAAATGAATCCTCCTGATAACATC |
| | | AAGGATACAAAAAGTGACATCATATTCTTTCAGAGAAGTGTCCCAGGA |
| | | CATGATAATAAGATGCAATTTGAATCTTCATCATACGAAGGATACTTT |
| | | CTAGCTTGTGAAAAAGAGAGAGACCTTTTTAAACTCATTTTGAAAAAA |
| | | GAGGATGAATTGGGGGATAGATCTATAATGTTCACTGTTCAAAACGAA |
| | | GAC |
| 583 | tPA_IL18 | ATGGACGCCATGAAGAGGGGCCTCTGCTGCGTCCTATTGCTCTGCGGG |
| | | GCCGTCTTCGTCTCCCCCAGCCAGGAGATCCACGCCCGGTTTAGGAGG |
| | | GGGGCGAGGTACTTCGGGAAGCTCGAGAGCAAGCTCAGCGTAATCAGG |
| | | AACTTGAACGACCAAGTCCTCTTTATCGACCAGGGTAACCGTCCCCTC |
| | | TTCGAGGACATGACCGACTCCGATTGCCGCGACAACGCCCCGCGGACC |
| | | ATCTTTATCATCAGCATGTACAAGGACTCCCAGCCGAGGGGGATGGCC |
| | | GTCACAATCAGCGTCAAATGCGAGAAGATCTCGACCCTGAGCTGCGAG |
| | | AACAAAATCATCTCCTTTAAGGAGATGAATCCCCCGGACAACATAAAG |
| | | GACACCAAGTCGGACATCATCTTCTTCCAGAGGTCGGTCCCTGGCCAC |
| | | GACAACAAAATGCAGTTCGAGAGCTCCAGCTACGAGGGCTATTTCCTC |
| | | GCCTGCGAGAAGGAGAGGGACCTGTTCAAGCTCATCCTGAAGAAGGAG |
| | | GACGAGCTGGGCGACAGGTCGATCATGTTCACTGTGCAGAACGAGGAC |
| 584 | tPA_IL18 | ATGGACGCGATGAAGCGGGGCCTCTGCTGCGTACTCCTACTCTGCGGG |
| | | GCCGTCTTCGTGTCCCCGTCCCAGGAGATCCACGCCAGGTTCCGGAGG |
| | | GGGGCGCGGTACTTCGGAAAGCTTGAGAGCAAGCTCTCAGTCATCCGA |
| | | AATCTCAACGACCAGGTACTCTTCATCGACCAGGGCAACCGCCCCTTG |
| | | TTCGAGGATATGACCGACTCCGACTGCCGGGACAACGCCCCCCGGACC |
| | | ATTTTCATCATAAGCATGTACAAGGACTCCCAGCCCCGGGGCATGGCG |
| | | GTAACCATCAGCGTCAAGTGCGAGAAGATCTCCACCCTGTCCTGCGAA |
| | | AACAAGATCATCAGCTTCAAGGAGATGAACCCTCCCGACAACATCAAG |
| | | GACACCAAGAGCGACATCATCTTCTTCCAGAGGAGCGTCCCCGGCCAC |
| | | GACAACAAGATGCAGTTCGAGTCCAGTAGCTACGAGGGCTACTTCCTG |
| | | GCCTGCGAGAAGGAGAGGGATCTGTTTAAGCTCATCCTCAAGAAGGAG |
| | | GACGAGCTGGGGGACCGCAGCATCATGTTTACGGTGCAGAACGAGGAC |
| 585 | tPA_IL18 | ATGGACGCCATGAAGAGGGGCCTCTGCTGCGTCCTACTCCTCTGCGGC |
| | | GCCGTCTTCGTGAGCCCCTCGCAGGAAATCCACGCGAGGTTCAGGCGG |
| | | GGCGCCAGGTACTTCGGCAAGCTCGAGTCGAAGCTTAGCGTCATCCGC |
| | | AACCTCAACGACCAGGTCCTCTTCATCGACCAGGGCAACCGCCCCCTC |
| | | TTCGAAGATATGACCGACAGCGACTGCAGGGACAACGCCCCCAGGACC |
| | | ATCTTCATCATCAGCATGTACAAGGACTCCCAGCCCCGGGGGATGGCC |
| | | GTTACCATCAGCGTGAAATGCGAGAAGATCAGCACCCTTAGCTGCGAG |
| | | AACAAGATCATCTCCTTCAAGGAGATGAACCCGCCCGATAACATCAAG |
| | | GACACCAAGTCGGACATCATCTTCTTCCAACGTAGCGTGCCCGGCCAC |
| | | GACAACAAGATGCAGTTTGAGAGTTCCAGCTACGAGGGCTACTTCCTC |
| | | GCCTGCGAGAAGGAGCGCGACCTGTTCAAGCTCATCCTGAAAAAAGAG |
| | | GATGAGCTGGGGGACAGGTCCATCATGTTCACTGTGCAGAACGAGGAC |
| 586 | tPA_IL18 | ATGGACGCGATGAAGCGGGGGCTCTGCTGCGTCCTACTCTTGTGCGGC |
| | | GCCGTCTTCGTGTCCCCCAGCCAGGAAATCCACGCCAGGTTCAGGAGG |
| | | GGCGCCAGGTATTTCGGAAAGCTCGAGAGCAAGCTCAGCGTCATCAGA |
| | | AACCTCAACGACCAGGTCCTCTTCATCGATCAGGGCAACCGGCCCCTC |
| | | TTCGAGGATATGACCGACAGCGACTGCAGGGACAACGCCCCCCGGACC |
| | | ATCTTCATCATCTCCATGTACAAGGATAGCCAGCCCAGGGGCATGGCC |
| | | GTCACAATCTCCGTGAAGTGCGAGAAGATCAGCACCCTGAGCTGCGAA |
| | | AATAAGATCATCTCCTTCAAGGAGATGAATCCCCCCGATAACATTAAG |
| | | GACACCAAGTCCGACATCATCTTCTTCCAGAGGAGCGTCCCCGGACAT |
| | | GACAATAAGATGCAGTTCGAGAGCTCCAGCTATGAGGGCTATTTCCTG |
| | | GCCTGCGAAAAGGAAAGGGACCTGTTCAAGCTGATCCTGAAGAAGGAA |
| | | GATGAGCTGGGGGACCGGTCCATCATGTTCACAGTCCAGAACGAGGAC |
| 587 | tPA_IL18 | ATGGACGCCATGAAGCGCGGTCTTTGCTGCGTACTCCTTCTCTGCGGC |
| | | GCCGTCTTCGTGTCGCCGAGTCAGGAGATCCACGCGCGCTTCAGGAGG |
| | | GGGGCCCGGTACTTCGGCAAGTTGGAGAGCAAGCTCTCGGTCATACGC |
| | | AACCTCAACGACCAGGTTCTCTTTATCGACCAGGGCAATAGGCCCCTC |
| | | TTCGAAGACATGACCGACTCCGACTGCAGGGACAACGCCCCCCGGACC |
| | | ATCTTTATCATCAGCATGTATAAAGACAGCCAGCCCCGAGGGATGGCC |
| | | GTCACCATCTCCGTCAAATGCGAGAAGATCTCCACGCTGTCCTGCGAG |
| | | AACAAGATCATTTCCTTCAAGGAGATGAACCCCCCTGACAACATCAAG |
| | | GACACCAAGTCCGACATCATCTTCTTCCAAAGGAGCGTGCCCGGCCAC |
| | | GACAACAAGATGCAGTTCGAGAGCAGCTCCTACGAAGGATACTTCCTC |
| | | GCATGTGAGAAGGAGCGCGATCTGTTCAAGCTGATCCTGAAGAAGGAG |
| | | GACGAGCTGGGGGATAGGTCCATCATGTTTACGGTGCAGAACGAGGAC |
| 588 | tPA_IL18 | ATGGACGCCATGAAGCGGGGCCTTTGCTGCGTCTTGCTTCTCTGCGGC |
| | | GCCGTTTTCGTCTCCCCCAGCCAAGAGATCCACGCCAGGTTCAGGAGG |
| | | GGGGCCAGGTACTTCGGTAAGCTCGAGAGCAAGCTCTCGGTCATCAGG |
| | | AACTTGAACGACCAGGTCCTCTTCATCGACCAGGGCAACCGGCCCCTC |
| | | TTCGAGGACATGACCGACAGCGACTGCAGGGACAACGCCCCCAGAACG |
| | | ATCTTCATCATCTCGATGTACAAGGACAGCCAGCCCCGCGGCATGGCC |
| | | GTCACCATCTCCGTCAAGTGCGAGAAGATCAGCACGCTGTCCTGCGAG |
| | | AATAAAATCATCTCCTTCAAGGAGATGAACCCACCCGACAACATCAAG |
| | | GACACCAAGAGCGACATCATCTTCTTCCAGCGTAGCGTGCCCGGCCAC |
| | | GACAACAAGATGCAGTTCGAGAGCAGCAGCTACGAGGGCTACTTTCTC |
| | | GCCTGCGAGAAGGAGCGCGACCTGTTTAAGCTGATCCTCAAAAAGGAG |
| | | GACGAGCTCGGCGACAGGTCCATCATGTTCACGGTGCAGAACGAGGAC |
| 589 | tPA_IL18 | ATGGACGCGATGAAGCGGGGCCTCTGCTGCGTCCTACTCTTGTGCGGA |
| | | GCCGTCTTCGTTTCACCGAGCCAGGAGATCCACGCGCGTTTCCGGAGG |
| | | GGCGCCCGATATTTCGGGAAGCTCGAAAGCAAGCTCAGCGTCATCCGC |
| | | AACCTCAACGACCAGGTCCTCTTCATCGACCAGGGGAACAGGCCCCTG |
| | | TTCGAAGACATGACCGACTCCGACTGCCGGGACAACGCCCCCCGCACC |
| | | ATTTTCATCATCAGCATGTACAAAGACAGCCAGCCCCGGGGCATGGCC |
| | | GTCACAATCTCCGTGAAGTGTGAAAAGATCTCCACCCTGTCGTGCGAG |
| | | AACAAGATCATCAGCTTCAAGGAGATGAACCCGCCCGACAACATCAAG |
| | | GACACCAAGTCCGATATTATCTTCTTCCAGAGGAGCGTGCCCGGCCAC |
| | | GACAACAAGATGCAGTTCGAAAGCTCGAGCTACGAGGGCTACTTCCTG |
| | | GCCTGTGAGAAGGAGCGTGATCTCTTCAAGCTGATCCTCAAGAAGGAG |
| | | GACGAGCTCGGCGATAGGAGCATCATGTTTACGGTGCAGAACGAGGAC |
| 590 | tPA_IL18 | ATGGACGCCATGAAGAGGGGCCTCTGCTGCGTCCTCCTCCTCTGCGGC |
| | | GCCGTTTTCGTGAGCCCCAGCCAGGAGATCCACGCCCGTTTCAGGAGG |
| | | GGAGCCCGGTATTTCGGCAAGCTTGAGAGCAAGCTCAGCGTCATCAGG |
| | | AACCTAAACGACCAGGTTCTATTCATCGACCAGGGCAACAGACCCCTA |
| | | TTCGAGGACATGACCGATAGCGACTGTCGGGACAACGCCCCACGGACC |
| | | ATCTTCATCATCAGCATGTACAAGGATAGCCAGCCCAGGGGCATGGCC |
| | | GTCACCATCTCCGTGAAGTGTGAGAAGATCTCCACCCTGAGCTGTGAG |
| | | AACAAAATCATCAGCTTCAAGGAGATGAACCCGCCCGATAATATCAAG |
| | | GACACCAAGAGCGATATCATCTTCTTCCAGAGGAGCGTGCCGGGCCAC |
| | | GACAACAAGATGCAGTTCGAGTCCTCCAGCTACGAGGGTTACTTCCTC |
| | | GCCTGCGAGAAGGAACGTGACCTGTTCAAGCTCATCCTCAAAAAGGAG |
| | | GATGAGCTGGGGGACAGGAGCATAATGTTCACCGTGCAGAACGAAGAC |
| 591 | tPA_IL18 | ATGGACGCGATGAAGAGGGGCCTCTGTTGTGTCCTCCTCCTCTGCGGG |
| | | GCGGTCTTCGTCAGCCCCAGCCAGGAGATCCACGCCCGCTTCCGCCGG |
| | | GGCGCCCGGTACTTCGGCAAGCTCGAAAGCAAGTTGAGCGTTATCAGG |
| | | AACCTCAACGACCAAGTCCTTTTCATCGACCAAGGCAATAGGCCCCTC |
| | | TTCGAGGACATGACCGACAGCGACTGCCGGGACAACGCCCCGCGGACC |
| | | ATCTTCATCATCTCCATGTATAAGGACTCCCAGCCCAGGGGCATGGCC |
| | | GTCACCATCTCCGTGAAGTGTGAGAAGATCTCCACCCTGTCCTGCGAG |
| | | AACAAAATCATCAGCTTCAAGGAGATGAACCCGCCCGATAACATCAAA |
| | | GACACGAAGTCGGATATAATCTTCTTCCAGAGGAGCGTGCCCGGGCAT |
| | | GACAATAAGATGCAGTTCGAAAGCAGCTCCTACGAGGGCTACTTCCTC |
| | | GCCTGCGAGAAGGAACGGGATCTATTCAAGCTGATCCTGAAAAAAGAG |
| | | GACGAGCTGGGCGACCGCAGCATCATGTTCACCGTGCAGAACGAGGAC |
| 592 | tPA_IL18 | ATGGACGCCATGAAACGCGGTCTGTGCTGCGTTCTCCTCCTCTGCGGG |
| | | GCCGTCTTCGTTAGCCCCAGCCAGGAGATCCACGCCCGCTTCAGGAGG |
| | | GGCGCGAGGTATTTCGGCAAGTTGGAAAGCAAGCTCTCGGTCATCCGA |
| | | AACTTGAACGATCAGGTCCTCTTCATCGACCAGGGCAACAGGCCCCTC |
| | | TTCGAGGACATGACCGACAGCGACTGCCGGGATAACGCCCCCCGGACC |
| | | ATCTTCATCATCAGCATGTATAAGGACAGCCAGCCCCGCGGCATGGCC |
| | | GTCACCATCAGCGTGAAGTGCGAGAAAATCAGCACCCTGAGCTGCGAG |
| | | AACAAGATCATCTCCTTCAAGGAGATGAACCCGCCCGACAACATCAAG |
| | | GATACCAAAAGCGACATAATCTTCTTCCAGAGGTCGGTACCCGGCCAT |
| | | GACAACAAGATGCAGTTCGAGAGCAGCTCCTATGAGGGCTACTTCCTG |
| | | GCCTGCGAGAAGGAGAGGGATCTGTTTAAGCTCATCCTCAAGAAAGAA |
| | | GATGAGCTGGGGGACCGCAGCATCATGTTCACCGTGCAAAATGAGGAC |
| 593 | tPA_IL18 | ATGGACGCCATGAAGAGGGGCCTCTGTTGCGTCCTTCTCCTCTGCGGC |
| | | GCCGTATTCGTCAGCCCCAGCCAGGAGATACACGCCAGGTTCCGGAGG |
| | | GGCGCCCGGTATTTCGGAAAGCTCGAGAGCAAGCTCAGCGTCATCCGG |
| | | AACCTCAACGACCAGGTCCTCTTCATCGACCAGGGGAATCGGCCCTTG |
| | | TTCGAGGACATGACCGATTCCGACTGCAGAGATAACGCGCCCAGGACG |
| | | ATCTTCATCATCTCCATGTATAAGGACAGCCAGCCAAGGGGCATGGCC |
| | | GTCACCATCAGCGTGAAGTGCGAGAAGATCAGCACCCTGAGCTGCGAG |
| | | AACAAAATCATCTCCTTCAAGGAGATGAACCCGCCCGACAACATCAAG |
| | | GACACCAAGTCCGACATAATCTTTTTCCAGCGCAGCGTGCCCGGCCAT |
| | | GACAACAAGATGCAGTTCGAGAGCTCCTCCTACGAAGGCTACTTCCTG |
| | | GCCTGCGAGAAGGAGAGGGACCTGTTCAAGCTGATCCTGAAGAAGGAG |
| | | GACGAGCTGGGCGACCGGAGCATAATGTTCACCGTGCAGAACGAAGAC |
| 594 | tPA_IL18 | ATGGACGCCATGAAGCGGGGCTTATGTTGTGTCCTTCTCTTGTGCGGC |
| | | GCCGTATTCGTGAGCCCGAGCCAGGAGATCCACGCCCGCTTCAGGCGG |
| | | GGGGCGCGATACTTCGGCAAGCTCGAGAGCAAGCTCTCGGTTATCCGC |
| | | AACCTCAACGACCAGGTCCTCTTCATCGACCAGGGCAACCGTCCCCTC |
| | | TTCGAGGATATGACGGATTCAGATTGCAGGGACAACGCCCCCCGCACG |
| | | ATATTCATCATCAGCATGTACAAGGACAGCCAGCCCCGCGGCATGGCC |
| | | GTCACGATAAGCGTCAAGTGCGAAAAGATCAGCACCCTGAGCTGTGAG |
| | | AACAAGATCATCTCCTTCAAGGAAATGAACCCGCCGGACAACATCAAG |
| | | GACACGAAAAGCGACATCATATTCTTCCAAAGGAGCGTGCCCGGCCAC |
| | | GACAACAAGATGCAGTTCGAGTCCAGCAGCTACGAGGGCTACTTTCTG |
| | | GCCTGCGAAAAAGAACGCGACCTGTTCAAGCTGATCCTGAAGAAGGAG |
| | | GATGAGCTGGGGGACAGGAGCATCATGTTCACCGTGCAGAACGAGGAC |
| 595 | tPA_IL18 | ATGGACGCCATGAAACGCGGCCTCTGCTGCGTTCTCCTCCTCTGCGGC |
| | | GCGGTCTTCGTCAGCCCCAGCCAGGAGATTCACGCCCGCTTCAGAAGG |
| | | GGCGCCCGGTACTTCGGGAAGCTCGAGAGCAAGCTCAGCGTCATCAGG |
| | | AACTTGAACGATCAGGTTCTTTTCATCGATCAGGGGAACAGGCCCCTC |
| | | TTCGAGGACATGACAGACAGCGACTGTCGGGACAACGCCCCTAGAACC |
| | | ATCTTCATCATCAGCATGTACAAGGATTCCCAGCCCAGGGGCATGGCC |
| | | GTCACTATCAGCGTCAAGTGTGAGAAAATCTCCACCCTGAGCTGCGAG |
| | | AACAAAATCATCTCGTTCAAGGAGATGAACCCACCCGACAACATCAAA |
| | | GATACCAAGAGCGACATCATCTTCTTCCAACGGTCCGTGCCCGGCCAT |
| | | GATAACAAGATGCAGTTCGAGTCCTCCAGCTATGAAGGCTACTTCCTG |
| | | GCCTGCGAGAAGGAGAGGGACCTGTTCAAGCTGATCCTGAAGAAGGAG |
| | | GATGAGCTCGGCGACAGGAGCATCATGTTCACCGTGCAGAACGAGGAC |
| 596 | tPA_IL18 | ATGGACGCTATGAAGCGGGGCCTCTGCTGTGTCCTCCTCCTCTGTGGG |
| | | GCCGTCTTCGTGTCCCCGAGCCAGGAAATCCACGCCCGTTTTAGGAGG |
| | | GGGGCCCGGTACTTCGGCAAGCTCGAGAGCAAGCTCAGCGTCATAAGG |
| | | AATCTCAACGACCAGGTCCTCTTCATCGACCAAGGCAACCGGCCACTC |
| | | TTCGAAGATATGACGGACTCAGACTGCAGGGACAACGCTCCCCGCACG |
| | | ATCTTCATAATCTCCATGTATAAGGACTCGCAGCCCAGGGGCATGGCC |
| | | GTCACCATCTCCGTGAAGTGCGAGAAGATCTCCACCCTGAGCTGCGAG |
| | | AACAAAATCATCAGCTTCAAGGAGATGAACCCCCCGGACAACATCAAA |
| | | GACACGAAGTCCGACATAATCTTCTTCCAGCGGAGCGTGCCGGGCCAC |
| | | GACAATAAAATGCAGTTCGAATCCAGCTCCTACGAGGGCTACTTCCTG |
| | | GCCTGCGAGAAGGAGAGGGACCTGTTCAAGCTGATCCTGAAGAAGGAG |
| | | GACGAGCTGGGGGACCGGTCGATCATGTTCACGGTGCAGAATGAGGAC |
| 597 | tPA_IL18 | ATGGACGCGATGAAGCGGGGCCTCTGCTGTGTCCTCCTACTCTGCGGG |
| | | GCCGTCTTCGTTAGCCCGAGCCAGGAGATCCACGCCAGGTTCAGGCGC |
| | | GGCGCCCGATACTTCGGCAAGCTCGAGTCCAAGCTCTCCGTCATCCGG |
| | | AACCTCAACGACCAAGTCCTCTTCATCGACCAGGGCAACCGGCCGCTG |
| | | TTCGAGGACATGACCGACTCCGACTGTCGGGACAACGCCCCCAGGACC |
| | | ATCTTCATCATCAGTATGTATAAGGACTCCCAGCCCAGAGGCATGGCC |
| | | GTCACCATCAGCGTGAAATGCGAGAAGATCAGCACCCTGAGCTGCGAG |
| | | AATAAGATCATCAGCTTCAAGGAAATGAACCCCCCGGATAATATCAAA |
| | | GACACGAAGTCGGACATCATCTTCTTCCAGAGGAGCGTCCCCGGCCAC |
| | | GACAACAAGATGCAGTTCGAGAGCAGCAGCTATGAGGGGTACTTCCTG |
| | | GCGTGCGAGAAGGAGAGGGATCTGTTCAAGCTCATCCTCAAGAAGGAG |
| | | GACGAGCTGGGGGACAGGTCGATCATGTTCACCGTTCAGAACGAGGAC |
| 598 | tPA_IL18 | ATGGACGCCATGAAGCGGGGCCTATGCTGTGTTCTCCTCCTCTGTGGC |
| | | GCCGTCTTCGTGAGCCCCAGCCAGGAAATCCACGCGAGGTTCAGGCGG |
| | | GGCGCCCGGTACTTCGGGAAGCTCGAGTCCAAGCTCAGCGTAATCCGA |
| | | AACCTAAACGACCAGGTCTTGTTCATCGACCAGGGCAACCGGCCCCTC |
| | | TTCGAGGACATGACCGACAGCGACTGCCGGGACAACGCCCCCAGGACC |
| | | ATATTCATCATCAGCATGTACAAGGACAGCCAGCCCAGGGGTATGGCC |
| | | GTCACGATTAGCGTCAAGTGCGAGAAGATCTCCACGCTCAGCTGCGAG |
| | | AACAAGATCATCAGCTTCAAGGAGATGAATCCACCCGACAATATCAAG |
| | | GACACCAAAAGCGACATCATCTTCTTTCAGCGTTCCGTGCCCGGCCAC |
| | | GACAACAAGATGCAGTTCGAGTCCAGCAGCTACGAAGGTTACTTCCTG |
| | | GCCTGCGAAAAAGAAAGGGACCTGTTCAAGCTCATCCTGAAGAAAGAG |
| | | GATGAGCTGGGCGACAGGAGCATCATGTTTACGGTGCAGAACGAGGAC |
| 599 | tPA_IL18 | ATGGACGCCATGAAGAGGGGCTTATGCTGCGTACTCCTCCTATGCGGC |
| | | GCCGTTTTCGTGAGCCCCAGCCAGGAGATCCACGCCCGGTTCCGGAGG |
| | | GGGGCCAGGTACTTCGGTAAGCTGGAGTCCAAGCTCTCCGTCATCCGG |
| | | AACTTGAACGATCAGGTCCTTTTCATCGACCAGGGCAACAGGCCCTTA |
| | | TTCGAGGACATGACGGACTCCGACTGCAGGGATAACGCCCCGAGGACC |
| | | ATCTTCATCATCAGCATGTACAAGGACAGCCAGCCCAGGGGCATGGCG |
| | | GTCACCATCAGCGTGAAGTGCGAGAAGATTTCCACCCTGAGCTGCGAG |
| | | AACAAGATCATCAGCTTCAAAGAGATGAACCCGCCGGACAATATCAAG |
| | | GACACGAAGTCCGACATCATCTTTTTCCAGCGGTCCGTCCCGGGACAC |
| | | GACAACAAGATGCAGTTTGAGTCGAGCTCTTACGAAGGCTATTTCCTT |
| | | GCCTGCGAGAAGGAGCGGGATCTCTTCAAACTGATCCTGAAGAAGGAG |
| | | GACGAGCTGGGGGACCGGTCCATCATGTTTACCGTCCAAAACGAAGAC |
| 600 | tPA_IL18 | ATGGACGCCATGAAACGGGGCCTCTGCTGCGTCCTCCTACTTTGCGGC |
| | | GCCGTCTTCGTAAGCCCCAGCCAGGAGATCCACGCCAGGTTTCGGCGC |
| | | GGCGCCAGGTACTTCGGGAAACTCGAGTCCAAGCTCAGCGTCATCAGG |
| | | AACCTTAACGACCAGGTCCTCTTCATCGACCAGGGCAACAGGCCGCTG |
| | | TTCGAGGACATGACCGACTCCGACTGCCGCGACAACGCCCCGAGGACC |
| | | ATCTTTATTATCAGCATGTACAAGGACTCCCAGCCCCGCGGAATGGCC |
| | | GTCACCATCTCCGTGAAGTGCGAGAAAATCTCCACCCTGAGCTGTGAG |
| | | AACAAGATCATCAGCTTCAAGGAGATGAACCCGCCCGACAATATCAAG |
| | | GACACCAAGTCGGACATCATCTTCTTTCAGAGGTCCGTCCCCGGCCAC |
| | | GATAACAAGATGCAGTTCGAGTCCAGCTCCTACGAGGGTTACTTCCTC |
| | | GCCTGCGAGAAGGAGAGGGACCTGTTCAAGCTGATCCTGAAAAAGGAG |
| | | GACGAGCTGGGCGATCGCAGCATCATGTTCACGGTGCAGAACGAAGAT |
| 601 | tPA_IL18 | ATGGACGCCATGAAGCGCGGACTCTGCTGCGTCCTCCTCCTCTGCGGG |
| | | GCGGTCTTCGTTAGCCCCAGCCAGGAGATTCACGCCCGGTTCCGTAGG |
| | | GGCGCGAGATACTTCGGGAAGCTCGAGTCCAAGCTATCAGTCATCAGG |
| | | AACCTAAACGACCAGGTCCTCTTCATCGACCAGGGCAACAGGCCCCTC |
| | | TTCGAGGACATGACCGATAGCGACTGTCGCGACAACGCGCCCCGGACC |
| | | ATCTTTATCATCAGCATGTACAAGGATAGCCAGCCCAGGGGCATGGCC |
| | | GTCACCATCTCGGTGAAGTGTGAGAAAATCAGCACCCTCTCATGTGAA |
| | | AACAAGATCATCAGCTTCAAAGAGATGAATCCCCCCGACAACATCAAG |
| | | GACACCAAGAGCGACATCATCTTCTTCCAGCGTTCGGTGCCCGGCCAT |
| | | GACAACAAGATGCAGTTCGAGTCCAGCTCCTACGAGGGCTACTTCCTG |
| | | GCCTGCGAGAAGGAGAGGGACCTGTTCAAACTGATCCTCAAGAAGGAG |
| | | GACGAGCTGGGCGACAGGAGCATTATGTTCACGGTGCAGAACGAGGAC |
| 602 | tPA_IL18 | ATGGACGCGATGAAGAGGGGGCTCTGCTGTGTCCTCTTATTGTGCGGG |
| | | GCAGTCTTCGTCTCCCCCAGCCAGGAGATCCACGCCCGATTTAGGAGG |
| | | GGCGCCCGGTACTTCGGGAAGCTCGAGAGCAAGTTGAGCGTGATCCGG |
| | | AACCTCAACGACCAGGTCCTCTTTATCGACCAGGGCAACAGACCGCTG |
| | | TTCGAGGACATGACCGACAGCGATTGCCGCGACAACGCCCCCAGGACC |
| | | ATCTTCATCATCAGCATGTACAAGGATAGCCAACCGCGGGGGATGGCC |
| | | GTCACCATCAGCGTGAAATGTGAGAAGATCAGCACGCTGAGCTGTGAG |
| | | AACAAGATCATCTCCTTCAAGGAAATGAATCCCCCCGACAACATCAAA |
| | | GACACTAAGAGCGACATCATCTTCTTCCAGCGCAGCGTGCCCGGCCAC |
| | | GATAACAAGATGCAGTTCGAGAGCAGCTCCTACGAGGGCTACTTCCTG |
| | | GCCTGTGAGAAGGAGAGGGATCTGTTCAAGCTGATCCTGAAGAAGGAG |
| | | GACGAGCTCGGGGATCGGAGCATCATGTTCACCGTGCAGAACGAGGAC |
| 603 | tPA_IL18 | ATGGACGCCATGAAACGGGGTTTGTGCTGCGTCCTCTTGCTCTGCGGG |
| | | GCCGTATTCGTTTCCCCCAGCCAGGAGATCCACGCCCGGTTCAGGCGG |
| | | GGCGCCAGGTACTTCGGGAAGCTCGAGAGTAAGCTAAGCGTCATCCGT |
| | | AACCTCAACGACCAGGTCCTCTTCATCGATCAGGGCAACAGGCCCCTC |
| | | TTCGAGGACATGACCGATAGCGACTGCCGGGACAACGCCCCCCGGACC |
| | | ATCTTTATCATCAGCATGTACAAGGACAGCCAGCCCAGAGGGATGGCC |
| | | GTCACCATCAGCGTGAAGTGCGAGAAAATCTCCACACTGTCATGCGAG |
| | | AACAAGATCATCTCCTTTAAGGAGATGAATCCGCCTGACAACATAAAG |
| | | GACACCAAGTCCGACATCATCTTCTTCCAACGGAGCGTACCCGGCCAT |
| | | GATAACAAGATGCAGTTCGAGAGCAGCAGCTACGAGGGCTACTTCCTG |
| | | GCCTGCGAAAAGGAGCGAGATCTCTTCAAGCTGATCCTGAAGAAGGAG |
| | | GACGAGCTGGGCGACCGCAGCATTATGTTCACGGTGCAGAACGAGGAT |
| 604 | tPA_IL18 | ATGGACGCCATGAAGAGGGGCCTTTGTTGTGTCCTCCTCCTCTGCGGG |
| | | GCCGTCTTCGTGAGCCCCTCGCAAGAGATCCACGCCCGGTTTAGGCGG |
| | | GGCGCCCGGTACTTCGGGAAGCTTGAAAGCAAGCTCAGCGTTATCCGC |
| | | AACCTCAACGATCAGGTCCTTTTCATCGATCAGGGCAACCGCCCCCTC |
| | | TTCGAGGATATGACCGACTCCGATTGCAGGGATAACGCCCCCAGGACC |
| | | ATCTTTATCATCAGCATGTACAAGGACAGCCAGCCCAGGGGCATGGCC |
| | | GTAACCATCAGCGTGAAGTGCGAAAAGATTTCCACCCTCTCCTGCGAG |
| | | AACAAAATCATCTCCTTCAAGGAGATGAATCCCCCTGACAATATCAAG |
| | | GACACCAAGAGCGACATCATCTTTTTCCAGAGGTCCGTGCCCGGACAC |
| | | GACAACAAGATGCAGTTCGAGAGCTCCAGCTACGAAGGCTACTTCCTG |
| | | GCCTGCGAGAAAGAGCGGGACCTGTTCAAGCTAATCCTGAAGAAGGAA |
| | | GATGAGCTGGGCGATCGGAGCATCATGTTCACCGTCCAAAACGAGGAT |
| 605 | tPA_IL18 | ATGGACGCGATGAAGCGAGGGCTCTGCTGCGTCCTCCTCCTCTGCGGC |
| | | GCCGTCTTCGTCAGCCCCAGCCAGGAGATCCACGCCAGGTTCAGGAGG |
| | | GGGGCTAGGTATTTCGGGAAGCTTGAGTCCAAGCTCTCCGTTATCAGG |
| | | AACCTCAACGACCAGGTCCTCTTCATCGACCAGGGCAACCGGCCCCTC |
| | | TTCGAGGACATGACCGACAGCGACTGCAGGGACAACGCCCCCAGGACC |
| | | ATCTTCATCATCAGCATGTACAAGGATTCCCAGCCAAGGGGCATGGCC |
| | | GTCACAATCTCCGTGAAGTGTGAGAAAATCAGCACCCTGAGCTGCGAA |
| | | AACAAGATAATCAGCTTCAAGGAGATGAACCCGCCCGATAACATCAAG |
| | | GACACCAAGAGCGATATCATTTTCTTCCAGCGCAGCGTGCCCGGCCAT |
| | | GACAACAAGATGCAGTTCGAAAGCTCGAGCTATGAGGGCTACTTCCTG |
| | | GCCTGCGAGAAGGAGAGGGACCTGTTCAAGCTCATCCTGAAGAAGGAG |
| | | GATGAGCTGGGGGACAGGAGCATTATGTTCACGGTCCAGAACGAGGAC |
| 606 | tPA_IL18 | ATGGACGCCATGAAGAGGGGGTTGTGCTGCGTCCTTCTCCTCTGCGGG |
| | | GCCGTCTTCGTGAGCCCGAGCCAGGAGATACACGCCAGGTTCAGGAGG |
| | | GGCGCCCGCTATTTCGGCAAGCTTGAAAGCAAGCTCAGCGTCATCCGG |
| | | AACCTCAACGACCAGGTCCTCTTTATCGACCAGGGGAACAGGCCCTTG |
| | | TTCGAGGATATGACGGACTCCGACTGTAGGGACAACGCCCCCCGAACC |
| | | ATCTTTATCATCAGCATGTACAAGGACAGCCAGCCCAGGGGCATGGCC |
| | | GTCACGATCAGCGTGAAGTGCGAGAAAATCAGCACACTCAGCTGTGAG |
| | | AACAAGATCATCAGCTTTAAAGAGATGAACCCGCCCGACAACATCAAG |
| | | GACACCAAGAGCGACATCATCTTCTTCCAGCGCAGTGTGCCCGGCCAC |
| | | GATAACAAAATGCAGTTCGAGTCCAGCAGCTACGAGGGCTACTTCCTG |
| | | GCCTGTGAGAAGGAGAGGGACCTGTTCAAGCTGATCCTGAAGAAGGAG |
| | | GATGAGCTCGGCGACAGGAGCATCATGTTTACGGTGCAGAACGAGGAC |
| 607 | tPA_IL18 | ATGGACGCCATGAAGAGGGGACTCTGCTGCGTACTCCTTCTCTGCGGC |
| | | GCCGTCTTCGTCAGCCCGAGCCAGGAAATCCACGCCCGGTTCCGGCGG |
| | | GGGGCCAGGTACTTCGGCAAGCTCGAGAGCAAGCTCAGCGTCATCCGG |
| | | AACCTCAACGATCAGGTCCTCTTCATCGACCAGGGCAACAGGCCCCTC |
| | | TTCGAGGACATGACGGACAGCGACTGCAGAGACAACGCCCCGAGGACT |
| | | ATCTTCATCATCAGCATGTACAAGGACAGCCAGCCCCGCGGCATGGCG |
| | | GTCACCATTTCGGTGAAGTGCGAGAAGATAAGCACGCTCAGCTGCGAA |
| | | AACAAGATCATCTCCTTTAAGGAGATGAACCCGCCGGACAACATCAAG |
| | | GACACCAAGAGCGACATCATCTTCTTCCAGAGGAGCGTGCCCGGCCAC |
| | | GACAATAAGATGCAGTTCGAGTCCTCCAGCTATGAGGGTTACTTCCTG |
| | | GCCTGCGAGAAGGAGAGGGACCTGTTCAAACTGATACTGAAGAAGGAA |
| | | GACGAGCTGGGCGATAGGTCCATAATGTTCACCGTGCAGAACGAGGAC |
| 608 | IL18_WT | ATGGCCGCCGAGCCAGTTGAAGACAACTGCATCAACTTCGTCGCCATG |
| | | AAGTTTATCGACAACACGCTCTACTTTATCGCCGAGGACGACGAGAAT |
| | | CTCGAGTCCGACTACTTCGGCAAACTCGAGAGCAAGCTCAGCGTCATC |
| | | CGGAACCTAAACGACCAGGTCCTTTTCATCGACCAGGGCAACAGGCCG |
| | | CTGTTCGAAGACATGACCGACTCCGATTGCAGGGATAACGCCCCGAGG |
| | | ACCATATTCATCATCTCGATGTATAAGGACTCCCAGCCCAGGGGCATG |
| | | GCCGTCACGATCTCCGTGAAGTGCGAGAAGATCTCCACCCTCTCCTGC |
| | | GAGAACAAGATCATCTCCTTCAAGGAGATGAATCCCCCCGACAACATA |
| | | AAGGACACCAAGTCCGACATTATCTTCTTCCAGAGGAGCGTGCCTGGC |
| | | CATGACAACAAGATGCAGTTCGAGTCCAGCTCCTACGAGGGCTACTTC |
| | | CTGGCCTGCGAGAAGGAGCGGGACCTGTTCAAGCTGATCCTCAAGAAG |
| | | GAGGACGAGCTGGGGGATAGGTCCATCATGTTCACCGTGCAGAACGAG |
| | | GAC |
| 609 | IL18_WT | ATGGCCGCCGAGCCCGTCGAGGATAACTGCATCAACTTCGTTGCCATG |
| | | AAGTTCATCGACAACACGCTCTACTTCATCGCGGAGGACGACGAGAAC |
| | | CTCGAGTCCGATTACTTCGGCAAGCTTGAGTCCAAGCTTAGCGTCATC |
| | | AGGAATCTCAACGACCAGGTTTTGTTCATCGACCAGGGCAACAGGCCC |
| | | CTATTCGAAGACATGACCGATTCAGACTGTCGGGACAACGCCCCCAGG |
| | | ACCATCTTCATAATAAGCATGTACAAGGATTCCCAGCCCAGGGGCATG |
| | | GCCGTCACCATCTCCGTGAAGTGCGAGAAGATCTCCACCCTCAGCTGC |
| | | GAGAATAAGATCATCTCCTTCAAGGAGATGAACCCGCCCGACAACATC |
| | | AAGGACACTAAGTCCGACATCATCTTCTTCCAGAGGAGCGTCCCCGGC |
| | | CATGATAACAAGATGCAGTTCGAGAGCAGCAGCTACGAGGGGTACTTC |
| | | CTGGCCTGCGAGAAGGAGAGGGATCTGTTCAAGCTCATCCTCAAAAAG |
| | | GAGGACGAGCTGGGGGACAGGTCCATCATGTTCACCGTGCAGAACGAG |
| | | GAC |
| 610 | IL18_WT | ATGGCGGCCGAGCCCGTCGAAGACAACTGCATCAACTTCGTCGCCATG |
| | | AAGTTCATCGACAACACACTCTACTTCATCGCCGAGGACGACGAGAAC |
| | | CTCGAGAGCGACTACTTCGGGAAACTCGAGAGCAAGCTATCCGTCATC |
| | | AGGAACCTCAACGACCAGGTCCTCTTCATCGACCAGGGCAACAGGCCC |
| | | CTCTTCGAGGACATGACGGATAGCGATTGCAGGGATAACGCCCCTAGG |
| | | ACCATCTTCATCATCTCCATGTACAAGGACAGCCAGCCGAGAGGCATG |
| | | GCGGTCACCATTTCCGTGAAGTGCGAGAAGATCAGCACCCTGAGCTGC |
| | | GAGAACAAGATCATCAGCTTTAAAGAGATGAACCCGCCGGACAACATA |
| | | AAAGACACTAAGAGCGACATCATCTTCTTCCAGAGGAGCGTCCCCGGC |
| | | CACGACAACAAGATGCAGTTCGAGTCCAGCAGCTACGAGGGGTACTTC |
| | | CTGGCCTGCGAGAAGGAGAGGGATCTGTTCAAGCTGATCCTCAAGAAA |
| | | GAGGACGAGCTGGGTGACCGAAGCATCATGTTCACCGTGCAGAACGAG |
| | | GAC |
| 611 | IL18_WT | ATGGCGGCCGAGCCAGTCGAGGACAACTGCATCAATTTCGTCGCCATG |
| | | AAGTTCATCGACAACACCTTGTACTTCATCGCCGAGGACGACGAGAAC |
| | | CTCGAGAGCGATTACTTCGGCAAGCTCGAGAGCAAGTTGAGCGTAATC |
| | | AGGAACTTGAACGACCAGGTCCTCTTCATCGACCAGGGCAACAGGCCC |
| | | CTTTTCGAGGATATGACCGACAGCGACTGCAGGGACAACGCGCCTCGC |
| | | ACCATCTTTATCATCAGCATGTACAAGGATTCCCAGCCCAGGGGGATG |
| | | GCCGTCACCATATCGGTGAAGTGCGAGAAAATCTCCACCCTGAGCTGC |
| | | GAGAACAAGATCATCAGCTTTAAGGAGATGAATCCCCCCGACAATATC |
| | | AAGGACACCAAGTCCGACATCATCTTCTTCCAGAGGTCGGTCCCCGGT |
| | | CACGATAATAAGATGCAGTTTGAGTCCAGCTCCTACGAGGGCTACTTT |
| | | CTGGCCTGCGAGAAGGAGCGGGACCTGTTCAAACTGATTCTGAAGAAG |
| | | GAGGACGAGCTGGGGGATAGGAGCATCATGTTCACCGTCCAAAACGAG |
| | | GAC |
| 612 | IL18_WT | ATGGCCGCCGAGCCCGTAGAGGATAACTGCATCAACTTCGTTGCCATG |
| | | AAGTTCATCGACAACACGTTGTACTTCATCGCCGAGGACGACGAGAAC |
| | | CTCGAGTCCGATTACTTCGGCAAGCTCGAGAGCAAACTTTCCGTCATT |
| | | AGGAATCTCAACGACCAGGTCCTCTTCATCGACCAGGGCAATAGGCCC |
| | | CTCTTCGAGGACATGACCGACTCCGACTGCAGGGACAACGCCCCCAGG |
| | | ACCATCTTCATCATCTCCATGTACAAGGACAGCCAGCCCCGGGGCATG |
| | | GCCGTCACCATCAGCGTGAAGTGCGAAAAGATCAGCACCCTGAGCTGT |
| | | GAGAACAAGATCATCAGCTTCAAGGAGATGAACCCGCCCGACAACATC |
| | | AAGGACACGAAGTCCGATATCATCTTCTTCCAACGCTCCGTGCCCGGC |
| | | CACGACAACAAGATGCAGTTCGAATCCAGCTCATACGAGGGGTACTTC |
| | | CTGGCGTGCGAGAAGGAGAGAGATCTGTTCAAGCTGATCCTGAAAAAG |
| | | GAGGACGAGCTGGGCGACAGGAGCATCATGTTCACGGTCCAGAACGAG |
| | | GAC |
| 613 | IL18_WT | ATGGCCGCCGAGCCCGTCGAGGACAACTGCATCAACTTCGTAGCGATG |
| | | AAGTTCATCGACAATACCCTCTACTTCATCGCCGAGGACGACGAGAAC |
| | | CTCGAGAGCGACTACTTCGGCAAACTCGAGAGCAAGCTCAGCGTCATC |
| | | AGGAACTTGAACGACCAAGTCCTCTTCATAGATCAGGGCAACAGGCCC |
| | | CTCTTCGAGGATATGACCGATAGCGACTGCCGGGACAACGCCCCGAGG |
| | | ACCATCTTCATCATCAGCATGTACAAGGACAGCCAGCCCAGGGGCATG |
| | | GCGGTCACCATCTCGGTGAAGTGCGAGAAGATCTCCACCCTGAGCTGT |
| | | GAGAACAAGATCATCAGCTTCAAGGAGATGAACCCTCCCGACAACATC |
| | | AAGGACACCAAAAGCGATATAATCTTCTTTCAGAGGAGCGTGCCCGGC |
| | | CACGACAACAAGATGCAGTTTGAGTCCTCGAGCTACGAGGGCTACTTC |
| | | CTGGCATGCGAAAAGGAACGGGACCTGTTCAAGCTGATCCTGAAGAAA |
| | | GAGGACGAGCTGGGGGACCGGAGCATCATGTTCACCGTGCAGAATGAG |
| | | GAT |
| 614 | IL18_WT | ATGGCCGCCGAGCCCGTAGAAGATAACTGCATCAACTTCGTCGCGATG |
| | | AAGTTTATCGACAATACGCTATACTTCATCGCCGAGGACGACGAAAAC |
| | | CTCGAGTCCGACTACTTCGGAAAGCTTGAGAGCAAGCTCAGCGTCATC |
| | | CGGAACCTCAACGACCAGGTCCTCTTTATCGACCAGGGCAACCGGCCG |
| | | CTGTTCGAGGACATGACCGACTCCGACTGCCGGGACAACGCCCCGCGA |
| | | ACCATATTCATCATCAGCATGTACAAGGACAGCCAGCCCCGCGGCATG |
| | | GCCGTAACTATCAGCGTCAAGTGCGAGAAGATCAGCACCCTGAGCTGC |
| | | GAAAATAAGATCATCTCCTTTAAGGAGATGAACCCGCCCGATAACATC |
| | | AAGGATACCAAGTCCGACATCATCTTTTTCCAGAGGAGCGTGCCCGGC |
| | | CACGATAATAAGATGCAGTTCGAGAGCAGCAGCTACGAGGGGTACTTC |
| | | CTGGCCTGCGAGAAGGAGAGGGATCTCTTCAAGCTGATCCTGAAGAAA |
| | | GAGGATGAACTGGGCGACAGAAGCATCATGTTCACCGTGCAAAACGAG |
| | | GAC |
| 615 | IL18_WT | ATGGCCGCCGAGCCCGTTGAGGACAACTGCATTAACTTCGTCGCGATG |
| | | AAGTTCATCGATAACACCCTCTACTTCATCGCCGAGGACGACGAGAAC |
| | | CTCGAGAGCGATTACTTCGGGAAGCTTGAATCCAAGCTCAGCGTAATC |
| | | AGGAACCTTAACGACCAGGTCCTCTTTATCGACCAGGGCAACAGGCCG |
| | | CTGTTCGAGGATATGACCGACAGCGACTGCAGGGACAACGCCCCCAGG |
| | | ACCATCTTCATCATCTCCATGTACAAGGACAGCCAGCCCAGGGGCATG |
| | | GCCGTCACCATCAGCGTGAAGTGCGAGAAGATCAGCACCCTGTCCTGC |
| | | GAAAACAAGATCATCTCCTTCAAGGAGATGAACCCGCCCGACAACATC |
| | | AAGGATACAAAGTCCGACATCATCTTTTTCCAGCGGAGCGTGCCCGGC |
| | | CACGACAACAAGATGCAGTTCGAGAGCAGCAGCTACGAGGGGTACTTC |
| | | CTGGCGTGCGAGAAGGAGCGGGATCTGTTCAAGCTGATCCTGAAGAAG |
| | | GAGGACGAGCTCGGCGACCGGTCCATCATGTTCACTGTCCAGAACGAA |
| | | GAC |
| 616 | IL18_WT | ATGGCCGCGGAGCCCGTCGAGGACAACTGTATCAACTTCGTCGCGATG |
| | | AAGTTCATCGACAATACCCTCTACTTCATCGCCGAGGACGACGAGAAC |
| | | CTCGAAAGCGACTACTTCGGCAAGCTCGAGTCCAAGCTCTCCGTTATC |
| | | AGGAACCTCAACGACCAGGTCCTCTTTATCGACCAGGGCAACAGGCCT |
| | | CTCTTCGAGGACATGACCGACTCGGATTGTCGGGACAACGCCCCGCGG |
| | | ACCATCTTTATCATCAGCATGTACAAGGATTCGCAGCCCAGGGGCATG |
| | | GCCGTCACCATCAGCGTGAAATGCGAGAAAATTTCCACCCTGAGCTGC |
| | | GAGAACAAGATAATCAGCTTCAAAGAGATGAACCCGCCCGACAACATC |
| | | AAGGACACAAAGAGCGACATCATCTTCTTTCAGCGCAGCGTGCCCGGC |
| | | CACGACAACAAGATGCAGTTCGAGAGCAGCAGCTATGAGGGGTACTTT |
| | | CTGGCCTGCGAGAAGGAGAGGGATCTGTTCAAGCTCATACTCAAGAAG |
| | | GAGGATGAGCTGGGGGACAGGAGCATTATGTTCACCGTGCAGAACGAG |
| | | GAC |
| 617 | IL18_WT | ATGGCCGCCGAGCCCGTCGAGGACAACTGCATCAACTTCGTCGCCATG |
| | | AAGTTCATCGACAACACGCTCTACTTCATCGCGGAGGACGACGAGAAT |
| | | CTCGAGTCCGATTATTTCGGTAAGCTAGAGTCCAAACTCAGCGTAATC |
| | | AGGAACCTCAACGATCAGGTTCTCTTTATCGACCAGGGGAACAGGCCC |
| | | CTCTTCGAGGATATGACCGACAGCGACTGCAGGGATAACGCCCCGCGG |
| | | ACCATCTTCATCATCTCCATGTATAAGGACTCCCAGCCCAGGGGCATG |
| | | GCCGTCACCATAAGCGTCAAGTGCGAGAAGATCAGCACGCTCAGCTGT |
| | | GAGAACAAGATCATCTCCTTCAAGGAGATGAATCCCCCCGACAACATC |
| | | AAGGACACCAAGAGCGACATCATCTTTTTCCAAAGGAGCGTGCCCGGC |
| | | CACGACAACAAGATGCAGTTCGAGTCCTCTTCCTACGAGGGGTATTTT |
| | | CTGGCCTGCGAGAAGGAACGGGACCTGTTTAAGCTGATCCTGAAAAAG |
| | | GAGGATGAGCTGGGCGACAGGAGCATCATGTTCACGGTGCAGAACGAG |
| | | GAC |
| 618 | IL18_WT | ATGGCCGCCGAGCCGGTCGAGGACAACTGTATCAACTTCGTTGCCATG |
| | | AAGTTTATCGACAATACCCTATACTTCATCGCGGAGGACGACGAGAAC |
| | | CTCGAGTCCGATTACTTCGGCAAGCTCGAGAGCAAACTCTCCGTCATC |
| | | CGGAACCTCAACGACCAGGTCCTCTTCATCGACCAGGGCAACAGGCCG |
| | | CTATTCGAGGACATGACCGATAGCGATTGCAGGGACAACGCGCCGAGG |
| | | ACCATCTTCATCATCTCCATGTACAAGGACAGCCAACCCCGCGGGATG |
| | | GCCGTCACCATAAGCGTGAAGTGCGAAAAGATCAGCACACTGTCATGT |
| | | GAGAACAAAATCATCTCGTTCAAGGAGATGAACCCACCCGACAACATC |
| | | AAGGACACGAAGTCCGACATCATCTTTTTCCAGCGGAGCGTGCCCGGC |
| | | CACGATAACAAGATGCAGTTCGAGAGCTCCAGCTACGAAGGTTACTTC |
| | | CTGGCGTGCGAGAAGGAGCGGGATCTGTTTAAGCTGATCCTGAAAAAG |
| | | GAGGATGAGCTGGGGGACCGCAGCATCATGTTCACCGTGCAGAATGAG |
| | | GAC |
| 619 | IL18_WT | ATGGCCGCGGAGCCCGTTGAGGACAACTGCATCAACTTCGTTGCCATG |
| | | AAGTTCATCGACAACACGTTGTACTTCATAGCCGAGGACGACGAGAAC |
| | | CTCGAGTCCGATTACTTCGGCAAACTCGAGAGCAAGCTCAGCGTCATC |
| | | AGGAATCTCAACGACCAGGTATTATTCATCGACCAGGGCAACAGGCCC |
| | | CTCTTCGAGGATATGACCGACAGCGACTGTCGGGACAACGCCCCGAGG |
| | | ACCATCTTTATCATAAGCATGTACAAGGACTCCCAGCCCCGAGGCATG |
| | | GCAGTCACCATCAGCGTAAAGTGCGAAAAAATCTCCACCCTGAGCTGC |
| | | GAGAACAAGATCATCTCCTTCAAGGAGATGAACCCTCCCGACAACATC |
| | | AAGGATACCAAGAGCGACATCATCTTCTTCCAGAGGTCCGTGCCCGGC |
| | | CATGACAACAAGATGCAGTTCGAGAGCTCCAGCTACGAGGGGTACTTC |
| | | CTGGCCTGCGAGAAGGAGAGAGATCTGTTCAAGCTGATCCTCAAGAAG |
| | | GAGGACGAGCTGGGGGACCGGAGCATCATGTTCACAGTCCAGAATGAG |
| | | GAC |
| 620 | IL18_WT | ATGGCCGCCGAGCCCGTCGAGGACAACTGCATCAACTTCGTCGCCATG |
| | | AAGTTTATCGATAATACCCTCTACTTTATCGCCGAGGACGACGAGAAT |
| | | CTCGAAAGCGATTACTTCGGAAAGCTCGAATCCAAGCTAAGCGTCATC |
| | | CGGAACCTCAACGACCAGGTTCTCTTTATCGACCAGGGCAACCGCCCC |
| | | CTCTTCGAGGACATGACCGACAGCGATTGCAGGGACAACGCACCCCGG |
| | | ACGATCTTCATCATCAGCATGTACAAGGACAGCCAGCCCCGGGGCATG |
| | | GCCGTCACCATCAGCGTGAAGTGTGAAAAGATCTCCACCCTCAGCTGC |
| | | GAGAACAAGATCATCTCCTTCAAGGAGATGAACCCCCCAGACAACATC |
| | | AAGGACACCAAGTCCGACATCATCTTCTTCCAAAGGAGCGTGCCGGGC |
| | | CACGACAACAAGATGCAGTTCGAGTCCAGCTCATACGAGGGGTACTTC |
| | | CTGGCGTGCGAGAAGGAGCGGGACCTGTTCAAGCTCATCCTCAAGAAG |
| | | GAGGATGAGCTCGGGGACAGGTCCATAATGTTCACCGTCCAGAACGAA |
| | | GAC |
| 621 | IL18_WT | ATGGCCGCCGAGCCCGTCGAGGATAATTGTATCAACTTCGTCGCGATG |
| | | AAGTTCATCGACAACACCCTCTACTTCATCGCCGAGGACGACGAGAAC |
| | | CTCGAATCCGACTACTTCGGCAAGCTCGAGTCCAAGCTCAGCGTCATC |
| | | AGGAACCTTAACGACCAGGTCCTCTTCATCGATCAAGGGAATCGACCC |
| | | CTATTCGAGGATATGACCGACAGCGACTGTCGGGACAACGCCCCCCGG |
| | | ACCATCTTCATCATCAGCATGTACAAAGACTCCCAGCCGAGGGGGATG |
| | | GCCGTCACCATCAGCGTGAAGTGCGAAAAAATAAGCACCCTGTCGTGT |
| | | GAGAACAAAATCATCAGCTTCAAGGAGATGAACCCCCCGGACAACATA |
| | | AAGGACACCAAGAGCGACATCATCTTCTTCCAGAGGAGTGTCCCCGGG |
| | | CACGACAACAAGATGCAGTTTGAGAGCTCCAGCTACGAGGGCTACTTC |
| | | CTGGCTTGCGAGAAGGAGAGGGACCTGTTCAAGCTCATCCTCAAAAAG |
| | | GAGGACGAGCTGGGCGACAGGAGCATCATGTTCACCGTCCAGAACGAA |
| | | GAC |
| 622 | IL18_WT | ATGGCCGCCGAACCCGTCGAAGACAACTGCATCAACTTCGTTGCCATG |
| | | AAGTTCATCGACAACACCCTCTACTTTATCGCAGAGGACGACGAGAAC |
| | | CTCGAGAGCGACTACTTCGGAAAGCTCGAGAGCAAGCTCAGCGTAATC |
| | | AGGAACCTCAACGACCAGGTCCTGTTCATCGACCAGGGCAACAGGCCC |
| | | CTCTTCGAAGACATGACGGACTCCGATTGCCGCGATAACGCCCCCAGG |
| | | ACCATCTTCATCATCAGCATGTACAAGGACAGCCAGCCCCGAGGCATG |
| | | GCCGTCACCATATCCGTCAAGTGCGAGAAGATCTCGACGCTGAGCTGC |
| | | GAGAACAAGATCATCAGCTTCAAGGAGATGAACCCACCCGACAACATC |
| | | AAGGACACGAAAAGCGATATCATCTTCTTCCAGAGGTCAGTTCCCGGG |
| | | CACGACAATAAGATGCAGTTCGAGTCGAGCAGCTACGAGGGGTACTTC |
| | | CTGGCGTGCGAGAAGGAGAGGGACCTGTTCAAGCTCATCCTGAAGAAG |
| | | GAAGATGAGCTGGGTGACAGGAGCATCATGTTCACCGTGCAGAACGAA |
| | | GAC |
| 623 | IL18_WT | ATGGCCGCCGAGCCCGTCGAGGATAATTGCATCAACTTCGTCGCCATG |
| | | AAATTTATCGACAACACCCTCTACTTTATCGCCGAGGACGACGAGAAC |
| | | CTCGAATCCGATTACTTCGGCAAGCTCGAGAGCAAGCTCTCGGTCATC |
| | | CGGAACCTCAACGATCAAGTACTCTTCATCGACCAGGGCAACAGGCCC |
| | | CTCTTCGAGGATATGACCGACTCCGACTGCAGGGACAACGCCCCCAGG |
| | | ACCATCTTCATCATCAGCATGTACAAGGACAGCCAGCCCAGGGGGATG |
| | | GCCGTAACCATCTCCGTGAAGTGCGAGAAAATAAGCACCCTGAGCTGT |
| | | GAGAACAAGATCATCAGCTTCAAGGAGATGAACCCCCCGGACAACATC |
| | | AAGGACACAAAGAGCGACATTATCTTCTTCCAGAGGAGCGTGCCAGGG |
| | | CACGATAACAAGATGCAGTTCGAATCCTCCTCCTATGAGGGGTACTTC |
| | | TTGGCGTGCGAGAAGGAGAGGGACCTCTTCAAGCTGATCCTCAAGAAA |
| | | GAGGATGAGCTGGGGGATAGGAGCATCATGTTCACCGTCCAGAACGAG |
| | | GAC |
| 624 | IL18_WT | ATGGCCGCCGAGCCCGTCGAGGACAACTGCATCAACTTCGTCGCCATG |
| | | AAGTTTATCGACAACACCCTCTACTTCATCGCCGAGGACGACGAGAAC |
| | | CTCGAAAGCGACTACTTCGGGAAGCTCGAGTCCAAGCTCAGCGTCATC |
| | | AGGAACCTCAACGACCAGGTCCTGTTCATCGACCAGGGCAACAGGCCC |
| | | CTCTTCGAGGACATGACCGACAGCGACTGCAGGGACAACGCCCCCAGG |
| | | ACCATCTTCATTATCAGCATGTACAAGGACAGCCAGCCGCGCGGCATG |
| | | GCCGTCACCATCAGCGTGAAGTGCGAGAAGATCAGCACCCTGAGCTGT |
| | | GAGAACAAGATCATCAGCTTCAAGGAGATGAACCCGCCCGACAACATA |
| | | AAGGACACCAAGTCAGATATCATCTTTTTCCAGAGGAGCGTGCCCGGC |
| | | CACGACAACAAGATGCAGTTCGAGAGCTCCAGCTACGAAGGGTATTTC |
| | | CTGGCCTGCGAGAAGGAGAGGGACCTCTTCAAGCTGATTCTGAAGAAG |
| | | GAGGACGAGCTGGGGGACAGGAGCATCATGTTCACCGTGCAGAACGAG |
| | | GAC |
| 625 | IL18_WT | ATGGCCGCCGAGCCCGTAGAGGACAACTGCATCAACTTCGTGGCCATG |
| | | AAGTTTATCGACAACACCCTCTACTTCATCGCCGAGGACGACGAGAAC |
| | | CTCGAGTCCGACTACTTCGGGAAACTCGAGAGCAAGCTCTCGGTCATC |
| | | CGGAATCTCAACGACCAGGTTCTCTTCATCGACCAGGGCAATAGGCCC |
| | | CTCTTCGAAGACATGACCGATAGCGACTGTCGGGACAACGCCCCCCGT |
| | | ACCATCTTCATCATCTCCATGTACAAGGATTCACAGCCCCGAGGCATG |
| | | GCGGTCACGATCAGCGTGAAGTGCGAGAAGATCAGCACCCTGAGCTGC |
| | | GAAAATAAGATCATAAGCTTCAAGGAGATGAACCCGCCGGACAACATC |
| | | AAGGACACCAAAAGCGACATCATCTTCTTCCAGCGAAGCGTCCCCGGC |
| | | CACGACAACAAGATGCAGTTCGAGTCCTCCTCCTACGAAGGGTACTTT |
| | | CTGGCCTGTGAGAAGGAGAGGGATCTGTTCAAGCTGATCCTCAAGAAG |
| | | GAGGATGAACTGGGCGACAGGAGCATCATGTTCACCGTCCAGAACGAG |
| | | GAT |
| 626 | IL18_WT | ATGGCAGCCGAGCCAGTTGAGGACAATTGTATCAACTTCGTGGCGATG |
| | | AAATTCATAGACAATACCTTGTACTTCATCGCCGAGGACGACGAAAAC |
| | | TTAGAGAGCGACTACTTCGGCAAGCTTGAGAGCAAGCTCAGCGTCATC |
| | | CGGAATCTCAACGACCAGGTCCTCTTCATCGATCAGGGGAACAGGCCC |
| | | CTCTTCGAGGATATGACCGACTCGGACTGCAGGGACAACGCCCCCAGG |
| | | ACGATCTTCATCATCTCCATGTACAAGGATTCCCAACCCCGCGGGATG |
| | | GCCGTCACGATCAGCGTGAAGTGTGAGAAAATCAGCACCCTTTCCTGC |
| | | GAGAATAAGATCATCTCCTTTAAGGAGATGAACCCGCCCGACAACATC |
| | | AAGGACACCAAGTCCGACATCATCTTTTTCCAGCGCAGCGTGCCCGGC |
| | | CACGACAACAAGATGCAGTTCGAGTCCAGCTCCTACGAGGGCTACTTC |
| | | CTGGCCTGCGAGAAGGAGAGGGACCTCTTTAAGCTAATCCTCAAGAAG |
| | | GAGGACGAGCTCGGGGACAGGAGCATCATGTTCACCGTGCAGAACGAG |
| | | GAC |
| 627 | IL18_WT | ATGGCGGCGGAGCCCGTCGAGGACAATTGCATCAATTTCGTGGCCATG |
| | | AAGTTCATCGACAATACACTCTACTTTATCGCCGAAGACGACGAGAAC |
| | | CTCGAGTCCGACTACTTCGGCAAGCTCGAGAGCAAGCTCAGCGTCATC |
| | | AGGAACCTCAACGACCAGGTCCTCTTCATCGACCAGGGGAACAGGCCC |
| | | CTATTCGAGGACATGACCGACTCGGACTGCAGGGACAACGCCCCCAGG |
| | | ACAATCTTCATCATCAGCATGTACAAGGACTCCCAGCCCAGGGGCATG |
| | | GCCGTCACCATTAGCGTGAAGTGCGAGAAGATCTCCACCCTGAGCTGC |
| | | GAGAACAAGATCATCTCCTTCAAGGAGATGAACCCTCCCGACAATATC |
| | | AAGGACACGAAAAGCGACATCATCTTCTTCCAGAGGAGCGTGCCGGGT |
| | | CACGATAACAAGATGCAGTTCGAGTCCTCGAGCTACGAGGGGTACTTT |
| | | CTGGCCTGCGAAAAGGAGAGGGACCTGTTCAAACTGATCCTGAAGAAG |
| | | GAGGACGAACTGGGCGACCGGAGCATCATGTTCACCGTCCAGAACGAG |
| | | GAC |
| 628 | IL18_WT | ATGGCAGCGGAGCCCGTCGAGGACAACTGTATCAACTTCGTGGCCATG |
| | | AAGTTTATCGACAATACGCTATACTTCATCGCCGAGGACGACGAGAAT |
| | | CTCGAGTCCGACTACTTCGGCAAGCTCGAGAGCAAGCTCAGCGTCATC |
| | | AGGAATCTCAACGATCAGGTCCTATTTATCGACCAGGGGAACAGGCCC |
| | | CTCTTCGAGGACATGACCGACTCCGACTGCAGGGACAACGCCCCCAGG |
| | | ACCATCTTTATCATTAGCATGTACAAGGACAGCCAGCCCAGGGGGATG |
| | | GCCGTCACAATCAGTGTCAAGTGCGAGAAGATCAGCACGCTGTCATGC |
| | | GAGAATAAGATCATCAGCTTTAAAGAGATGAACCCGCCCGACAATATA |
| | | AAGGATACCAAATCCGACATCATCTTCTTCCAGAGGAGCGTTCCGGGC |
| | | CACGACAACAAGATGCAGTTCGAGTCCTCCTCCTACGAGGGCTATTTC |
| | | CTCGCCTGCGAGAAGGAGAGGGACCTGTTCAAGCTCATACTCAAGAAG |
| | | GAGGACGAGCTCGGCGACAGAAGCATCATGTTCACCGTGCAAAACGAG |
| | | GAT |
| 629 | IL18_WT | ATGGCCGCCGAGCCGGTCGAGGACAACTGCATAAATTTCGTCGCCATG |
| | | AAGTTCATAGACAACACCCTATACTTCATCGCCGAAGACGACGAGAAC |
| | | CTCGAGAGCGACTACTTCGGAAAGCTCGAGAGCAAGCTTTCGGTTATC |
| | | AGGAATTTGAACGACCAGGTCCTCTTCATCGATCAGGGCAATAGGCCC |
| | | CTCTTCGAGGATATGACCGACTCGGACTGCAGGGATAACGCCCCCAGG |
| | | ACAATCTTCATAATCAGCATGTACAAGGACAGCCAGCCCAGAGGCATG |
| | | GCCGTCACTATTTCTGTCAAGTGCGAGAAGATCAGCACGCTGAGCTGC |
| | | GAGAACAAAATCATCAGCTTTAAAGAGATGAACCCGCCCGACAACATC |
| | | AAGGACACCAAGAGCGACATCATCTTCTTCCAGAGGAGCGTCCCCGGG |
| | | CATGACAACAAGATGCAGTTCGAGAGCAGCTCCTACGAGGGCTATTTT |
| | | CTCGCCTGCGAGAAGGAGAGGGACCTGTTTAAGCTCATCCTGAAGAAG |
| | | GAGGACGAGCTGGGGGACAGGTCCATCATGTTTACGGTGCAGAACGAG |
| | | GAC |
| 630 | IL18_WT | ATGGCCGCCGAGCCCGTCGAAGACAACTGCATCAACTTCGTAGCCATG |
| | | AAGTTCATCGACAACACACTCTACTTCATCGCCGAGGACGACGAGAAC |
| | | TTGGAGTCCGACTACTTCGGCAAGCTCGAGAGCAAGTTGAGCGTCATC |
| | | AGAAACCTCAACGACCAGGTCCTCTTCATAGACCAGGGGAACAGGCCC |
| | | CTCTTCGAGGACATGACCGACAGCGACTGCCGGGACAACGCCCCCAGG |
| | | ACCATATTCATCATCAGCATGTATAAGGACAGCCAGCCCAGGGGCATG |
| | | GCCGTCACGATCAGCGTCAAGTGCGAGAAGATCAGCACGCTGTCCTGC |
| | | GAGAACAAGATCATCAGCTTCAAGGAGATGAACCCCCCGGACAACATC |
| | | AAGGACACCAAATCCGACATCATCTTCTTCCAGCGAAGCGTGCCCGGC |
| | | CACGATAACAAGATGCAGTTTGAGAGCAGCAGCTACGAGGGGTACTTC |
| | | CTGGCCTGCGAGAAGGAGAGGGACCTCTTCAAGCTGATCCTGAAGAAA |
| | | GAGGACGAGCTGGGCGACAGGAGCATCATGTTCACTGTTCAGAACGAG |
| | | GAC |
| 631 | IL18_WT | ATGGCCGCCGAGCCGGTGGAGGATAACTGCATCAACTTCGTCGCCATG |
| | | AAGTTCATAGACAATACCCTCTACTTCATCGCCGAGGACGACGAAAAC |
| | | CTCGAGTCCGATTATTTCGGGAAGCTCGAGAGCAAGCTCAGCGTCATC |
| | | AGGAACCTCAACGACCAGGTCCTCTTTATCGACCAGGGGAACCGGCCC |
| | | TTGTTCGAGGATATGACCGACTCAGACTGCAGGGATAACGCGCCCCGG |
| | | ACCATCTTCATCATTTCCATGTATAAGGACAGCCAGCCGCGGGGCATG |
| | | GCCGTCACCATCAGCGTAAAGTGCGAGAAAATCAGTACCCTGAGCTGC |
| | | GAGAACAAGATCATCAGCTTCAAGGAGATGAACCCGCCGGACAACATC |
| | | AAAGACACCAAGTCCGATATCATCTTCTTCCAACGGTCCGTCCCCGGA |
| | | CACGACAATAAGATGCAGTTCGAGAGCAGCTCCTACGAGGGGTACTTC |
| | | CTGGCCTGTGAAAAGGAGCGAGATCTGTTCAAGCTGATCCTGAAGAAG |
| | | GAGGATGAGCTGGGCGACAGAAGCATTATGTTCACAGTCCAAAACGAG |
| | | GAC |
| 632 | IL18_WT | ATGGCCGCCGAGCCCGTCGAAGACAACTGCATCAACTTCGTGGCCATG |
| | | AAATTCATCGACAATACCCTTTACTTTATCGCCGAGGACGACGAAAAC |
| | | CTCGAAAGCGACTACTTCGGCAAGCTAGAGTCCAAGCTCAGCGTCATT |
| | | AGGAACCTAAACGATCAAGTCCTCTTCATCGACCAGGGCAATAGGCCC |
| | | CTCTTCGAGGACATGACCGATAGCGACTGCAGGGACAACGCCCCCAGG |
| | | ACCATCTTCATAATCAGCATGTACAAGGACAGCCAGCCCAGGGGCATG |
| | | GCCGTCACCATCAGCGTCAAGTGTGAGAAGATCTCCACGCTGAGCTGC |
| | | GAAAACAAGATCATCTCCTTCAAGGAGATGAACCCGCCCGACAACATC |
| | | AAGGATACCAAGTCCGACATCATCTTCTTCCAACGGAGCGTGCCCGGC |
| | | CACGACAACAAGATGCAGTTCGAGAGCAGCAGCTATGAGGGCTACTTC |
| | | CTGGCGTGCGAGAAAGAGAGGGACCTCTTCAAGCTGATCCTGAAGAAG |
| | | GAGGACGAGCTTGGGGACAGGAGCATCATGTTCACCGTCCAAAATGAG |
| | | GAT |
| 633 | IL18_WT_SN | ATGGCCGCCGAGCCCGTCGAGGACAACTGCATCAACTTCGTGGCCATG |
| | | AAGTTTATCGACAACACCCTCTACTTCATCGCCGAGGACGACGAGAAT |
| | | CTCGAGAGCGACTACTTCGGAAAGCTTGAGAGCAAGCTTTCCGTCATC |
| | | CGGAACCTCAACGACCAGGTTCTCTTCATCGACCAGGGCAACAGGCCC |
| | | CTCTTCGAGGACATGACCAGCAGCGACTGCAGGAACAACGCCCCCAGG |
| | | ACCATCTTCATCATCAGCATGTATAAGGACTCCCAGCCCAGGGGCATG |
| | | GCCGTCACCATCTCCGTGAAGTGCGAGAAGATCTCCACCCTCAGCTGT |
| | | GAGAACAAGATCATCAGCTTCAAGGAGATGAACCCACCCGACAACATC |
| | | AAGGACACCAAGAGCGACATCATCTTCTTCCAGCGGTCAGTCCCCGGG |
| | | CACGACAACAAGATGCAGTTCGAAAGCAGCTCCTATGAGGGCTATTTC |
| | | CTGGCCTGCGAGAAGGAGCGGGACCTCTTCAAGCTGATACTGAAGAAG |
| | | GAGGACGAGCTGGGGGATAGGTCCATCATGTTCACGGTGCAAAACGAG |
| | | GAC |
| 634 | IL18_WT_SN | ATGGCCGCCGAGCCCGTTGAGGACAACTGCATCAACTTCGTGGCCATG |
| | | AAGTTCATCGATAACACACTCTACTTCATCGCGGAAGACGACGAGAAC |
| | | CTCGAGTCCGATTACTTCGGGAAACTCGAGAGCAAGCTCAGCGTCATC |
| | | CGCAACCTCAACGATCAGGTCCTTTTCATCGACCAGGGCAACAGGCCG |
| | | TTGTTCGAGGACATGACAAGCAGCGACTGCCGGAATAACGCCCCGAGG |
| | | ACCATCTTTATCATCAGCATGTACAAGGACAGCCAGCCCCGGGGCATG |
| | | GCCGTCACCATCAGCGTGAAGTGCGAGAAAATCAGCACCCTGTCCTGT |
| | | GAGAACAAGATCATCAGCTTCAAGGAGATGAACCCACCCGATAACATC |
| | | AAGGACACCAAGTCCGACATCATCTTCTTCCAGCGTTCCGTGCCGGGC |
| | | CATGACAACAAGATGCAGTTCGAGAGCTCCAGCTACGAGGGGTACTTC |
| | | CTGGCCTGCGAGAAGGAGCGGGATCTGTTCAAGCTGATCCTGAAGAAG |
| | | GAGGACGAGCTGGGCGACCGCTCCATCATGTTCACCGTGCAGAACGAG |
| | | GAC |
| 635 | IL18_WT_SN | ATGGCCGCCGAGCCCGTCGAGGATAACTGCATCAACTTCGTCGCCATG |
| | | AAGTTCATAGACAACACCCTCTACTTCATCGCCGAGGACGACGAGAAT |
| | | CTCGAGTCCGACTACTTCGGTAAGCTCGAGAGCAAGCTCAGCGTTATT |
| | | CGCAACCTCAACGACCAAGTCCTCTTCATCGACCAGGGGAACCGGCCC |
| | | CTTTTCGAAGACATGACTAGCAGCGACTGCAGGAATAACGCGCCGCGG |
| | | ACGATCTTCATCATAAGCATGTACAAGGACAGCCAGCCCAGGGGCATG |
| | | GCCGTCACCATCAGCGTGAAGTGCGAGAAGATAAGCACGCTGAGCTGC |
| | | GAGAACAAGATCATCTCCTTCAAGGAGATGAACCCTCCCGATAATATC |
| | | AAAGACACCAAATCCGACATCATCTTCTTTCAGAGGAGCGTGCCCGGC |
| | | CACGACAACAAGATGCAGTTTGAGAGCAGCAGCTACGAGGGGTACTTC |
| | | CTGGCCTGCGAGAAGGAACGGGATCTGTTTAAGCTGATCCTGAAAAAG |
| | | GAGGACGAGCTGGGGGACCGCAGCATCATGTTTACCGTCCAGAACGAG |
| | | GAC |
| 636 | IL18_WT_SN | ATGGCCGCCGAACCAGTCGAGGACAATTGCATCAACTTCGTTGCCATG |
| | | AAGTTCATCGACAACACGCTCTACTTCATCGCCGAGGACGACGAAAAC |
| | | CTCGAGTCCGACTACTTCGGCAAGCTCGAATCCAAGCTCTCCGTCATC |
| | | CGGAACCTCAACGACCAGGTCCTCTTCATCGACCAGGGGAACCGCCCC |
| | | CTCTTCGAAGACATGACCAGCAGCGATTGTCGGAATAACGCCCCCAGG |
| | | ACCATCTTCATAATCTCCATGTACAAGGACTCGCAGCCCAGGGGCATG |
| | | GCCGTTACCATCAGCGTGAAGTGCGAGAAGATCTCCACCCTGAGCTGC |
| | | GAGAATAAGATCATCTCCTTCAAGGAGATGAACCCGCCCGATAACATC |
| | | AAGGACACCAAGTCCGACATCATCTTCTTCCAGAGGAGCGTGCCCGGC |
| | | CACGACAACAAGATGCAATTCGAAAGCAGCAGCTACGAGGGGTACTTC |
| | | CTGGCCTGCGAGAAGGAGCGGGACCTCTTCAAACTGATCCTCAAGAAG |
| | | GAGGACGAGCTGGGCGACCGGAGCATCATGTTCACCGTGCAGAACGAG |
| | | GAC |
| 637 | IL18_WT_SN | ATGGCCGCCGAGCCAGTCGAAGATAACTGCATCAATTTCGTCGCCATG |
| | | AAGTTCATCGACAACACGCTCTACTTCATCGCCGAGGACGACGAAAAC |
| | | TTGGAGAGCGACTACTTCGGGAAGCTCGAGTCCAAGCTCTCCGTCATC |
| | | CGGAATTTAAACGACCAGGTCCTCTTCATCGACCAGGGCAACAGGCCC |
| | | TTATTCGAAGACATGACCTCGTCCGACTGCCGGAACAACGCCCCACGG |
| | | ACCATCTTCATCATCAGCATGTACAAGGACAGCCAACCGCGGGGCATG |
| | | GCCGTCACCATCAGCGTGAAGTGCGAGAAAATCAGTACCCTGAGCTGT |
| | | GAGAACAAGATCATCAGCTTCAAGGAGATGAACCCACCCGACAACATC |
| | | AAGGACACCAAGTCCGACATTATCTTCTTCCAGAGGTCCGTGCCCGGA |
| | | CACGATAACAAAATGCAGTTCGAGAGCAGCAGCTACGAGGGGTATTTC |
| | | CTGGCCTGCGAGAAGGAGCGCGACCTGTTCAAGCTGATCCTGAAAAAG |
| | | GAGGACGAGCTGGGGGACAGGTCCATCATGTTCACCGTGCAAAACGAG |
| | | GAT |
| 638 | IL18_WT_SN | ATGGCCGCCGAGCCCGTTGAGGACAACTGCATCAACTTCGTAGCCATG |
| | | AAGTTCATCGACAACACGCTCTACTTCATCGCCGAGGACGACGAGAAT |
| | | CTCGAGAGCGACTACTTCGGGAAGCTCGAGAGCAAACTTAGCGTAATC |
| | | CGCAACCTCAACGACCAGGTCTTGTTCATCGACCAGGGCAACAGGCCC |
| | | CTCTTCGAGGACATGACCTCGTCGGACTGCAGGAACAACGCGCCCCGC |
| | | ACCATCTTTATTATCTCCATGTACAAGGATAGCCAACCCAGGGGCATG |
| | | GCCGTCACCATCAGCGTCAAGTGCGAGAAGATCTCCACTCTAAGCTGC |
| | | GAGAACAAGATAATCAGCTTCAAGGAGATGAACCCGCCCGATAATATC |
| | | AAGGACACCAAGAGCGACATCATCTTCTTTCAGCGGTCCGTGCCAGGG |
| | | CACGACAACAAGATGCAGTTCGAGAGCAGCTCCTACGAGGGGTACTTC |
| | | CTGGCCTGCGAGAAGGAGAGGGACCTGTTTAAGCTGATCCTGAAGAAG |
| | | GAGGACGAGCTGGGGGACAGGAGCATCATGTTCACTGTCCAGAATGAG |
| | | GAC |
| 639 | IL18_WT_SN | ATGGCCGCCGAGCCGGTCGAGGACAATTGCATCAATTTCGTCGCAATG |
| | | AAGTTCATCGATAATACCTTGTACTTCATCGCCGAGGACGACGAGAAC |
| | | CTCGAGAGCGACTACTTCGGGAAGCTCGAGAGCAAGCTCTCCGTCATC |
| | | AGGAACCTCAACGACCAGGTCTTATTCATCGATCAGGGCAATAGGCCC |
| | | CTCTTCGAGGACATGACCAGCTCAGATTGCAGGAACAACGCCCCAAGG |
| | | ACCATCTTTATAATCAGCATGTACAAGGACAGCCAGCCGAGGGGCATG |
| | | GCCGTCACCATCTCCGTGAAGTGCGAGAAGATCAGCACCCTGTCCTGC |
| | | GAGAACAAGATCATCAGTTTCAAGGAGATGAACCCCCCGGACAATATC |
| | | AAAGACACCAAGTCCGACATCATCTTCTTCCAAAGGAGCGTGCCCGGC |
| | | CACGACAACAAGATGCAGTTCGAGTCCTCCTCCTACGAGGGCTACTTC |
| | | CTGGCATGCGAGAAGGAGAGGGACCTGTTCAAGCTGATCCTGAAGAAG |
| | | GAGGACGAGCTGGGGGACAGGAGCATCATGTTCACCGTCCAAAACGAG |
| | | GAC |
| 640 | IL18_WT_SN | ATGGCCGCCGAGCCCGTCGAGGACAACTGCATCAATTTCGTCGCCATG |
| | | AAGTTCATCGACAACACGTTGTACTTCATCGCCGAGGACGACGAGAAC |
| | | CTCGAATCCGACTACTTCGGGAAGTTGGAGAGCAAGCTCAGCGTCATC |
| | | CGGAACCTCAACGACCAGGTACTCTTTATCGACCAGGGCAACCGCCCG |
| | | CTGTTCGAGGACATGACCTCCTCAGACTGCAGGAATAACGCACCGAGG |
| | | ACCATCTTCATCATCAGCATGTACAAAGACTCCCAACCTAGGGGCATG |
| | | GCGGTAACCATTAGCGTCAAGTGCGAAAAGATCAGCACACTGTCGTGC |
| | | GAGAACAAAATCATCAGCTTCAAGGAGATGAACCCCCCGGACAACATC |
| | | AAGGACACCAAGTCCGACATCATCTTCTTCCAGCGGAGCGTGCCGGGA |
| | | CACGACAACAAAATGCAGTTCGAGAGCTCCTCCTACGAGGGCTACTTC |
| | | CTGGCCTGCGAGAAGGAGCGGGACCTGTTCAAGCTGATCCTGAAGAAG |
| | | GAGGACGAGCTGGGGGACCGGAGCATCATGTTCACCGTCCAGAACGAG |
| | | GAC |
| 641 | IL18_WT_SN | ATGGCCGCCGAGCCCGTAGAAGACAATTGCATCAACTTCGTAGCCATG |
| | | AAGTTTATCGATAATACATTGTACTTTATCGCGGAGGACGACGAGAAC |
| | | CTCGAGAGCGACTATTTCGGCAAACTCGAATCCAAACTCAGCGTCATC |
| | | CGAAACCTAAACGATCAGGTTCTCTTCATCGACCAGGGGAACCGGCCC |
| | | CTCTTCGAAGACATGACTTCCTCCGACTGCCGGAATAACGCCCCGAGG |
| | | ACCATCTTCATCATTAGCATGTATAAGGACAGCCAGCCCAGGGGGATG |
| | | GCCGTCACCATCAGCGTGAAGTGCGAGAAGATCTCCACCCTGAGCTGT |
| | | GAGAACAAAATCATCAGCTTCAAGGAAATGAACCCACCCGACAACATC |
| | | AAGGACACCAAGTCCGATATCATCTTCTTCCAGAGAAGCGTGCCCGGC |
| | | CACGATAATAAGATGCAGTTCGAGAGCAGCAGCTACGAGGGGTACTTT |
| | | CTGGCCTGCGAGAAGGAACGGGACCTGTTCAAGCTGATCCTGAAGAAG |
| | | GAGGATGAGCTGGGGGACAGGAGCATCATGTTCACCGTCCAGAACGAG |
| | | GAC |
| 642 | IL18_WT_SN | ATGGCCGCCGAGCCCGTCGAGGACAACTGCATCAACTTCGTCGCCATG |
| | | AAGTTCATCGATAACACTTTATACTTCATCGCCGAGGACGACGAAAAT |
| | | CTCGAGTCCGACTACTTCGGCAAACTCGAATCAAAGCTCTCCGTCATC |
| | | AGGAACCTCAACGACCAAGTCCTCTTCATCGACCAGGGGAACCGGCCC |
| | | CTCTTCGAGGACATGACGTCGAGCGACTGCCGCAACAACGCCCCGCGG |
| | | ACCATATTCATTATCTCGATGTATAAGGACAGCCAGCCGCGGGGGATG |
| | | GCCGTAACGATCTCCGTCAAGTGCGAAAAGATCTCGACCCTGTCCTGT |
| | | GAGAACAAGATAATCAGCTTCAAGGAGATGAACCCTCCAGACAACATC |
| | | AAGGACACCAAGAGCGATATCATATTCTTCCAGCGGAGCGTCCCCGGC |
| | | CATGACAACAAGATGCAGTTCGAGTCCAGCAGCTACGAGGGGTACTTC |
| | | CTGGCGTGCGAAAAGGAGCGGGATCTGTTCAAGCTGATCCTGAAAAAG |
| | | GAGGACGAGCTGGGGGACAGGAGCATCATGTTTACCGTGCAAAACGAG |
| | | GAC |
| 643 | IL18_WT_SN | ATGGCCGCCGAACCCGTAGAGGACAACTGCATCAACTTCGTCGCCATG |
| | | AAGTTTATCGATAACACCCTCTATTTCATCGCCGAGGACGACGAGAAC |
| | | CTCGAGAGCGACTACTTCGGCAAGCTCGAATCCAAGTTGTCGGTCATT |
| | | AGGAACCTCAACGACCAGGTCCTATTCATCGACCAGGGGAACAGGCCC |
| | | CTCTTCGAGGATATGACCAGCAGCGACTGTCGAAACAACGCCCCCCGG |
| | | ACAATCTTCATCATCTCCATGTACAAGGACAGCCAGCCAAGGGGCATG |
| | | GCCGTCACGATCAGCGTCAAGTGTGAGAAGATCTCCACCCTGAGCTGC |
| | | GAGAATAAGATTATCAGCTTCAAGGAGATGAACCCACCCGATAATATC |
| | | AAGGACACCAAAAGCGACATTATCTTTTTCCAAAGGTCCGTGCCGGGC |
| | | CACGACAACAAGATGCAGTTCGAGTCCAGCTCCTACGAGGGCTACTTC |
| | | CTGGCCTGCGAAAAGGAGCGGGACCTGTTCAAGCTGATCCTCAAGAAG |
| | | GAGGACGAGCTGGGGGATCGCAGCATCATGTTCACGGTGCAGAACGAG |
| | | GAC |
| 644 | IL18_WT_SN | ATGGCCGCCGAACCCGTCGAAGACAACTGCATCAATTTCGTCGCGATG |
| | | AAGTTCATCGACAACACCCTCTATTTCATCGCCGAAGACGACGAGAAC |
| | | TTAGAATCCGACTACTTCGGCAAATTGGAGTCCAAGCTCTCCGTAATA |
| | | AGGAACCTCAACGATCAAGTCCTCTTCATCGATCAGGGCAACAGGCCC |
| | | CTCTTCGAGGACATGACCAGCTCCGACTGCAGGAACAACGCCCCCCGG |
| | | ACCATATTCATCATCAGCATGTATAAGGACAGCCAGCCGAGGGGCATG |
| | | GCCGTCACCATTTCCGTGAAGTGCGAGAAGATCTCCACTCTGAGCTGC |
| | | GAGAACAAAATCATCTCCTTCAAGGAGATGAATCCCCCCGACAATATC |
| | | AAGGACACCAAGTCCGACATCATCTTCTTTCAGCGAAGCGTGCCCGGC |
| | | CACGACAACAAGATGCAGTTTGAGTCCAGCTCGTATGAAGGCTACTTC |
| | | CTCGCCTGCGAGAAGGAGAGGGATCTCTTCAAACTGATCCTGAAGAAG |
| | | GAGGACGAGCTGGGCGACAGGAGCATCATGTTCACGGTGCAGAACGAG |
| | | GAC |
| 645 | IL18_WT_SN | ATGGCCGCCGAACCCGTTGAAGACAATTGCATCAATTTCGTGGCCATG |
| | | AAGTTCATCGACAACACCCTCTACTTCATCGCCGAGGACGACGAGAAC |
| | | CTCGAGAGCGACTACTTCGGGAAGCTCGAAAGCAAGCTCTCGGTCATC |
| | | CGCAATCTCAACGACCAGGTACTCTTCATCGATCAGGGGAACCGGCCC |
| | | CTCTTCGAGGACATGACCAGCTCCGACTGCAGGAACAACGCCCCCAGG |
| | | ACCATCTTTATTATCTCCATGTACAAAGACTCACAGCCGAGGGGGATG |
| | | GCCGTTACGATCAGCGTGAAATGCGAAAAGATCAGCACCCTGAGCTGC |
| | | GAGAATAAGATCATCTCCTTCAAGGAGATGAATCCCCCCGACAACATC |
| | | AAAGATACCAAGTCGGACATCATATTCTTCCAACGTAGCGTGCCGGGG |
| | | CACGACAACAAGATGCAGTTCGAGAGCTCCTCCTACGAGGGGTATTTT |
| | | CTGGCGTGCGAGAAGGAGCGGGACCTGTTCAAGCTGATCCTGAAAAAG |
| | | GAGGACGAACTGGGGGACAGGAGCATCATGTTCACCGTGCAGAATGAG |
| | | GAC |
| 646 | IL18_WT_SN | ATGGCCGCCGAGCCCGTAGAGGACAATTGCATCAACTTCGTTGCGATG |
| | | AAGTTCATCGACAATACCCTATACTTCATCGCCGAGGACGACGAGAAC |
| | | CTCGAATCAGACTACTTCGGCAAGCTCGAGTCCAAGCTATCGGTCATC |
| | | AGGAACCTCAACGACCAGGTCCTCTTCATCGACCAGGGCAACAGGCCT |
| | | TTGTTCGAGGACATGACTAGCAGCGACTGCAGGAACAACGCGCCCCGC |
| | | ACCATCTTTATCATCAGCATGTACAAGGACAGCCAGCCCAGGGGCATG |
| | | GCCGTCACGATCTCCGTGAAATGCGAGAAAATCAGCACGCTGTCCTGT |
| | | GAGAACAAGATCATCTCTTTCAAGGAGATGAACCCGCCCGACAACATC |
| | | AAGGACACCAAGTCCGATATCATCTTCTTCCAGCGCAGCGTGCCCGGC |
| | | CACGACAACAAGATGCAGTTCGAGAGCAGCAGCTACGAGGGGTACTTT |
| | | CTGGCCTGCGAGAAGGAGAGGGATCTGTTCAAGCTGATCCTGAAGAAG |
| | | GAGGATGAGCTGGGCGACCGGAGCATCATGTTCACCGTCCAGAATGAG |
| | | GAC |
| 647 | IL18_WT_SN | ATGGCCGCCGAGCCCGTTGAGGATAACTGCATCAATTTCGTCGCCATG |
| | | AAGTTCATCGATAACACCCTTTACTTCATCGCCGAGGACGACGAGAAC |
| | | TTGGAAAGCGACTACTTCGGCAAGCTCGAGAGCAAGCTCAGCGTCATC |
| | | CGGAACCTCAACGATCAGGTCTTGTTCATCGACCAGGGCAATAGGCCC |
| | | CTCTTCGAGGACATGACCAGCTCCGACTGCCGCAATAACGCCCCCAGG |
| | | ACGATCTTTATCATCAGCATGTACAAGGACAGCCAGCCCCGGGGCATG |
| | | GCAGTCACCATCAGCGTGAAGTGCGAGAAGATCTCGACCCTGAGCTGC |
| | | GAGAATAAGATCATCTCCTTCAAGGAGATGAATCCCCCCGACAACATC |
| | | AAGGATACCAAGAGCGACATCATCTTCTTCCAGAGGTCCGTGCCCGGT |
| | | CACGACAACAAGATGCAGTTCGAATCCTCTAGCTACGAGGGGTACTTC |
| | | CTGGCCTGCGAGAAGGAGCGGGATCTGTTCAAGCTCATCCTGAAAAAG |
| | | GAAGATGAGCTGGGGGATAGGAGCATCATGTTCACCGTGCAAAATGAG |
| | | GAC |
| 648 | IL18_WT_SN | ATGGCCGCCGAGCCGGTGGAAGATAATTGTATCAACTTCGTCGCGATG |
| | | AAGTTCATCGACAATACCCTATATTTTATCGCCGAGGACGACGAGAAC |
| | | CTCGAATCCGACTATTTCGGGAAGCTCGAGTCCAAGCTCAGCGTTATC |
| | | CGCAACCTCAACGACCAGGTCCTCTTCATCGATCAGGGCAACAGGCCC |
| | | CTCTTCGAGGACATGACCAGCTCCGACTGCAGAAACAACGCCCCCAGG |
| | | ACCATCTTCATCATATCCATGTACAAGGACAGCCAGCCCCGGGGCATG |
| | | GCCGTCACCATCAGCGTGAAGTGCGAAAAGATCAGCACCCTCTCCTGC |
| | | GAGAACAAGATCATCTCCTTCAAGGAGATGAATCCCCCCGACAACATC |
| | | AAGGACACCAAGAGCGACATCATCTTCTTCCAGCGGAGCGTGCCCGGC |
| | | CACGACAACAAGATGCAGTTCGAAAGCTCCAGCTACGAGGGGTACTTC |
| | | CTGGCCTGCGAAAAGGAGAGGGACCTGTTCAAGCTCATCCTCAAGAAG |
| | | GAGGATGAGCTGGGGGACCGAAGCATCATGTTCACCGTCCAGAACGAG |
| | | GAC |
| 649 | IL18_WT_SN | ATGGCGGCCGAGCCGGTCGAGGACAACTGCATCAATTTCGTCGCGATG |
| | | AAGTTTATCGACAACACGCTCTACTTCATAGCAGAGGACGACGAGAAC |
| | | CTCGAGAGCGACTACTTCGGCAAGCTCGAGAGCAAGCTCTCCGTAATC |
| | | AGGAACCTCAACGACCAGGTCCTCTTCATCGACCAGGGCAATAGGCCG |
| | | CTGTTCGAAGACATGACCAGCAGCGACTGCAGGAACAACGCCCCGCGG |
| | | ACCATCTTCATCATCAGCATGTACAAGGACAGCCAGCCCCGGGGGATG |
| | | GCCGTCACCATCAGCGTGAAGTGCGAGAAAATCAGCACCCTCAGCTGC |
| | | GAGAATAAGATCATCTCCTTCAAGGAGATGAACCCCCCGGACAATATC |
| | | AAGGACACCAAGTCAGACATCATCTTCTTTCAGAGGAGCGTGCCCGGC |
| | | CACGACAACAAGATGCAGTTTGAGAGCAGCTCCTACGAGGGCTACTTT |
| | | CTCGCGTGCGAGAAGGAGAGAGATCTGTTCAAGCTCATTCTCAAGAAG |
| | | GAGGACGAGCTGGGCGACAGGAGCATTATGTTCACCGTGCAGAACGAG |
| | | GAT |
| 650 | IL18_WT_SN | ATGGCGGCCGAGCCCGTAGAGGACAACTGCATCAACTTCGTCGCCATG |
| | | AAATTCATCGACAACACCCTATATTTCATCGCCGAGGACGACGAGAAT |
| | | CTCGAAAGCGACTATTTCGGCAAGCTCGAAAGCAAGCTCAGCGTCATA |
| | | CGTAATCTCAACGATCAGGTCCTCTTCATCGATCAGGGCAATCGGCCT |
| | | CTCTTCGAGGATATGACCAGCAGCGACTGCAGGAACAACGCCCCCAGG |
| | | ACCATCTTCATCATCTCCATGTACAAGGACTCGCAGCCCAGGGGCATG |
| | | GCCGTCACCATCAGCGTGAAGTGCGAGAAGATCAGCACCCTGAGCTGC |
| | | GAAAATAAGATCATCTCCTTCAAGGAGATGAACCCTCCCGACAACATC |
| | | AAGGACACCAAGTCAGACATCATCTTCTTTCAGAGGTCCGTGCCGGGG |
| | | CATGATAACAAGATGCAGTTCGAGAGCTCCAGCTACGAGGGGTACTTC |
| | | CTGGCCTGCGAGAAGGAGAGGGATCTCTTCAAGCTGATCCTGAAGAAG |
| | | GAGGACGAGCTGGGCGACAGGAGCATCATGTTCACCGTCCAGAACGAG |
| | | GAC |
| 651 | IL18_WT_SN | ATGGCCGCCGAACCCGTAGAGGACAACTGCATCAACTTCGTCGCCATG |
| | | AAGTTCATCGACAACACCCTCTACTTCATCGCGGAGGACGACGAGAAC |
| | | CTCGAGAGCGACTACTTCGGCAAGCTCGAGTCCAAGCTCAGCGTCATC |
| | | AGGAACCTCAACGATCAGGTCCTCTTCATCGACCAGGGCAACAGGCCC |
| | | CTCTTCGAGGACATGACCTCGAGCGACTGCAGGAACAACGCCCCCCGC |
| | | ACGATCTTTATCATCTCTATGTATAAGGATTCCCAACCCAGGGGGATG |
| | | GCCGTCACCATCTCCGTGAAGTGCGAAAAGATCAGCACGCTGTCCTGT |
| | | GAGAATAAGATCATCAGCTTTAAGGAAATGAATCCCCCCGACAACATC |
| | | AAGGATACCAAGAGCGACATCATCTTTTTCCAGAGGAGCGTGCCTGGG |
| | | CACGATAACAAAATGCAGTTCGAGTCCAGCAGCTACGAGGGCTACTTC |
| | | CTGGCCTGCGAGAAGGAGAGGGACCTGTTCAAACTGATCCTCAAGAAG |
| | | GAGGATGAGCTCGGGGACAGGTCCATCATGTTCACGGTGCAGAACGAG |
| | | GAC |
| 652 | IL18_WT_SN | ATGGCGGCAGAGCCCGTCGAGGATAACTGTATCAACTTCGTAGCCATG |
| | | AAGTTCATAGACAACACCCTTTACTTCATCGCCGAGGACGACGAGAAT |
| | | CTTGAGTCCGACTACTTCGGAAAACTCGAGAGCAAGCTCAGCGTCATC |
| | | AGGAACCTCAACGACCAGGTCTTGTTCATCGACCAAGGCAACAGGCCC |
| | | TTGTTCGAGGATATGACCTCCTCAGACTGCAGGAATAACGCCCCTCGA |
| | | ACAATCTTCATCATCTCGATGTACAAGGACAGCCAGCCCAGGGGCATG |
| | | GCGGTCACCATCTCCGTGAAGTGTGAGAAGATCTCCACACTCAGCTGT |
| | | GAAAACAAGATCATCTCATTCAAGGAGATGAACCCGCCCGATAACATC |
| | | AAGGACACGAAAAGCGATATCATCTTCTTCCAGAGGAGCGTCCCCGGG |
| | | CACGACAACAAGATGCAATTCGAGTCCAGCAGCTACGAGGGCTACTTC |
| | | CTGGCCTGCGAGAAGGAGAGGGACCTGTTTAAGCTGATCCTCAAGAAA |
| | | GAAGATGAGCTGGGGGACCGGTCCATTATGTTCACCGTGCAGAACGAG |
| | | GAC |
| 653 | IL18_WT_SN | ATGGCCGCCGAGCCCGTCGAGGACAACTGCATCAACTTCGTAGCGATG |
| | | AAGTTCATCGACAACACCCTCTACTTCATCGCCGAGGACGACGAGAAC |
| | | CTCGAGAGCGATTACTTCGGTAAGCTCGAGAGCAAGCTCTCAGTCATA |
| | | AGGAACCTCAACGATCAGGTCCTCTTTATCGACCAGGGGAATAGGCCC |
| | | CTCTTCGAGGACATGACCTCGAGCGACTGTAGGAACAACGCCCCCAGG |
| | | ACCATCTTTATCATCAGCATGTACAAGGACTCCCAACCGAGGGGCATG |
| | | GCCGTCACCATCAGCGTAAAGTGCGAGAAGATCTCGACCCTGAGCTGC |
| | | GAGAATAAGATCATCTCCTTCAAGGAGATGAATCCCCCCGATAACATC |
| | | AAAGACACCAAGAGCGATATAATCTTTTTTCAGAGGTCCGTACCGGGG |
| | | CACGATAACAAAATGCAGTTTGAGTCCAGCAGCTATGAAGGCTACTTC |
| | | CTGGCCTGCGAGAAGGAGAGGGACCTGTTTAAGCTGATCCTGAAAAAG |
| | | GAGGACGAGCTGGGCGATAGGAGCATAATGTTCACGGTGCAGAACGAG |
| | | GAC |
| 654 | IL18_WT_SN | ATGGCAGCGGAACCGGTCGAGGACAACTGCATCAATTTCGTGGCGATG |
| | | AAGTTCATCGACAACACGCTTTACTTCATCGCCGAGGACGACGAGAAC |
| | | TTGGAAAGCGACTATTTCGGCAAGCTCGAAAGCAAGCTCTCGGTCATC |
| | | CGAAACCTCAACGACCAAGTCCTCTTCATCGACCAGGGCAACAGGCCG |
| | | CTGTTCGAAGACATGACCAGCAGCGACTGTCGGAACAACGCCCCCAGG |
| | | ACCATCTTTATCATCTCCATGTACAAGGATTCCCAGCCAAGGGGGATG |
| | | GCGGTCACCATCTCCGTCAAGTGCGAAAAAATCAGCACCCTGAGCTGT |
| | | GAGAACAAGATCATCAGCTTCAAGGAGATGAACCCCCCAGACAACATC |
| | | AAGGACACCAAGTCTGACATAATTTTCTTCCAACGGAGCGTGCCGGGC |
| | | CACGACAATAAGATGCAGTTCGAGTCCAGCTCCTACGAGGGATACTTC |
| | | CTGGCCTGCGAGAAGGAGAGGGACCTGTTCAAGCTGATCCTCAAGAAA |
| | | GAGGACGAGCTGGGCGACAGGAGCATCATGTTCACAGTCCAGAATGAG |
| | | GAC |
| 655 | IL18_WT_SN | ATGGCGGCCGAACCGGTCGAAGATAACTGTATTAACTTCGTGGCCATG |
| | | AAGTTCATCGACAACACCCTGTACTTCATCGCCGAGGACGACGAGAAC |
| | | CTCGAGAGCGATTACTTCGGCAAGCTCGAGTCCAAGCTCAGCGTTATC |
| | | CGGAACCTCAACGACCAGGTCCTCTTTATCGACCAGGGCAACCGGCCC |
| | | CTTTTCGAAGACATGACGAGCTCCGATTGCCGGAACAACGCCCCGAGG |
| | | ACCATCTTCATCATCTCCATGTACAAGGATAGCCAGCCCAGGGGCATG |
| | | GCCGTCACGATCAGCGTGAAGTGCGAGAAGATCTCCACCCTGTCCTGC |
| | | GAGAATAAGATCATCAGCTTCAAGGAGATGAACCCGCCCGACAACATC |
| | | AAGGATACCAAGTCGGACATCATCTTCTTTCAGAGAAGCGTCCCCGGC |
| | | CATGACAATAAGATGCAGTTTGAGAGCAGCAGCTACGAGGGGTACTTC |
| | | CTGGCGTGCGAGAAGGAGCGGGACCTCTTTAAACTGATCCTGAAGAAG |
| | | GAGGACGAGCTGGGCGACCGGTCCATCATGTTCACCGTCCAGAATGAG |
| | | GAC |
| 656 | IL18_WT_SN | ATGGCGGCCGAACCCGTAGAGGACAACTGCATCAACTTCGTCGCCATG |
| | | AAGTTTATCGACAACACCTTGTATTTCATCGCGGAGGACGACGAGAAC |
| | | CTCGAGTCCGACTACTTCGGCAAACTCGAAAGCAAGCTCAGCGTCATC |
| | | CGAAACCTCAACGACCAGGTTCTCTTCATCGACCAGGGGAATAGGCCC |
| | | CTCTTCGAAGACATGACGAGCAGCGATTGCAGGAACAACGCCCCCAGG |
| | | ACCATCTTCATCATCTCCATGTACAAGGACAGCCAGCCACGAGGCATG |
| | | GCCGTCACGATCTCCGTGAAGTGTGAGAAGATAAGCACGCTGTCCTGC |
| | | GAGAACAAGATAATCAGCTTCAAGGAGATGAACCCCCCTGATAACATC |
| | | AAAGATACCAAGAGCGACATAATCTTCTTCCAGAGGTCCGTGCCCGGA |
| | | CATGACAACAAGATGCAGTTTGAGAGCAGCAGCTACGAGGGGTACTTC |
| | | CTCGCCTGCGAGAAGGAGAGGGACCTGTTCAAGCTGATCCTCAAGAAG |
| | | GAGGACGAGCTGGGGGACAGGAGCATCATGTTCACCGTGCAGAACGAG |
| | | GAC |
| 657 | IL18_WT_SN | ATGGCGGCCGAGCCCGTCGAGGACAACTGCATCAATTTCGTGGCCATG |
| | | AAGTTCATCGACAACACCCTCTACTTCATCGCCGAGGACGACGAAAAC |
| | | CTCGAGAGCGACTACTTCGGCAAGCTCGAGAGCAAGCTCTCCGTTATA |
| | | AGGAACCTAAACGACCAGGTCCTTTTCATCGACCAGGGCAACAGGCCC |
| | | CTCTTCGAAGACATGACCAGCAGCGACTGTAGGAATAACGCCCCCCGC |
| | | ACGATCTTCATCATCAGCATGTACAAGGACTCCCAGCCCCGGGGCATG |
| | | GCCGTCACTATCAGTGTGAAGTGCGAGAAGATCAGCACGCTATCGTGC |
| | | GAGAACAAGATCATCAGCTTCAAGGAGATGAACCCACCCGACAACATC |
| | | AAGGACACCAAGAGCGACATTATCTTCTTCCAGAGGAGCGTGCCGGGC |
| | | CACGACAACAAGATGCAGTTCGAGTCCTCCAGCTACGAGGGATACTTC |
| | | CTGGCCTGCGAGAAGGAGCGGGATCTGTTCAAGCTGATCCTGAAGAAG |
| | | GAGGACGAGCTGGGCGACAGGAGCATCATGTTCACCGTGCAGAACGAG |
| | | GAC |
| 658 | IL2sp_IL18 | ATGTACAGGATGCAGCTCCTCTCCTGCATCGCCCTTAGCTTGGCCCTC |
| | | GTCACCAACAGCTACTTCGGCAAGCTCGAGTCGAAGCTCTCCGTCATC |
| | | CGCAACCTCAACGACCAGGTCCTCTTCATAGACCAGGGCAACCGCCCC |
| | | CTCTTCGAGGACATGACCGACTCCGATTGCAGGGACAACGCCCCCAGG |
| | | ACCATATTCATCATCAGCATGTACAAGGACAGCCAGCCCAGGGGGATG |
| | | GCCGTCACCATCTCCGTTAAGTGCGAGAAGATCAGCACACTCTCCTGC |
| | | GAAAATAAGATCATCTCCTTTAAGGAGATGAACCCGCCCGACAATATC |
| | | AAGGACACCAAGTCCGATATTATCTTCTTCCAGCGGAGCGTCCCCGGC |
| | | CACGACAACAAGATGCAGTTCGAGTCCTCGTCGTACGAGGGCTACTTC |
| | | CTGGCGTGCGAAAAGGAGCGCGACCTGTTCAAGCTCATCCTGAAGAAG |
| | | GAGGACGAGCTGGGAGACAGGTCCATCATGTTCACGGTGCAGAATGAG |
| | | GAC |
| 659 | IL2sp_IL18 | ATGTACCGAATGCAGCTCCTCAGCTGCATCGCGCTCAGCCTCGCCCTC |
| | | GTCACCAACAGCTACTTCGGGAAGCTCGAGTCGAAGCTCAGCGTCATC |
| | | CGAAACCTCAACGACCAGGTCCTCTTTATCGACCAGGGCAACAGGCCC |
| | | TTATTCGAAGACATGACCGACTCAGACTGCAGGGACAACGCCCCAAGG |
| | | ACCATCTTTATCATTTCCATGTACAAGGACAGCCAGCCGCGGGGGATG |
| | | GCCGTCACCATCAGCGTCAAGTGTGAGAAGATCAGCACGCTCAGCTGC |
| | | GAGAATAAGATCATCTCCTTCAAGGAGATGAACCCTCCCGATAACATC |
| | | AAGGACACCAAGTCCGATATCATCTTCTTCCAGCGGAGCGTGCCCGGC |
| | | CACGACAACAAGATGCAGTTCGAATCGAGCAGCTACGAGGGCTACTTC |
| | | CTGGCCTGCGAGAAGGAAAGGGATCTGTTTAAGCTGATCCTGAAGAAA |
| | | GAGGATGAGCTGGGGGACAGGAGCATCATGTTTACCGTGCAGAACGAA |
| | | GAC |
| 660 | IL2sp_IL18 | ATGTACAGGATGCAGCTCCTCAGCTGCATCGCCCTCTCGCTCGCGCTC |
| | | GTCACCAACTCCTACTTCGGGAAGCTCGAGTCCAAGCTCTCCGTCATC |
| | | AGGAACCTCAACGACCAGGTCCTCTTCATAGACCAGGGCAATAGGCCC |
| | | CTCTTCGAAGATATGACCGACAGCGATTGCAGGGATAACGCCCCCCGC |
| | | ACCATCTTCATCATCAGCATGTACAAAGATAGCCAGCCGAGGGGCATG |
| | | GCCGTCACCATCAGCGTCAAGTGCGAGAAAATCAGCACCCTCTCCTGC |
| | | GAGAACAAGATCATCTCCTTCAAGGAGATGAACCCGCCCGACAACATC |
| | | AAGGACACCAAGAGCGACATCATATTCTTCCAGAGGTCCGTCCCCGGC |
| | | CACGATAACAAGATGCAGTTCGAGTCCAGCAGCTACGAGGGGTACTTC |
| | | CTCGCCTGCGAGAAGGAGAGGGACCTGTTCAAGCTGATCCTGAAAAAG |
| | | GAAGATGAACTGGGGGACCGGAGCATCATGTTCACGGTGCAGAACGAG |
| | | GAC |
| 661 | IL2sp_IL18 | ATGTACCGGATGCAGCTCCTCTCCTGCATCGCCCTCAGCCTCGCCCTA |
| | | GTTACCAACTCGTACTTCGGCAAGCTGGAGAGCAAGCTCTCCGTCATA |
| | | CGTAACCTCAACGACCAGGTCCTCTTCATAGACCAGGGCAATAGGCCC |
| | | CTTTTCGAGGACATGACGGACAGCGATTGCCGGGACAACGCCCCCAGA |
| | | ACCATCTTCATCATCAGCATGTACAAGGACTCCCAGCCGAGGGGCATG |
| | | GCCGTCACCATCTCCGTAAAGTGCGAGAAGATCTCCACCCTCAGCTGC |
| | | GAGAACAAGATCATCAGCTTTAAGGAGATGAACCCGCCGGATAATATA |
| | | AAGGACACCAAGTCCGACATTATCTTCTTCCAACGGTCGGTGCCCGGC |
| | | CATGACAACAAGATGCAGTTCGAGAGCAGCTCCTACGAGGGGTACTTT |
| | | CTGGCCTGCGAAAAAGAGAGGGATCTGTTCAAGCTGATCCTCAAGAAG |
| | | GAGGACGAGCTGGGGGACAGGTCGATCATGTTCACCGTGCAGAACGAG |
| | | GAC |
| 662 | IL2sp_IL18 | ATGTACAGGATGCAGCTCCTAAGCTGCATCGCCCTCAGCCTCGCGCTC |
| | | GTCACCAACAGCTATTTCGGCAAGCTAGAGAGCAAGCTCTCCGTCATC |
| | | CGGAATTTAAACGACCAGGTCCTATTCATCGACCAGGGAAACCGCCCC |
| | | CTCTTCGAGGACATGACCGACAGCGACTGCCGGGACAACGCTCCCAGG |
| | | ACGATCTTTATCATCAGCATGTACAAGGACAGCCAGCCGCGCGGCATG |
| | | GCCGTCACCATAAGCGTCAAGTGCGAAAAGATCAGCACGCTTAGCTGC |
| | | GAGAACAAAATCATCTCCTTCAAGGAGATGAACCCTCCCGACAACATA |
| | | AAGGATACCAAGAGTGACATCATCTTCTTTCAGCGGAGCGTCCCCGGC |
| | | CACGACAACAAGATGCAGTTCGAGAGCAGCTCCTACGAGGGGTACTTC |
| | | CTCGCCTGCGAGAAGGAGAGGGACCTGTTCAAGCTCATCCTGAAGAAG |
| | | GAAGACGAGCTGGGGGATAGGAGCATCATGTTCACGGTGCAGAACGAG |
| | | GAC |
| 663 | IL2sp_IL18 | ATGTACCGGATGCAGCTACTCAGCTGCATCGCCCTCAGCTTGGCCCTG |
| | | GTCACCAACTCCTACTTCGGGAAGTTGGAATCCAAGCTCTCCGTTATC |
| | | AGGAATCTCAACGACCAGGTCCTCTTCATCGACCAGGGCAACCGCCCC |
| | | TTGTTCGAGGACATGACCGACTCCGACTGCAGGGACAACGCCCCCCGT |
| | | ACCATCTTCATCATCAGCATGTACAAGGACAGCCAGCCCAGGGGTATG |
| | | GCCGTCACCATCAGCGTCAAGTGCGAGAAGATTAGCACTCTCAGCTGT |
| | | GAGAACAAAATAATCAGCTTCAAGGAGATGAACCCCCCGGACAACATA |
| | | AAAGATACCAAGTCCGACATCATCTTCTTTCAGAGGAGCGTCCCCGGC |
| | | CATGACAACAAGATGCAGTTCGAGAGCAGCAGTTACGAAGGCTACTTC |
| | | CTGGCCTGCGAGAAGGAGAGGGACCTGTTCAAGCTGATCCTGAAGAAG |
| | | GAGGACGAGCTGGGGGATCGGAGCATAATGTTCACCGTGCAGAATGAG |
| | | GAC |
| 664 | IL2sp_IL18 | ATGTACAGGATGCAGCTCCTTAGCTGCATCGCGCTCTCCCTCGCCCTC |
| | | GTCACCAACTCCTACTTCGGCAAATTGGAGTCCAAGCTCAGCGTCATC |
| | | CGAAATCTAAACGATCAGGTCTTGTTTATCGACCAGGGGAACCGCCCC |
| | | CTCTTCGAGGACATGACCGACTCCGACTGCAGGGACAACGCCCCCAGG |
| | | ACTATCTTCATCATCAGCATGTACAAGGACAGCCAGCCCAGGGGTATG |
| | | GCCGTAACCATCAGCGTCAAGTGCGAGAAGATCTCCACCCTCAGCTGT |
| | | GAAAACAAGATAATCTCCTTCAAGGAGATGAACCCCCCAGATAACATA |
| | | AAAGATACCAAGTCGGACATCATCTTCTTCCAGAGGTCGGTGCCCGGC |
| | | CACGACAACAAGATGCAGTTCGAAAGCTCCAGCTACGAGGGCTACTTT |
| | | TTAGCCTGTGAAAAGGAGCGGGACCTGTTCAAGCTGATTCTGAAGAAG |
| | | GAGGACGAGCTGGGGGACAGGAGCATCATGTTCACCGTGCAGAACGAG |
| | | GAC |
| 665 | IL2sp_IL18 | ATGTACAGGATGCAACTCCTAAGTTGCATCGCCCTCAGCCTCGCGCTC |
| | | GTTACCAATAGCTACTTCGGCAAGCTCGAGAGCAAGCTCTCCGTCATT |
| | | AGGAACCTAAACGACCAGGTCCTCTTCATCGACCAGGGGAATAGGCCC |
| | | CTCTTCGAGGATATGACGGACAGCGACTGCAGAGACAACGCGCCCAGG |
| | | ACGATCTTCATCATCAGCATGTACAAGGACAGCCAGCCCCGCGGCATG |
| | | GCCGTCACAATCTCCGTCAAGTGCGAGAAGATCTCCACGCTCTCGTGC |
| | | GAGAACAAGATCATCAGCTTCAAGGAGATGAACCCTCCCGACAATATC |
| | | AAGGACACCAAGTCCGACATCATCTTCTTCCAGAGGTCCGTGCCCGGA |
| | | CACGACAACAAGATGCAGTTCGAGTCCAGCTCCTACGAGGGCTATTTT |
| | | CTGGCGTGCGAGAAGGAGCGGGACCTGTTCAAGCTGATCCTCAAGAAG |
| | | GAGGATGAGCTGGGGGACAGGAGCATCATGTTCACCGTCCAGAACGAG |
| | | GAC |
| 666 | IL2sp_IL18 | ATGTACAGGATGCAGTTGCTCAGCTGCATCGCCCTCAGCCTCGCCCTT |
| | | GTAACCAACAGCTATTTCGGGAAGCTTGAGAGCAAGTTGAGCGTCATC |
| | | AGGAACTTGAACGACCAGGTACTCTTCATCGACCAGGGCAACCGGCCT |
| | | CTCTTCGAGGACATGACGGACTCGGATTGCAGGGACAACGCCCCCAGG |
| | | ACCATCTTCATCATCAGCATGTACAAGGACTCCCAGCCCCGGGGGATG |
| | | GCCGTCACGATCTCCGTAAAGTGCGAGAAAATCAGCACCCTCAGCTGC |
| | | GAGAACAAAATCATCAGCTTCAAGGAGATGAACCCGCCCGACAATATC |
| | | AAGGACACCAAGTCCGACATCATCTTCTTCCAGAGGTCGGTGCCCGGC |
| | | CACGATAACAAGATGCAATTCGAGTCGAGCTCTTATGAGGGCTACTTC |
| | | CTGGCCTGCGAAAAGGAGCGCGACCTGTTCAAGCTGATCCTGAAGAAG |
| | | GAGGACGAGCTGGGCGATCGGAGCATCATGTTCACGGTGCAGAACGAG |
| | | GAC |
| 667 | IL2sp_IL18 | ATGTACAGGATGCAGCTCCTTAGCTGCATCGCCCTCTCCCTCGCCCTC |
| | | GTCACCAACTCCTACTTCGGCAAGCTCGAGAGTAAGCTTTCCGTCATT |
| | | CGCAACCTTAACGACCAGGTACTCTTCATCGACCAGGGCAACCGCCCC |
| | | CTCTTCGAGGACATGACCGACTCCGACTGCAGGGACAACGCGCCCCGA |
| | | ACCATTTTCATCATCAGCATGTACAAGGACTCCCAACCGAGGGGGATG |
| | | GCCGTCACAATCAGCGTCAAGTGCGAAAAGATAAGCACGCTCTCCTGC |
| | | GAGAATAAGATCATCTCCTTCAAGGAGATGAATCCGCCGGACAACATC |
| | | AAGGATACAAAGAGCGATATTATCTTCTTCCAGCGGAGCGTGCCGGGG |
| | | CACGACAACAAGATGCAGTTTGAGAGCTCCAGCTACGAGGGCTACTTC |
| | | CTGGCCTGCGAGAAGGAGCGTGACCTGTTCAAGCTCATCCTGAAGAAG |
| | | GAGGACGAGCTGGGGGACCGCAGCATCATGTTTACCGTGCAGAATGAG |
| | | GAC |
| 668 | IL2sp_IL18 | ATGTACCGTATGCAGCTCCTCAGTTGCATCGCCCTCAGCTTGGCCCTA |
| | | GTCACCAATAGCTACTTCGGGAAGCTCGAGAGCAAACTCTCCGTGATA |
| | | AGGAACCTCAACGATCAGGTCCTCTTCATCGACCAGGGCAACAGGCCG |
| | | CTGTTCGAGGACATGACCGATTCCGACTGCCGGGACAACGCCCCCCGG |
| | | ACCATCTTCATCATTAGCATGTATAAAGATAGCCAGCCGAGGGGCATG |
| | | GCCGTCACCATCAGCGTCAAGTGCGAGAAGATCAGCACCCTCAGCTGC |
| | | GAGAACAAGATCATCAGCTTTAAGGAGATGAATCCCCCTGACAACATA |
| | | AAGGACACCAAGAGCGATATTATCTTCTTCCAGCGCAGCGTGCCGGGG |
| | | CATGATAACAAGATGCAGTTCGAGAGCAGCAGCTACGAGGGGTATTTC |
| | | CTGGCCTGCGAGAAGGAGAGGGACCTCTTCAAGCTGATCCTGAAGAAG |
| | | GAGGACGAGCTGGGCGACCGGAGCATCATGTTTACGGTGCAGAACGAG |
| | | GAC |
| 669 | IL2sp_IL18 | ATGTACAGGATGCAGCTCCTCTCCTGCATCGCTCTCTCCCTCGCCCTC |
| | | GTCACCAACAGCTACTTCGGAAAGCTCGAGTCCAAGCTCAGCGTCATC |
| | | CGGAACCTAAACGACCAGGTCCTCTTCATCGATCAGGGGAACAGGCCC |
| | | CTCTTCGAGGACATGACCGACAGCGACTGCCGAGACAACGCCCCCCGG |
| | | ACCATCTTCATCATCAGTATGTACAAGGACAGCCAGCCCCGCGGCATG |
| | | GCCGTCACCATCTCCGTCAAGTGTGAGAAGATCAGCACGCTCAGCTGT |
| | | GAGAACAAGATCATCAGCTTCAAGGAGATGAACCCGCCCGATAACATC |
| | | AAGGACACCAAGAGCGACATCATCTTCTTCCAAAGGTCCGTCCCGGGT |
| | | CACGATAACAAGATGCAGTTCGAGAGCAGCAGCTACGAGGGCTACTTC |
| | | CTGGCCTGCGAGAAGGAGCGGGACCTGTTCAAGCTGATCCTGAAGAAA |
| | | GAGGACGAGCTCGGGGACCGCTCCATCATGTTCACCGTGCAGAACGAG |
| | | GAC |
| 670 | IL2sp_IL18 | ATGTACCGGATGCAGCTTCTCTCCTGCATCGCCCTCTCCCTAGCCCTC |
| | | GTAACCAACAGCTACTTCGGAAAGCTCGAGAGCAAGCTCTCCGTCATC |
| | | AGGAATCTCAACGACCAGGTTCTCTTTATCGACCAGGGGAATAGGCCC |
| | | CTATTCGAGGACATGACCGACAGCGACTGCAGGGATAACGCCCCCCGC |
| | | ACCATCTTCATCATCTCCATGTACAAGGACAGCCAGCCCAGGGGCATG |
| | | GCCGTCACCATCTCGGTCAAGTGCGAGAAAATCAGCACCCTCAGCTGC |
| | | GAGAACAAGATTATCAGCTTTAAGGAGATGAACCCCCCTGATAACATC |
| | | AAGGACACCAAAAGCGACATAATCTTCTTCCAGAGGAGCGTGCCCGGC |
| | | CACGATAACAAGATGCAATTCGAGTCCAGCAGCTACGAGGGCTACTTC |
| | | CTGGCCTGCGAGAAGGAGAGGGACCTGTTTAAGCTCATCCTGAAGAAG |
| | | GAGGACGAGCTGGGGGACCGGTCCATCATGTTCACTGTGCAGAACGAG |
| | | GAC |
| 671 | IL2sp_IL18 | ATGTACAGGATGCAACTCCTCTCGTGCATCGCCCTCAGCCTGGCACTC |
| | | GTAACCAACTCCTACTTCGGGAAGTTGGAGAGCAAGCTCTCGGTCATC |
| | | AGGAATCTCAACGACCAGGTCCTCTTCATAGACCAGGGCAACCGGCCC |
| | | CTCTTCGAGGACATGACCGACTCCGATTGCCGAGACAACGCCCCCAGG |
| | | ACCATCTTCATCATCAGCATGTACAAGGACTCCCAGCCCAGGGGGATG |
| | | GCCGTCACGATCTCCGTCAAGTGCGAGAAGATAAGCACCCTCAGCTGC |
| | | GAGAACAAAATCATATCCTTCAAGGAGATGAACCCGCCCGACAACATC |
| | | AAGGACACCAAGTCCGATATCATATTTTTCCAGCGGTCCGTGCCGGGG |
| | | CACGACAACAAGATGCAGTTCGAGTCCAGCTCCTATGAGGGGTATTTT |
| | | CTGGCGTGCGAGAAGGAGCGGGACCTGTTCAAGCTCATCCTGAAGAAG |
| | | GAGGACGAGCTGGGCGACCGCTCCATCATGTTCACCGTGCAGAACGAG |
| | | GAC |
| 672 | IL2sp_IL18 | ATGTACCGCATGCAGTTGCTTAGCTGCATCGCCCTCTCCCTAGCACTC |
| | | GTCACCAACAGCTACTTCGGCAAGCTCGAGTCCAAGCTCTCCGTCATA |
| | | AGGAACCTCAACGACCAGGTCCTCTTCATCGACCAGGGGAACAGGCCC |
| | | CTCTTCGAGGATATGACCGACTCCGACTGCAGGGACAACGCCCCCAGG |
| | | ACCATCTTTATCATCAGCATGTACAAGGATAGCCAGCCTCGGGGCATG |
| | | GCGGTCACCATCTCCGTCAAGTGTGAGAAGATCTCCACGTTGTCCTGC |
| | | GAGAACAAGATCATCTCCTTCAAGGAGATGAACCCGCCCGACAACATC |
| | | AAGGACACTAAATCCGACATCATTTTCTTCCAGAGGTCCGTGCCCGGG |
| | | CATGACAATAAGATGCAGTTCGAGAGCTCCAGCTACGAGGGCTACTTC |
| | | CTTGCCTGTGAGAAGGAGCGGGACCTGTTCAAGCTCATACTGAAGAAG |
| | | GAGGACGAGCTGGGGGACCGGAGCATTATGTTCACCGTGCAGAACGAG |
| | | GAT |
| 673 | IL2sp_IL18 | ATGTACCGCATGCAGCTCTTAAGCTGTATCGCCCTCAGCCTCGCCCTC |
| | | GTGACCAACTCATACTTCGGCAAGCTCGAGAGCAAGCTTAGCGTCATC |
| | | AGGAACCTTAACGACCAGGTCCTTTTCATCGATCAGGGGAACCGGCCC |
| | | CTCTTCGAAGACATGACCGACAGCGACTGTAGGGACAACGCGCCCCGA |
| | | ACCATCTTCATAATCAGCATGTACAAGGACAGCCAGCCGAGGGGCATG |
| | | GCCGTCACCATCAGCGTCAAGTGCGAGAAGATCAGCACGCTCAGCTGC |
| | | GAGAACAAGATCATCTCCTTCAAGGAGATGAACCCGCCCGACAACATC |
| | | AAGGACACGAAGTCCGACATAATTTTCTTCCAGCGCTCCGTGCCGGGG |
| | | CATGACAACAAAATGCAGTTCGAGAGCAGCAGCTACGAGGGCTACTTC |
| | | CTCGCCTGCGAGAAGGAGAGGGACCTGTTTAAGCTGATCCTGAAAAAG |
| | | GAGGACGAACTGGGGGACAGGAGCATCATGTTTACCGTGCAGAATGAG |
| | | GAT |
| 674 | IL2sp_IL18 | ATGTACCGGATGCAGTTGCTCAGCTGCATCGCCCTCAGCCTCGCCCTC |
| | | GTCACCAACTCCTACTTCGGCAAGCTCGAAAGCAAGCTCTCCGTAATC |
| | | CGCAACCTCAACGATCAGGTTTTATTCATCGACCAGGGTAACAGGCCC |
| | | CTCTTCGAGGACATGACCGACAGCGACTGCAGGGACAACGCCCCCCGG |
| | | ACCATTTTTATCATCTCCATGTACAAAGATAGCCAGCCGAGGGGGATG |
| | | GCCGTCACCATCTCCGTCAAGTGCGAAAAGATCAGCACTCTCAGCTGC |
| | | GAGAACAAAATCATCAGCTTCAAGGAGATGAATCCCCCCGACAACATC |
| | | AAGGACACCAAGAGCGACATCATCTTCTTCCAGAGGAGCGTACCTGGC |
| | | CACGATAACAAGATGCAGTTCGAGTCCAGCAGCTACGAGGGGTACTTC |
| | | CTGGCCTGTGAGAAGGAGAGGGACCTGTTCAAGCTCATCCTCAAAAAG |
| | | GAGGACGAGCTGGGGGACCGGAGCATCATGTTCACGGTGCAGAACGAG |
| | | GAC |
| 675 | IL2sp_IL18 | ATGTACCGGATGCAGTTGCTCAGCTGCATCGCGCTCTCGCTCGCCCTC |
| | | GTCACCAATTCCTACTTCGGCAAGCTCGAGAGCAAGTTGTCCGTCATC |
| | | CGCAACCTCAACGATCAGGTCCTCTTCATCGATCAGGGCAACCGGCCC |
| | | CTCTTCGAGGACATGACGGACAGCGACTGCCGCGATAACGCCCCCCGC |
| | | ACCATCTTCATCATCAGCATGTACAAGGACAGCCAGCCCCGGGGCATG |
| | | GCCGTTACCATCAGCGTCAAGTGCGAGAAGATCAGCACCCTCTCGTGC |
| | | GAGAACAAAATCATCAGCTTCAAGGAGATGAACCCTCCCGATAACATC |
| | | AAAGACACCAAGAGCGACATCATCTTCTTCCAGCGGAGCGTGCCCGGC |
| | | CACGACAACAAGATGCAGTTCGAGTCCAGCAGCTACGAGGGCTACTTC |
| | | CTCGCCTGCGAGAAGGAAAGGGACCTGTTCAAGCTGATCCTGAAAAAG |
| | | GAGGACGAACTGGGGGACAGGAGCATTATGTTCACCGTCCAGAACGAG |
| | | GAC |
| 676 | IL2sp_IL18 | ATGTACCGCATGCAGCTCTTGAGCTGCATCGCCTTAAGCCTCGCCCTC |
| | | GTCACCAATAGCTATTTCGGCAAGCTCGAGAGCAAGCTCTCCGTAATT |
| | | AGGAACCTCAACGACCAGGTCCTCTTTATCGACCAGGGCAATAGGCCC |
| | | CTCTTCGAGGACATGACCGACTCCGACTGCAGGGACAACGCCCCCAGG |
| | | ACCATCTTCATCATCAGCATGTATAAAGACTCCCAACCCAGGGGTATG |
| | | GCCGTCACCATCAGCGTCAAGTGCGAGAAGATCAGCACCCTCTCCTGC |
| | | GAGAATAAGATAATAAGCTTCAAGGAAATGAACCCGCCCGACAACATC |
| | | AAAGACACGAAAAGCGACATCATTTTCTTCCAGAGGAGCGTGCCCGGC |
| | | CACGACAATAAGATGCAGTTCGAGAGCTCGAGCTACGAGGGGTATTTC |
| | | CTGGCGTGCGAGAAGGAGAGGGACCTGTTCAAGCTCATCCTCAAGAAG |
| | | GAGGATGAGCTGGGCGATCGCTCCATCATGTTCACCGTGCAGAACGAG |
| | | GAC |
| 677 | IL2sp_IL18 | ATGTACAGGATGCAGCTCCTCAGCTGCATCGCGCTCAGTCTAGCCCTT |
| | | GTAACCAACTCCTACTTCGGCAAACTAGAGAGTAAGCTCTCCGTCATC |
| | | CGGAATCTCAACGACCAGGTCCTCTTCATCGACCAGGGCAACCGGCCG |
| | | CTGTTCGAGGATATGACGGATAGCGATTGCAGGGACAACGCCCCCAGG |
| | | ACTATCTTCATCATCAGCATGTACAAGGACAGCCAGCCCCGAGGCATG |
| | | GCCGTAACCATCTCCGTAAAGTGCGAGAAAATCTCCACCCTCAGCTGC |
| | | GAGAACAAAATCATCTCCTTCAAGGAGATGAACCCACCCGATAACATC |
| | | AAGGACACGAAAAGCGACATCATCTTTTTCCAGAGGAGCGTCCCCGGC |
| | | CATGACAACAAAATGCAGTTCGAGAGTAGCAGCTACGAGGGCTACTTC |
| | | CTGGCGTGCGAGAAGGAGAGGGACCTGTTCAAGCTCATCCTCAAGAAG |
| | | GAGGACGAGCTGGGCGACAGGAGCATAATGTTCACGGTGCAGAACGAG |
| | | GAC |
| 678 | IL2sp_IL18 | ATGTACAGGATGCAGCTCCTAAGCTGCATCGCCCTCAGCCTAGCCCTT |
| | | GTCACCAACAGCTACTTCGGGAAGCTCGAGAGCAAACTCTCCGTCATC |
| | | CGGAACCTCAACGACCAGGTCCTCTTCATCGACCAGGGCAACAGGCCC |
| | | CTCTTCGAGGACATGACCGATAGCGACTGCAGGGACAACGCCCCCCGG |
| | | ACCATCTTCATCATCAGCATGTACAAGGACAGCCAGCCCCGAGGCATG |
| | | GCCGTAACCATAAGCGTCAAGTGCGAGAAGATCTCCACCCTCAGCTGC |
| | | GAGAACAAAATCATCAGCTTCAAGGAGATGAACCCCCCGGACAATATC |
| | | AAGGACACCAAGAGCGATATCATCTTCTTTCAGCGGTCCGTCCCAGGT |
| | | CACGACAACAAGATGCAGTTCGAGAGCAGCAGCTATGAGGGCTACTTC |
| | | CTCGCCTGCGAGAAGGAGAGGGACCTGTTCAAGCTCATCCTGAAAAAG |
| | | GAGGATGAGCTGGGGGACCGCAGCATCATGTTCACCGTGCAGAATGAG |
| | | GAC |
| 679 | IL2sp_IL18 | ATGTACAGGATGCAGCTCCTCTCCTGCATAGCCCTCTCGCTCGCCCTC |
| | | GTAACCAACTCCTACTTCGGCAAGTTGGAGTCCAAGTTGTCGGTAATC |
| | | CGGAACTTGAACGATCAGGTCCTCTTCATAGATCAGGGCAACCGGCCC |
| | | CTCTTCGAGGATATGACCGACTCCGACTGCCGGGACAACGCCCCGCGC |
| | | ACCATCTTCATTATCTCCATGTACAAAGATAGCCAGCCGAGGGGTATG |
| | | GCCGTCACCATCAGCGTAAAGTGTGAAAAGATCTCCACACTCTCGTGC |
| | | GAGAACAAAATCATCTCCTTTAAGGAGATGAACCCTCCCGACAACATC |
| | | AAGGACACCAAGAGCGATATCATATTCTTTCAAAGGTCCGTGCCCGGC |
| | | CACGACAACAAGATGCAGTTCGAGAGCAGCAGCTACGAGGGGTACTTC |
| | | CTGGCCTGCGAGAAAGAACGGGACCTCTTCAAGCTGATCCTCAAGAAG |
| | | GAGGACGAGCTGGGGGACCGGAGCATCATGTTCACCGTCCAGAACGAA |
| | | GAC |
| 680 | IL2sp_IL18 | ATGTATCGGATGCAGCTCTTGAGCTGTATCGCCCTCAGCCTTGCGCTA |
| | | GTCACAAACTCCTACTTCGGCAAGCTCGAGAGCAAGCTCTCCGTCATC |
| | | AGGAACCTCAACGACCAGGTCCTCTTTATCGATCAGGGGAACAGGCCG |
| | | CTTTTCGAGGACATGACGGACAGCGATTGCAGGGATAACGCGCCGAGG |
| | | ACCATCTTCATCATCTCCATGTACAAGGACAGCCAGCCCAGGGGCATG |
| | | GCCGTAACCATCTCCGTAAAGTGCGAGAAGATCTCGACCCTCAGCTGC |
| | | GAGAATAAGATCATCAGCTTCAAGGAGATGAACCCTCCCGACAACATC |
| | | AAGGACACCAAGTCCGACATCATCTTTTTCCAACGGAGCGTTCCCGGA |
| | | CACGATAACAAGATGCAGTTTGAGAGCTCCTCCTACGAGGGGTACTTC |
| | | CTGGCGTGCGAGAAGGAGAGGGACCTGTTCAAGCTGATCCTGAAGAAG |
| | | GAAGACGAGCTCGGCGACAGAAGCATCATGTTCACCGTGCAGAACGAA |
| | | GAC |
| 681 | IL2sp_IL18 | ATGTACCGCATGCAGCTCCTCAGCTGCATCGCCCTAAGCTTGGCCCTT |
| | | GTCACCAACAGCTACTTCGGCAAGCTCGAGAGCAAGTTGAGCGTTATC |
| | | AGGAACTTGAACGACCAGGTCTTGTTCATCGACCAGGGCAACCGGCCC |
| | | CTATTCGAGGACATGACCGATAGCGATTGCCGGGACAACGCACCGAGA |
| | | ACCATCTTCATCATCAGCATGTACAAGGACAGCCAACCCCGGGGCATG |
| | | GCGGTAACCATCAGCGTTAAGTGCGAGAAGATCAGTACCCTCAGCTGC |
| | | GAGAACAAGATCATCAGCTTCAAGGAGATGAACCCGCCCGACAATATC |
| | | AAGGATACAAAGAGCGACATCATCTTTTTCCAGCGAAGCGTGCCCGGC |
| | | CACGACAACAAAATGCAGTTCGAGTCGTCGAGCTACGAGGGATATTTC |
| | | CTGGCGTGCGAGAAGGAGAGGGACCTGTTCAAACTCATCCTCAAGAAG |
| | | GAGGACGAGCTGGGGGATAGGAGCATCATGTTCACCGTGCAGAACGAG |
| | | GAC |
| 682 | IL2sp_IL18 | ATGTATCGGATGCAGCTCCTAAGCTGCATAGCCCTAAGCCTTGCCTTG |
| | | GTCACCAATAGCTACTTCGGGAAGCTTGAAAGCAAGCTCTCCGTCATC |
| | | CGGAATTTAAACGACCAGGTCCTTTTCATCGATCAGGGCAACAGGCCC |
| | | CTCTTCGAGGACATGACCGACAGCGACTGCCGGGACAACGCCCCCAGG |
| | | ACGATTTTCATCATCAGCATGTACAAGGATTCCCAGCCCCGGGGCATG |
| | | GCCGTCACCATCAGCGTCAAGTGCGAGAAGATCTCCACCCTTAGCTGT |
| | | GAGAACAAGATCATTAGCTTCAAGGAGATGAACCCGCCCGACAACATC |
| | | AAGGACACCAAAAGCGATATCATCTTCTTCCAGCGGAGCGTCCCGGGC |
| | | CACGACAACAAAATGCAGTTCGAGAGCAGCAGCTACGAGGGCTACTTT |
| | | CTCGCCTGCGAGAAAGAGAGGGATCTGTTCAAGCTCATCCTGAAGAAG |
| | | GAGGACGAGCTGGGGGATCGGAGCATCATGTTCACCGTGCAGAACGAG |
| | | GAC |
| 683 | IL2sp_IL18_ | ATGTATAGGATGCAGCTCCTTAGCTGCATCGCCCTCAGCTTGGCCCTC |
| | SN | GTCACCAACTCCTACTTCGGGAAGCTTGAGAGCAAGCTCAGCGTCATC |
| | | AGGAACCTTAACGATCAGGTTCTATTCATCGACCAGGGGAACAGGCCC |
| | | CTCTTCGAAGACATGACCAGCAGCGATTGCCGGAACAACGCCCCCCGG |
| | | ACCATCTTCATCATCTCCATGTACAAGGACAGCCAACCCAGGGGCATG |
| | | GCGGTCACCATCTCCGTCAAGTGCGAGAAGATCAGCACCCTCTCGTGC |
| | | GAAAACAAGATCATATCGTTCAAGGAGATGAACCCGCCCGACAACATA |
| | | AAGGACACCAAGTCCGACATCATCTTCTTTCAGCGGTCCGTGCCCGGG |
| | | CATGATAACAAGATGCAATTCGAGAGCTCCAGCTACGAGGGGTACTTC |
| | | CTGGCCTGCGAGAAGGAGAGGGACCTGTTCAAGCTGATCCTCAAGAAG |
| | | GAGGACGAGCTCGGCGACCGGAGCATCATGTTCACCGTCCAGAACGAG |
| | | GAT |
| 684 | IL2sp_IL18_ | ATGTACAGGATGCAGCTCCTCAGCTGCATCGCCCTCTCCCTCGCGCTC |
| | SN | GTCACGAACTCCTACTTCGGCAAGCTCGAGAGCAAGCTCTCCGTCATC |
| | | AGGAATCTCAACGACCAAGTCCTCTTTATCGACCAGGGCAACCGGCCG |
| | | CTGTTCGAGGACATGACCTCCTCCGACTGCCGGAACAACGCCCCTAGG |
| | | ACGATCTTCATCATCAGCATGTACAAGGACTCACAGCCCAGGGGCATG |
| | | GCGGTAACCATCAGCGTCAAGTGCGAGAAAATCAGCACACTCAGCTGC |
| | | GAGAACAAGATCATCTCCTTCAAGGAGATGAACCCGCCCGACAACATC |
| | | AAGGACACGAAGTCCGACATCATCTTCTTTCAGAGGAGCGTGCCGGGC |
| | | CACGACAACAAGATGCAGTTCGAAAGCTCCAGCTACGAGGGGTATTTC |
| | | CTGGCCTGCGAGAAGGAACGCGATCTGTTCAAGCTCATCCTCAAGAAA |
| | | GAGGACGAGCTGGGGGACCGGTCCATCATGTTCACCGTGCAGAACGAG |
| | | GAC |
| 685 | IL2sp_IL18_ | ATGTACAGGATGCAGCTCCTAAGCTGCATCGCCCTCTCCCTCGCGCTC |
| | SN | GTCACCAACTCCTATTTCGGGAAGCTGGAGAGCAAGCTCAGCGTAATC |
| | | AGAAATCTTAACGACCAGGTCTTATTCATCGATCAGGGGAATCGTCCC |
| | | CTCTTCGAGGACATGACCTCGAGCGACTGCAGGAACAACGCCCCCCGA |
| | | ACCATCTTCATAATCTCCATGTACAAGGACAGCCAGCCCAGGGGCATG |
| | | GCCGTCACCATCAGCGTAAAGTGCGAGAAGATCAGCACTCTCTCCTGT |
| | | GAGAATAAAATCATCAGCTTCAAGGAGATGAACCCGCCCGATAACATA |
| | | AAGGACACGAAAAGCGACATCATCTTCTTCCAGAGGAGCGTCCCCGGG |
| | | CATGACAACAAGATGCAGTTCGAGAGCAGCAGCTACGAGGGCTACTTC |
| | | CTGGCCTGCGAAAAGGAAAGGGACCTGTTCAAACTGATCCTGAAGAAG |
| | | GAGGACGAGCTGGGGGACAGGAGCATCATGTTCACGGTGCAGAATGAG |
| | | GAC |
| 686 | IL2sp_IL18_ | ATGTACAGGATGCAGCTCCTCAGCTGCATCGCGCTTTCTCTCGCCCTT |
| | SN | GTCACCAACAGCTACTTCGGTAAGCTCGAGAGCAAGTTGAGCGTCATC |
| | | AGGAACCTCAACGACCAGGTCCTCTTCATCGACCAGGGCAACCGGCCC |
| | | TTGTTCGAGGACATGACGTCCTCCGACTGTAGGAACAACGCCCCGAGG |
| | | ACCATCTTCATCATCTCCATGTACAAGGACAGCCAGCCCCGGGGGATG |
| | | GCCGTCACCATCTCCGTCAAGTGCGAGAAGATCTCCACGCTCTCCTGC |
| | | GAGAACAAGATAATCAGCTTCAAGGAGATGAACCCGCCCGACAATATT |
| | | AAGGACACGAAGTCCGACATCATCTTTTTCCAACGTAGCGTGCCGGGC |
| | | CACGACAACAAGATGCAGTTCGAGTCCAGCAGCTACGAGGGGTACTTC |
| | | CTGGCCTGCGAGAAAGAGCGGGACCTGTTCAAGCTCATACTCAAGAAG |
| | | GAGGACGAGCTGGGCGACCGGAGCATCATGTTCACCGTGCAAAATGAA |
| | | GAC |
| 687 | IL2sp_IL18_ | ATGTACAGGATGCAGCTACTCAGCTGCATCGCCCTCTCCCTCGCCCTC |
| | SN | GTAACGAACTCCTACTTCGGCAAGCTAGAGAGCAAGCTCAGCGTCATC |
| | | CGGAATCTCAACGACCAGGTCCTCTTCATAGACCAGGGCAATAGGCCC |
| | | CTCTTCGAGGATATGACCAGCTCCGACTGTAGGAACAACGCCCCCAGG |
| | | ACCATCTTCATAATCAGCATGTACAAGGACTCCCAGCCCCGGGGCATG |
| | | GCCGTCACCATCTCGGTGAAGTGCGAGAAGATCAGCACGCTCAGCTGC |
| | | GAAAACAAGATCATCTCCTTCAAGGAGATGAACCCTCCCGATAACATC |
| | | AAAGACACCAAGTCCGACATCATCTTCTTCCAGAGGAGCGTCCCTGGC |
| | | CATGACAACAAGATGCAGTTTGAGAGCTCGAGCTATGAGGGGTACTTC |
| | | CTGGCCTGTGAGAAGGAGCGGGACCTCTTCAAGCTGATCCTGAAGAAG |
| | | GAGGACGAGCTGGGGGACAGGTCCATCATGTTCACCGTGCAGAACGAG |
| | | GAC |
| 688 | IL2sp_IL18_ | ATGTACAGGATGCAGCTCCTCTCCTGCATCGCCCTTAGCTTAGCCCTC |
| | SN | GTCACCAACTCCTATTTCGGGAAGCTTGAGAGCAAGCTCTCGGTCATC |
| | | AGGAACCTTAACGACCAGGTCCTCTTCATCGACCAGGGCAACCGCCCC |
| | | CTCTTCGAGGACATGACCAGCAGCGACTGCCGCAACAACGCCCCCCGG |
| | | ACGATCTTCATTATCTCCATGTACAAGGACTCCCAGCCCAGGGGCATG |
| | | GCCGTGACCATCTCGGTCAAGTGCGAGAAGATCAGCACGCTCTCCTGT |
| | | GAGAACAAGATCATCTCGTTCAAGGAGATGAACCCTCCCGACAACATC |
| | | AAGGATACCAAGTCAGACATAATCTTCTTCCAGAGGAGCGTGCCCGGC |
| | | CACGACAACAAGATGCAGTTCGAGAGCTCCAGCTACGAGGGCTACTTT |
| | | CTGGCCTGCGAAAAGGAGCGCGACCTCTTCAAGCTGATCCTGAAGAAG |
| | | GAGGACGAGCTGGGGGACCGGAGCATCATGTTCACCGTGCAGAACGAG |
| | | GAC |
| 689 | IL2sp_IL18_ | ATGTACCGTATGCAGCTCTTGTCCTGCATCGCCCTTAGCCTCGCCCTA |
| | SN | GTTACCAACAGCTATTTCGGCAAGCTCGAAAGCAAGCTTAGCGTCATC |
| | | AGGAACCTCAACGACCAGGTTCTTTTCATCGACCAGGGCAACAGGCCC |
| | | CTCTTCGAGGATATGACCTCCAGCGACTGCAGGAACAACGCACCCAGG |
| | | ACCATCTTCATCATCTCCATGTACAAGGACAGCCAGCCCAGGGGCATG |
| | | GCCGTCACCATCTCCGTCAAGTGTGAGAAGATCAGCACGCTCTCCTGC |
| | | GAGAACAAGATCATCTCCTTCAAGGAGATGAACCCCCCAGATAACATC |
| | | AAGGACACCAAGTCCGACATCATATTCTTCCAGCGGAGCGTGCCGGGG |
| | | CACGACAACAAGATGCAGTTCGAGAGCAGCAGCTACGAGGGCTACTTC |
| | | CTGGCGTGCGAGAAGGAGAGGGACCTGTTCAAGCTGATCCTCAAGAAG |
| | | GAGGATGAGCTGGGTGATAGGAGCATCATGTTCACGGTGCAGAACGAG |
| | | GAC |
| 690 | IL2sp_IL18_ | ATGTATCGGATGCAGTTACTCTCCTGCATAGCCTTGAGCCTCGCCCTC |
| | SN | GTCACCAACTCCTACTTCGGCAAGCTAGAGAGCAAGCTCTCGGTCATC |
| | | AGGAATCTCAACGACCAGGTCCTCTTTATCGATCAGGGCAACAGGCCC |
| | | CTCTTCGAGGACATGACTTCGTCGGACTGCAGGAACAACGCCCCTAGG |
| | | ACCATCTTCATCATTAGCATGTACAAGGACTCCCAGCCCAGGGGCATG |
| | | GCCGTAACCATCAGCGTTAAGTGCGAGAAAATCAGCACCTTATCCTGC |
| | | GAGAACAAGATCATCTCCTTCAAGGAGATGAACCCTCCCGACAACATC |
| | | AAAGACACCAAGAGCGACATCATCTTTTTCCAGAGGTCGGTGCCCGGC |
| | | CACGACAATAAGATGCAGTTTGAGAGCTCAAGCTACGAGGGCTACTTT |
| | | CTGGCCTGCGAGAAGGAGAGGGATCTGTTCAAGCTGATCCTGAAGAAG |
| | | GAGGACGAGCTGGGGGACAGGTCCATAATGTTCACCGTGCAGAACGAG |
| | | GAC |
| 691 | IL2sp_IL18_ | ATGTACAGGATGCAGCTCTTAAGCTGCATCGCCTTGTCCCTCGCCCTC |
| | SN | GTCACCAATTCCTACTTCGGCAAGCTCGAAAGCAAGCTCTCCGTCATC |
| | | CGGAACCTCAACGACCAGGTCTTGTTCATCGACCAGGGGAATCGTCCC |
| | | CTCTTCGAGGACATGACCAGCTCCGACTGCAGGAACAACGCCCCCAGG |
| | | ACCATCTTCATCATCTCCATGTACAAGGACAGCCAGCCACGGGGCATG |
| | | GCCGTCACCATCAGCGTCAAGTGCGAGAAGATCAGCACGCTCAGCTGC |
| | | GAAAATAAGATCATCAGCTTCAAGGAGATGAACCCGCCAGACAATATA |
| | | AAGGACACCAAGAGCGACATCATCTTCTTCCAAAGGAGCGTCCCCGGC |
| | | CACGACAACAAGATGCAGTTCGAGTCCAGCTCCTACGAGGGGTATTTC |
| | | TTGGCGTGTGAGAAGGAGAGGGATCTCTTCAAGCTGATCCTGAAGAAA |
| | | GAGGACGAGCTGGGCGATAGGAGCATCATGTTCACCGTGCAGAACGAG |
| | | GAC |
| 692 | IL2sp_IL18_ | ATGTACCGGATGCAGCTTCTCAGCTGCATCGCCCTCAGCCTAGCGCTC |
| | SN | GTAACCAATAGCTATTTCGGGAAGCTCGAGAGCAAGCTCAGCGTCATC |
| | | CGAAACCTCAACGACCAGGTCCTTTTCATCGACCAGGGGAACAGGCCC |
| | | CTCTTCGAGGACATGACCTCCAGCGACTGCCGGAACAACGCCCCTCGG |
| | | ACGATCTTCATCATCTCCATGTACAAGGACTCACAGCCCCGGGGCATG |
| | | GCGGTTACCATCTCCGTTAAGTGCGAGAAGATCAGCACCCTCAGCTGC |
| | | GAGAACAAGATCATCTCCTTCAAGGAGATGAACCCGCCCGACAATATC |
| | | AAGGATACGAAAAGCGATATCATCTTCTTTCAGAGGAGCGTGCCGGGC |
| | | CATGACAACAAGATGCAGTTCGAGAGCAGCAGCTATGAGGGCTATTTC |
| | | CTGGCTTGCGAGAAGGAAAGGGACCTTTTCAAGCTCATCCTGAAGAAG |
| | | GAGGATGAACTGGGGGACAGGAGCATCATGTTCACCGTCCAGAACGAG |
| | | GAC |
| 693 | IL2sp_IL18_ | ATGTACCGTATGCAGCTCCTTAGCTGCATCGCCCTTAGCCTCGCGCTC |
| | SN | GTTACCAACTCCTACTTCGGCAAGCTCGAGAGCAAGCTCTCCGTTATC |
| | | AGGAACCTCAACGACCAGGTCCTCTTCATCGACCAGGGCAACAGGCCC |
| | | CTCTTCGAGGACATGACGTCCAGCGACTGCAGGAATAACGCCCCAAGG |
| | | ACCATCTTCATCATCAGCATGTATAAGGACAGCCAGCCCCGAGGGATG |
| | | GCCGTCACTATCAGCGTCAAGTGCGAAAAGATCAGCACCCTCTCCTGC |
| | | GAGAACAAGATCATCTCCTTCAAGGAGATGAATCCCCCCGACAACATC |
| | | AAGGATACCAAGAGCGACATCATCTTCTTCCAAAGGAGCGTGCCCGGC |
| | | CACGACAACAAGATGCAGTTCGAGTCCTCCAGCTACGAGGGCTACTTT |
| | | CTGGCCTGCGAGAAGGAGAGGGATCTGTTCAAGCTGATCCTGAAGAAG |
| | | GAGGACGAGCTGGGTGACAGGAGCATCATGTTCACCGTCCAGAACGAG |
| | | GAC |
| 694 | IL2sp_IL18_ | ATGTACAGGATGCAGCTCCTCAGCTGCATCGCCTTATCCCTGGCCCTC |
| | SN | GTCACCAACTCGTACTTCGGGAAGCTCGAGAGCAAGCTCAGCGTCATC |
| | | CGGAACCTCAACGACCAAGTCCTCTTCATCGATCAGGGGAACCGACCC |
| | | CTCTTCGAGGACATGACCAGCAGCGACTGTAGGAATAACGCCCCGCGC |
| | | ACGATCTTCATCATCAGCATGTACAAGGATTCACAGCCAAGGGGCATG |
| | | GCCGTTACCATCAGCGTCAAGTGCGAGAAGATCAGCACCCTTAGCTGC |
| | | GAGAATAAGATCATCTCCTTTAAGGAGATGAACCCGCCCGACAACATC |
| | | AAGGACACCAAGTCCGACATCATCTTCTTCCAGAGGAGCGTGCCCGGC |
| | | CACGATAACAAAATGCAGTTCGAGAGCTCCTCCTACGAGGGCTACTTC |
| | | CTCGCATGTGAGAAGGAGCGCGATCTCTTCAAGCTGATCCTGAAGAAG |
| | | GAGGACGAGCTGGGGGACAGGTCCATTATGTTCACCGTGCAGAACGAG |
| | | GAC |
| 695 | IL2sp_IL18_ | ATGTACAGGATGCAGCTCCTCTCCTGCATAGCCCTCTCGCTTGCCCTC |
| | SN | GTCACCAATAGCTACTTCGGCAAGTTGGAGTCCAAGCTCAGCGTCATC |
| | | CGAAACCTCAACGACCAGGTCCTTTTCATCGATCAGGGGAACAGGCCC |
| | | CTCTTCGAGGACATGACCTCGTCCGACTGTAGGAACAACGCCCCCCGG |
| | | ACCATCTTTATCATCTCCATGTACAAGGACTCCCAACCCAGGGGGATG |
| | | GCCGTCACCATCAGCGTCAAGTGCGAGAAGATCTCCACCCTCAGCTGC |
| | | GAGAACAAGATCATCTCCTTCAAGGAGATGAATCCCCCCGATAATATC |
| | | AAGGACACGAAGTCCGATATCATATTCTTCCAGAGGAGCGTCCCCGGC |
| | | CACGACAACAAGATGCAGTTCGAAAGCTCCAGCTACGAGGGTTACTTC |
| | | CTGGCCTGCGAAAAAGAGCGGGACCTCTTCAAGCTGATCCTCAAGAAG |
| | | GAGGACGAGCTGGGCGACCGCAGCATCATGTTTACGGTGCAGAACGAG |
| | | GAC |
| 696 | IL2sp_IL18_ | ATGTACAGGATGCAGCTCCTCAGCTGTATCGCCCTCAGCCTCGCCCTC |
| | SN | GTAACTAACTCCTACTTCGGAAAGCTCGAGTCCAAGCTCTCCGTCATC |
| | | AGGAATCTTAACGATCAGGTTTTATTCATCGATCAGGGGAACAGGCCC |
| | | CTCTTCGAGGACATGACCAGCTCCGACTGCAGGAACAACGCCCCCAGG |
| | | ACCATATTCATCATCTCGATGTATAAAGACAGCCAGCCCAGGGGCATG |
| | | GCCGTCACCATCAGCGTCAAGTGCGAGAAGATCAGCACCCTCTCCTGT |
| | | GAGAACAAGATCATCTCCTTCAAGGAGATGAACCCGCCCGATAACATC |
| | | AAGGACACCAAGTCCGACATCATATTTTTCCAGCGGAGCGTGCCCGGG |
| | | CATGACAACAAGATGCAGTTCGAGAGCAGCTCCTACGAAGGCTACTTC |
| | | CTCGCCTGCGAAAAGGAGCGGGACCTGTTCAAGCTGATCCTGAAGAAG |
| | | GAGGACGAGCTGGGGGACCGGAGCATCATGTTCACCGTGCAGAACGAA |
| | | GAC |
| 697 | IL2sp_IL18_ | ATGTACAGGATGCAGCTCCTCAGCTGCATCGCGCTCAGCCTCGCCCTT |
| | SN | GTCACCAACTCCTATTTCGGCAAGCTCGAGAGCAAGCTCAGCGTTATC |
| | | CGGAATCTCAACGACCAGGTCTTGTTTATAGACCAGGGCAACAGGCCC |
| | | CTCTTCGAGGACATGACCAGCAGCGACTGTCGGAACAACGCTCCCAGA |
| | | ACCATCTTCATCATATCCATGTATAAGGACAGCCAACCGAGGGGCATG |
| | | GCCGTCACGATCAGCGTCAAGTGCGAGAAGATCAGCACCCTTAGCTGC |
| | | GAGAATAAGATCATCTCCTTCAAGGAGATGAATCCGCCCGATAATATC |
| | | AAGGACACCAAGTCGGATATAATCTTCTTTCAGAGGTCCGTGCCCGGG |
| | | CATGACAACAAGATGCAGTTCGAGAGCAGCTCCTACGAGGGGTACTTT |
| | | CTGGCGTGCGAGAAGGAGCGTGACCTGTTCAAGCTGATCCTGAAGAAG |
| | | GAGGACGAGCTGGGGGACAGGAGCATTATGTTTACTGTGCAGAATGAG |
| | | GAC |
| 698 | IL2sp_IL18_ | ATGTACCGGATGCAGCTCCTCAGCTGCATCGCGCTCAGCCTCGCCCTC |
| | SN | GTCACAAACTCCTATTTCGGCAAGCTCGAGTCGAAGCTAAGCGTCATA |
| | | AGGAATCTGAACGACCAGGTCCTCTTCATCGACCAGGGGAACAGGCCC |
| | | CTCTTCGAGGACATGACCAGCAGCGACTGTAGGAACAACGCCCCCAGG |
| | | ACCATATTTATCATCAGCATGTACAAGGATAGCCAGCCCAGGGGCATG |
| | | GCCGTCACGATCAGCGTAAAGTGCGAGAAGATCAGCACCCTCAGCTGC |
| | | GAGAACAAAATCATCAGCTTCAAAGAAATGAACCCACCCGACAACATC |
| | | AAGGATACCAAGTCCGATATCATCTTCTTTCAGAGGTCCGTGCCCGGC |
| | | CACGACAACAAGATGCAGTTCGAGTCGAGCAGCTACGAGGGCTATTTC |
| | | CTCGCCTGCGAAAAGGAGAGGGACCTCTTTAAGCTGATCCTCAAGAAG |
| | | GAGGACGAGCTGGGGGACAGGAGCATCATGTTCACCGTGCAGAACGAG |
| | | GAT |
| 699 | IL2sp_IL18_ | ATGTACAGGATGCAGCTCCTCAGCTGCATAGCCCTCAGCCTAGCCTTA |
| | SN | GTCACCAACTCCTACTTCGGCAAGCTCGAGTCCAAGCTCTCCGTCATC |
| | | CGTAACCTTAACGATCAGGTCCTCTTTATCGACCAGGGGAACAGGCCC |
| | | CTCTTCGAGGACATGACGAGCAGCGACTGCAGGAACAACGCCCCGAGG |
| | | ACCATCTTCATCATCAGCATGTACAAAGACAGCCAGCCAAGGGGCATG |
| | | GCCGTCACCATCTCGGTCAAGTGCGAGAAGATCAGCACCCTCAGCTGC |
| | | GAGAACAAGATCATCAGCTTCAAGGAGATGAATCCGCCCGACAACATC |
| | | AAGGACACGAAGTCCGACATAATCTTCTTCCAGAGGAGCGTGCCCGGC |
| | | CACGACAACAAAATGCAGTTTGAGTCCTCCAGCTACGAAGGTTACTTT |
| | | CTCGCCTGCGAGAAAGAGAGGGACCTGTTCAAGCTGATCCTGAAGAAG |
| | | GAGGACGAGCTGGGGGACAGGTCCATCATGTTCACCGTCCAGAACGAG |
| | | GAT |
| 700 | IL2sp_IL18_ | ATGTACAGGATGCAATTGCTCAGCTGTATCGCCCTCTCCCTCGCACTC |
| | SN | GTGACCAACTCCTACTTCGGGAAGCTCGAGAGCAAGCTCTCGGTGATC |
| | | CGGAATCTTAACGACCAGGTCCTCTTCATCGACCAGGGCAACCGGCCC |
| | | CTCTTCGAGGATATGACCTCCTCCGACTGCAGGAATAACGCCCCGCGC |
| | | ACCATCTTCATCATCAGCATGTACAAGGACTCCCAGCCCAGGGGCATG |
| | | GCCGTCACGATCAGCGTCAAGTGCGAGAAGATCAGCACCCTCTCCTGT |
| | | GAGAATAAGATCATCAGCTTCAAGGAGATGAACCCGCCCGACAACATC |
| | | AAGGACACCAAGTCTGATATCATCTTCTTTCAAAGGAGCGTCCCCGGC |
| | | CATGATAACAAGATGCAATTCGAGAGCAGCAGCTACGAGGGCTACTTC |
| | | CTGGCCTGTGAGAAGGAGAGGGACCTGTTCAAGCTGATCCTGAAGAAG |
| | | GAGGACGAGCTGGGGGACAGGTCCATCATGTTCACGGTCCAGAACGAG |
| | | GAC |
| 701 | IL2sp_IL18_ | ATGTACAGGATGCAGTTATTAAGCTGCATCGCCCTCTCGCTCGCCTTG |
| | SN | GTCACCAACAGCTACTTCGGCAAGCTCGAGAGCAAGCTCTCCGTCATC |
| | | AGGAACCTCAACGACCAGGTCCTCTTCATCGACCAGGGCAACAGGCCC |
| | | CTTTTCGAGGACATGACCAGCAGCGACTGCCGAAACAACGCCCCCCGT |
| | | ACCATCTTCATCATCTCGATGTACAAGGACAGCCAGCCGAGGGGTATG |
| | | GCCGTCACCATCAGCGTCAAGTGCGAGAAAATCTCCACCCTCAGCTGC |
| | | GAAAACAAAATCATCTCCTTCAAGGAGATGAACCCCCCGGACAACATC |
| | | AAAGACACCAAAAGCGACATCATCTTCTTCCAGAGGTCCGTGCCCGGT |
| | | CACGACAATAAGATGCAGTTCGAGAGCTCGTCCTACGAGGGCTACTTC |
| | | CTCGCCTGCGAGAAGGAGAGGGACCTGTTCAAGCTGATCCTGAAGAAG |
| | | GAGGACGAGCTCGGCGACAGGAGCATCATGTTCACGGTGCAGAATGAG |
| | | GAC |
| 702 | IL2sp_IL18_ | ATGTACAGGATGCAGCTCCTCAGCTGCATCGCCCTCTCCCTCGCCCTC |
| | SN | GTTACCAACTCCTACTTCGGCAAGCTCGAGAGCAAACTCTCGGTTATC |
| | | AGGAACCTAAACGATCAGGTCCTGTTCATCGACCAAGGCAACAGGCCC |
| | | CTCTTCGAGGACATGACCAGCTCCGACTGCAGGAACAACGCCCCCAGG |
| | | ACCATCTTCATCATCAGCATGTACAAGGACAGCCAGCCCCGGGGCATG |
| | | GCGGTCACGATCAGCGTAAAGTGCGAGAAAATCTCCACCCTTAGCTGT |
| | | GAGAACAAGATAATCAGCTTTAAGGAGATGAACCCGCCGGACAACATA |
| | | AAGGACACCAAGTCCGATATCATCTTCTTTCAGAGGTCCGTGCCTGGA |
| | | CACGACAACAAGATGCAGTTTGAGAGCAGCTCCTATGAGGGGTACTTT |
| | | CTGGCCTGCGAAAAGGAGAGGGACCTGTTCAAGCTGATCCTGAAGAAG |
| | | GAGGACGAGCTGGGGGATAGGAGCATCATGTTCACCGTGCAAAACGAG |
| | | GAC |
| 703 | IL2sp_IL18_ | ATGTACAGGATGCAGCTTCTTAGCTGCATCGCGCTCAGCCTTGCTCTC |
| | SN | GTTACCAATAGCTACTTCGGCAAGCTTGAGTCCAAGTTGAGCGTAATC |
| | | AGGAACTTGAACGACCAGGTCCTCTTTATCGACCAGGGCAACAGGCCC |
| | | CTCTTCGAGGACATGACCAGTAGCGATTGTCGGAACAACGCCCCCAGG |
| | | ACCATATTCATCATCAGCATGTATAAGGACAGCCAGCCCAGGGGCATG |
| | | GCCGTCACGATCAGCGTCAAGTGTGAGAAGATCAGCACCCTCTCGTGC |
| | | GAGAACAAGATCATCTCCTTTAAGGAGATGAACCCGCCCGACAATATC |
| | | AAGGACACAAAGAGCGACATCATCTTCTTCCAGAGGAGCGTTCCTGGA |
| | | CACGACAACAAAATGCAGTTTGAGTCCAGCAGCTACGAAGGGTACTTT |
| | | CTGGCCTGCGAGAAGGAGCGGGACCTCTTTAAGCTCATCCTGAAGAAA |
| | | GAGGATGAGCTGGGCGACCGGAGCATCATGTTCACGGTGCAGAACGAA |
| | | GAC |
| 704 | IL2sp_IL18_ | ATGTACAGGATGCAGCTCCTCAGCTGCATCGCCCTCAGCCTCGCACTC |
| | SN | GTCACCAACTCCTACTTCGGAAAGCTCGAGTCAAAACTCTCCGTCATC |
| | | CGGAACCTCAACGACCAGGTACTCTTTATCGACCAGGGGAACAGGCCC |
| | | CTCTTCGAGGACATGACGTCCAGCGACTGCCGAAACAACGCACCCAGG |
| | | ACCATCTTCATCATCTCCATGTACAAGGACTCCCAGCCCAGGGGGATG |
| | | GCCGTTACCATCAGCGTCAAGTGCGAGAAGATCTCCACACTCAGCTGC |
| | | GAGAATAAGATCATATCCTTTAAGGAAATGAACCCGCCCGACAACATC |
| | | AAGGACACCAAGTCAGACATCATCTTCTTCCAGCGAAGCGTGCCGGGC |
| | | CATGACAACAAGATGCAGTTTGAGTCAAGCTCGTACGAGGGCTACTTC |
| | | CTGGCGTGTGAGAAGGAGAGGGACCTGTTCAAGCTCATCCTGAAGAAG |
| | | GAGGACGAGCTGGGGGATAGGAGCATCATGTTCACGGTGCAGAACGAG |
| | | GAC |
| 705 | IL2sp_IL18_ | ATGTACAGGATGCAGCTCCTCAGCTGCATCGCCCTCAGCCTTGCCTTG |
| | SN | GTCACCAACAGCTACTTCGGCAAGCTCGAGAGCAAGCTCAGCGTCATC |
| | | AGGAACCTCAACGACCAGGTCTTATTTATCGATCAGGGGAACCGCCCC |
| | | CTCTTCGAAGACATGACCTCCTCCGATTGTCGGAACAACGCCCCCAGG |
| | | ACCATCTTCATCATCAGCATGTACAAGGACAGCCAGCCCCGGGGGATG |
| | | GCCGTCACCATCAGCGTCAAGTGCGAGAAGATCTCCACCCTCTCGTGC |
| | | GAGAACAAGATCATCTCCTTCAAGGAGATGAACCCGCCCGACAACATC |
| | | AAGGACACCAAGTCCGACATCATCTTCTTCCAAAGGTCCGTGCCCGGC |
| | | CATGACAATAAGATGCAGTTCGAATCCAGCTCCTACGAGGGCTATTTC |
| | | CTGGCCTGCGAGAAGGAGCGGGACCTGTTCAAGCTGATCCTGAAGAAG |
| | | GAGGACGAACTGGGCGACAGGAGCATCATGTTCACCGTGCAGAACGAA |
| | | GAC |
| 706 | IL2sp_IL18_ | ATGTACAGGATGCAGCTGCTTAGCTGCATCGCCCTCTCCCTCGCCCTC |
| | SN | GTTACCAACAGCTACTTCGGCAAGCTCGAGAGCAAACTCAGCGTCATC |
| | | AGGAACCTTAACGACCAGGTCCTCTTCATCGACCAGGGCAATAGGCCG |
| | | TTATTCGAGGATATGACGAGCTCCGATTGCAGGAACAACGCCCCCCGC |
| | | ACTATCTTCATCATCTCCATGTACAAGGACAGCCAGCCCCGGGGGATG |
| | | GCCGTAACCATCAGCGTCAAGTGCGAGAAGATCAGCACCTTGAGCTGC |
| | | GAGAACAAGATCATCAGCTTCAAAGAGATGAACCCGCCCGACAACATC |
| | | AAGGACACCAAGTCCGACATTATATTCTTCCAGAGGAGCGTGCCGGGC |
| | | CACGACAATAAAATGCAATTCGAGAGCAGTTCCTACGAGGGGTACTTT |
| | | CTGGCCTGCGAGAAGGAGAGGGATCTCTTCAAGCTCATCCTCAAGAAG |
| | | GAGGACGAGCTGGGCGACAGGAGCATCATGTTCACCGTGCAAAACGAG |
| | | GAC |
| 707 | IL2sp_IL18_ | ATGTACAGAATGCAGCTCCTCAGCTGCATCGCACTCAGCCTCGCCCTC |
| | SN | GTAACCAATAGCTACTTCGGGAAGCTCGAGAGCAAGCTCTCCGTTATC |
| | | AGGAACCTCAACGACCAGGTCCTCTTCATCGACCAGGGCAACCGGCCC |
| | | TTATTCGAGGACATGACGAGCTCCGACTGTAGGAACAACGCGCCCAGG |
| | | ACCATCTTCATCATCTCCATGTACAAGGATTCGCAGCCGCGCGGGATG |
| | | GCCGTCACCATCAGCGTCAAGTGCGAGAAGATCTCCACCCTCAGCTGC |
| | | GAGAACAAGATCATCAGCTTTAAGGAGATGAACCCGCCCGACAACATC |
| | | AAGGATACCAAGAGCGACATCATCTTCTTCCAGCGGTCCGTGCCCGGC |
| | | CACGACAACAAGATGCAGTTCGAGAGCAGCAGCTACGAGGGATACTTC |
| | | CTGGCCTGCGAGAAGGAGCGGGACCTGTTCAAGCTGATCCTGAAGAAA |
| | | GAGGACGAACTGGGCGACCGCAGCATCATGTTCACGGTGCAGAACGAG |
| | | GAC |
| 708 | IgLC_IL18 | ATGGCCTGGACAGTCCTCCTCCTGGGGCTCCTCTCCCACTGCACCGGA |
| | | AGCGTCACGTCGTATTTCGGCAAGCTCGAGAGCAAGCTCTCCGTCATC |
| | | AGGAACCTCAACGATCAGGTCCTCTTCATCGACCAGGGGAACAGGCCC |
| | | CTTTTCGAGGACATGACCGACAGCGACTGCCGGGATAACGCCCCGCGG |
| | | ACGATCTTCATCATTTCCATGTACAAGGACAGCCAACCGCGGGGCATG |
| | | GCCGTCACGATCTCCGTCAAGTGCGAGAAGATCTCCACCCTCTCGTGC |
| | | GAGAACAAGATCATATCGTTCAAAGAGATGAATCCCCCCGACAACATA |
| | | AAGGACACGAAAAGCGACATTATCTTCTTCCAAAGGAGCGTGCCCGGC |
| | | CACGATAACAAGATGCAGTTCGAGAGCTCCAGCTACGAGGGCTACTTC |
| | | CTGGCCTGCGAGAAGGAGAGGGACCTGTTCAAGCTCATCCTGAAGAAG |
| | | GAGGATGAGCTAGGCGATCGGTCCATCATGTTCACCGTGCAGAACGAG |
| | | GAC |
| 709 | IgLC_IL18 | ATGGCCTGGACGGTCCTCCTTCTAGGCCTCCTCTCCCACTGTACGGGG |
| | | TCGGTAACGAGCTACTTCGGCAAGCTAGAGAGCAAGCTCAGCGTCATC |
| | | CGCAACCTCAACGACCAAGTCCTCTTCATCGACCAGGGGAACCGCCCC |
| | | CTCTTCGAGGACATGACCGACTCGGATTGCAGGGACAACGCGCCCCGC |
| | | ACCATCTTCATAATCAGCATGTACAAGGACTCCCAACCCAGGGGCATG |
| | | GCCGTTACCATCAGCGTCAAGTGCGAGAAGATCAGCACCCTCAGCTGT |
| | | GAGAATAAGATCATCAGCTTCAAGGAGATGAACCCCCCGGATAACATC |
| | | AAGGACACCAAGTCCGATATCATCTTCTTCCAGAGGAGCGTCCCCGGG |
| | | CACGATAATAAGATGCAGTTCGAGAGCTCCAGCTACGAGGGCTACTTC |
| | | CTGGCCTGCGAGAAAGAGCGGGACCTGTTCAAGCTGATTCTGAAGAAG |
| | | GAGGACGAGCTGGGGGATAGGTCCATCATGTTCACCGTGCAGAACGAG |
| | | GAC |
| 710 | IgLC_IL18 | ATGGCCTGGACCGTCCTCCTCCTCGGCTTACTCAGCCACTGCACGGGG |
| | | AGCGTCACGAGTTACTTCGGCAAACTCGAGAGCAAGCTTTCCGTTATC |
| | | CGGAATCTCAACGACCAGGTCCTTTTCATCGACCAGGGTAACAGGCCC |
| | | CTCTTCGAGGACATGACCGACAGCGACTGTCGGGACAACGCCCCCAGG |
| | | ACGATCTTCATCATCTCCATGTACAAGGATAGCCAGCCCAGAGGAATG |
| | | GCCGTTACGATCAGCGTCAAGTGCGAGAAGATCAGCACGCTCTCCTGC |
| | | GAGAACAAAATCATCTCCTTCAAGGAGATGAACCCGCCCGACAACATC |
| | | AAGGACACCAAGTCAGACATCATCTTCTTCCAGCGGAGCGTGCCTGGC |
| | | CACGACAATAAGATGCAGTTCGAGTCCTCGAGCTACGAGGGGTACTTC |
| | | CTGGCCTGCGAGAAGGAGAGGGACCTGTTCAAGCTGATCCTCAAAAAG |
| | | GAGGATGAGCTGGGCGACAGGTCCATCATGTTCACCGTCCAGAACGAG |
| | | GAT |
| 711 | IgLC_IL18 | ATGGCGTGGACCGTCCTCCTCTTAGGCCTCCTTAGCCACTGCACGGGC |
| | | AGCGTCACCAGCTACTTCGGAAAGCTCGAGTCCAAGCTCTCCGTCATC |
| | | CGGAACCTCAACGATCAAGTCCTCTTCATAGACCAGGGCAACCGCCCC |
| | | CTCTTCGAGGACATGACCGACTCCGACTGCAGGGACAACGCCCCCAGG |
| | | ACGATCTTCATCATCAGCATGTACAAGGACAGCCAGCCGCGCGGCATG |
| | | GCGGTAACCATCAGCGTTAAGTGCGAGAAGATCAGCACCCTCTCCTGC |
| | | GAGAACAAGATCATCTCCTTTAAGGAGATGAACCCGCCCGACAACATC |
| | | AAAGACACAAAATCGGACATCATCTTCTTCCAGAGGTCCGTACCCGGC |
| | | CACGACAATAAGATGCAGTTCGAGAGCAGCAGCTACGAGGGCTATTTC |
| | | CTCGCGTGCGAGAAGGAGCGGGACCTCTTCAAGCTCATCCTCAAAAAA |
| | | GAGGACGAGCTCGGCGACCGCTCCATCATGTTTACCGTCCAAAATGAG |
| | | GAC |
| 712 | IgLC_IL18 | ATGGCCTGGACCGTCCTCCTCCTCGGCCTCCTCAGCCATTGTACGGGC |
| | | TCCGTCACATCGTACTTCGGCAAGCTCGAGTCGAAACTCAGCGTCATA |
| | | CGGAATCTCAACGACCAGGTCCTCTTCATCGACCAGGGCAACAGGCCC |
| | | TTGTTCGAGGATATGACCGACTCGGACTGCAGGGACAACGCCCCCAGA |
| | | ACGATCTTCATCATATCCATGTACAAGGACAGCCAGCCCAGGGGCATG |
| | | GCCGTCACGATCAGCGTCAAGTGCGAGAAGATCAGTACCCTAAGCTGC |
| | | GAGAACAAGATCATCAGCTTCAAGGAGATGAACCCTCCCGACAACATC |
| | | AAAGATACCAAGAGCGACATCATCTTTTTTCAGAGGAGCGTGCCCGGC |
| | | CACGACAACAAGATGCAGTTCGAGAGCAGCTCCTACGAGGGCTACTTT |
| | | CTCGCCTGTGAAAAGGAGAGGGACCTGTTCAAGTTGATCCTGAAAAAG |
| | | GAGGACGAGCTGGGCGACCGGTCCATAATGTTTACCGTGCAGAACGAG |
| | | GAC |
| 713 | IgLC_IL18 | ATGGCCTGGACCGTCCTACTCCTCGGCTTGCTCAGCCACTGCACCGGG |
| | | TCCGTCACCAGCTACTTCGGCAAGCTCGAGAGCAAGCTCTCAGTCATC |
| | | CGGAACCTCAACGACCAGGTACTCTTCATCGACCAGGGCAATAGGCCG |
| | | CTTTTCGAGGATATGACCGATAGCGACTGCAGAGACAACGCCCCGCGG |
| | | ACCATCTTCATCATCTCCATGTACAAGGACAGCCAGCCCAGGGGCATG |
| | | GCCGTCACTATCTCGGTCAAGTGCGAAAAGATCTCCACCCTCTCCTGT |
| | | GAGAACAAGATCATCTCCTTCAAGGAGATGAACCCGCCCGACAACATC |
| | | AAGGACACCAAGTCCGACATCATATTCTTCCAGCGGAGCGTTCCGGGC |
| | | CATGACAACAAAATGCAGTTTGAATCCAGCAGCTACGAGGGCTACTTC |
| | | CTGGCGTGCGAGAAGGAGAGGGACCTGTTCAAGCTCATCCTCAAAAAG |
| | | GAGGATGAGCTGGGCGACCGGAGCATCATGTTCACCGTGCAGAACGAA |
| | | GAC |
| 714 | IgLC_IL18 | ATGGCCTGGACCGTCCTCCTACTGGGATTGCTCAGCCACTGCACCGGC |
| | | AGCGTAACTTCGTACTTCGGTAAGCTCGAGAGCAAGCTCAGCGTCATC |
| | | AGGAATCTCAACGACCAGGTCCTTTTCATCGATCAGGGGAACAGGCCC |
| | | CTCTTCGAGGACATGACCGATTCCGACTGTCGCGACAACGCCCCCAGG |
| | | ACCATCTTCATCATCTCCATGTACAAGGACAGCCAGCCCCGGGGCATG |
| | | GCCGTCACCATCAGCGTTAAGTGCGAGAAGATCAGCACGTTGAGCTGT |
| | | GAGAACAAAATCATAAGCTTCAAGGAAATGAACCCGCCCGACAACATC |
| | | AAGGACACCAAGAGCGACATCATCTTCTTCCAACGGTCGGTGCCCGGC |
| | | CACGATAACAAGATGCAGTTCGAGTCCTCCTCCTACGAGGGGTACTTC |
| | | CTCGCGTGCGAGAAGGAGAGGGATCTGTTCAAGCTCATCCTGAAGAAG |
| | | GAAGATGAGCTGGGCGATCGGTCCATCATGTTCACCGTGCAGAATGAG |
| | | GAC |
| 715 | IgLC_IL18 | ATGGCCTGGACGGTCCTCCTCCTCGGTCTGCTATCGCACTGTACGGGC |
| | | AGCGTCACCTCGTATTTCGGCAAACTCGAATCCAAGCTCTCGGTCATT |
| | | AGGAACCTCAACGATCAGGTCCTCTTCATCGACCAGGGCAACAGGCCC |
| | | CTCTTCGAGGATATGACCGATAGCGACTGCCGGGATAACGCCCCCAGG |
| | | ACCATCTTCATCATCAGCATGTACAAGGACTCGCAGCCCCGCGGCATG |
| | | GCCGTGACCATCAGCGTCAAGTGCGAGAAAATCTCCACGCTAAGCTGC |
| | | GAGAACAAGATCATCAGCTTCAAGGAGATGAACCCCCCAGACAACATC |
| | | AAGGACACGAAAAGCGACATCATCTTCTTCCAGAGGAGCGTCCCCGGC |
| | | CACGACAACAAGATGCAGTTCGAGTCGTCGAGCTATGAGGGGTACTTC |
| | | CTGGCCTGCGAGAAGGAGAGGGACCTGTTCAAGCTGATCCTGAAAAAG |
| | | GAGGATGAACTGGGCGACAGGAGCATCATGTTCACCGTGCAGAACGAA |
| | | GAC |
| 716 | IgLC_IL18 | ATGGCCTGGACCGTATTGCTCCTCGGCCTCCTCAGCCACTGTACGGGC |
| | | TCGGTCACCTCCTATTTCGGCAAGCTAGAATCCAAGCTCTCCGTAATC |
| | | AGGAACTTGAACGATCAGGTCCTCTTTATCGATCAGGGAAATAGGCCC |
| | | CTTTTCGAGGACATGACCGACTCGGACTGCCGGGACAACGCCCCCCGC |
| | | ACCATATTCATCATCAGCATGTATAAGGACTCCCAGCCCAGGGGCATG |
| | | GCCGTAACCATCAGCGTCAAGTGTGAGAAGATCTCCACCCTCAGCTGC |
| | | GAGAACAAGATCATCTCCTTCAAGGAGATGAACCCGCCCGACAACATC |
| | | AAGGACACCAAGAGCGACATCATCTTCTTCCAACGTAGCGTGCCCGGT |
| | | CACGACAACAAGATGCAGTTCGAGTCCTCATCGTACGAGGGCTACTTT |
| | | CTCGCCTGCGAGAAGGAGCGGGATCTGTTCAAGCTCATCCTGAAGAAG |
| | | GAGGACGAGCTGGGCGATAGGTCCATAATGTTCACCGTCCAGAACGAG |
| | | GAC |
| 717 | IgLC_IL18 | ATGGCGTGGACCGTCCTCCTCCTAGGCCTCTTGAGCCACTGCACCGGC |
| | | AGCGTCACCAGCTACTTCGGCAAACTCGAGTCCAAGCTCAGCGTGATC |
| | | AGGAACCTCAACGATCAGGTCCTCTTTATCGACCAGGGGAATCGTCCC |
| | | CTCTTCGAAGACATGACCGACTCCGACTGCCGGGATAACGCCCCGCGA |
| | | ACGATCTTTATCATCTCCATGTATAAGGACAGCCAGCCCAGAGGCATG |
| | | GCCGTCACCATCAGCGTTAAGTGCGAGAAGATCTCCACCCTCAGCTGC |
| | | GAGAACAAGATCATCAGCTTCAAGGAGATGAACCCACCCGACAACATC |
| | | AAGGACACCAAGAGCGACATCATATTTTTCCAGCGGAGCGTGCCCGGC |
| | | CATGACAACAAAATGCAGTTCGAGTCGTCAAGCTACGAGGGTTATTTC |
| | | CTCGCCTGCGAGAAGGAGCGCGACCTCTTTAAGCTGATTCTCAAGAAG |
| | | GAGGACGAGCTGGGCGACCGAAGCATCATGTTCACCGTCCAGAACGAG |
| | | GAC |
| 718 | IgLC_IL18 | ATGGCCTGGACCGTCCTCCTCCTTGGACTCCTCTCCCATTGCACCGGG |
| | | TCGGTCACGTCCTACTTCGGCAAGCTCGAGTCCAAACTCAGCGTCATA |
| | | AGGAATCTCAACGACCAGGTCCTCTTCATCGACCAGGGAAACCGGCCC |
| | | CTTTTCGAGGACATGACCGACTCGGACTGCAGGGACAACGCCCCGCGG |
| | | ACCATCTTCATCATCAGCATGTACAAGGACAGCCAGCCCAGGGGCATG |
| | | GCCGTCACCATAAGCGTCAAGTGCGAGAAGATCAGCACCCTCAGCTGT |
| | | GAAAACAAGATCATCAGCTTCAAGGAGATGAACCCGCCCGACAACATC |
| | | AAGGACACCAAGAGCGACATCATCTTCTTCCAGCGGTCCGTGCCGGGC |
| | | CATGACAACAAGATGCAGTTCGAGTCCTCCAGCTACGAGGGGTACTTC |
| | | CTGGCCTGCGAGAAGGAGCGAGATCTGTTCAAGCTAATCCTGAAGAAG |
| | | GAGGACGAGCTGGGCGACCGCTCGATCATGTTCACCGTGCAGAATGAG |
| | | GAT |
| 719 | IgLC_IL18 | ATGGCCTGGACCGTCCTCCTCCTCGGGCTCCTTAGCCACTGTACCGGG |
| | | TCCGTGACCTCCTACTTCGGGAAACTCGAAAGCAAACTCAGCGTCATC |
| | | CGGAACTTGAACGACCAGGTCCTCTTCATCGACCAGGGCAACCGGCCC |
| | | CTCTTCGAGGATATGACCGATAGCGATTGCAGGGACAACGCCCCCAGG |
| | | ACCATCTTCATCATATCCATGTACAAGGACAGCCAGCCGAGGGGCATG |
| | | GCCGTAACCATCAGCGTCAAGTGTGAGAAGATCAGCACGCTAAGCTGC |
| | | GAGAATAAAATCATCTCCTTTAAGGAGATGAACCCGCCCGACAACATC |
| | | AAGGACACGAAGTCCGACATAATCTTCTTTCAGCGGAGCGTGCCAGGC |
| | | CACGATAACAAGATGCAGTTCGAGTCCTCGAGCTACGAAGGCTACTTT |
| | | CTGGCCTGTGAAAAAGAGAGGGACCTGTTCAAGCTGATCCTGAAGAAG |
| | | GAGGACGAACTCGGCGACCGGAGCATCATGTTCACCGTGCAAAACGAA |
| | | GAC |
| 720 | IgLC_IL18 | ATGGCGTGGACCGTCCTACTCCTCGGGCTCCTCTCCCACTGCACCGGA |
| | | AGCGTCACCAGCTATTTCGGCAAGCTCGAAAGCAAGCTATCCGTCATC |
| | | CGGAACCTCAACGACCAGGTCCTCTTCATCGATCAGGGGAACAGGCCC |
| | | CTCTTCGAGGATATGACGGACAGCGATTGCAGGGACAACGCCCCGAGG |
| | | ACCATCTTCATAATCAGCATGTACAAGGACAGCCAGCCCAGGGGGATG |
| | | GCCGTCACCATCAGCGTAAAGTGCGAGAAGATCAGCACGCTCAGCTGC |
| | | GAGAACAAGATCATCTCCTTCAAAGAGATGAACCCACCCGACAACATC |
| | | AAGGACACAAAGAGCGACATAATATTTTTCCAGCGCTCCGTCCCGGGC |
| | | CACGACAACAAAATGCAATTCGAGAGCTCAAGCTATGAGGGCTACTTC |
| | | CTGGCCTGCGAGAAGGAAAGGGACCTGTTCAAGCTGATCCTCAAGAAG |
| | | GAGGACGAGCTGGGCGATCGGTCGATCATGTTCACCGTCCAGAACGAG |
| | | GAT |
| 721 | IgLC_IL18 | ATGGCGTGGACCGTACTCCTCCTCGGCCTTCTCAGCCATTGCACCGGC |
| | | AGCGTCACCTCCTACTTCGGGAAGCTCGAAAGCAAGCTAAGCGTCATC |
| | | CGCAACCTAAACGACCAGGTCTTGTTCATCGACCAGGGCAACAGGCCC |
| | | CTCTTCGAGGACATGACCGACAGCGATTGCAGGGACAACGCCCCGAGG |
| | | ACCATCTTCATCATCTCCATGTATAAGGACAGCCAGCCCAGGGGGATG |
| | | GCCGTCACCATCAGCGTCAAGTGCGAAAAGATCAGCACGCTCTCCTGC |
| | | GAGAACAAGATCATCTCCTTCAAGGAAATGAACCCGCCCGACAATATC |
| | | AAAGACACGAAGTCCGATATCATCTTCTTTCAGAGGAGCGTGCCCGGC |
| | | CATGACAACAAGATGCAGTTTGAGTCCTCCAGCTACGAGGGCTACTTC |
| | | CTGGCCTGTGAAAAGGAGCGGGATCTCTTCAAGCTGATCCTGAAGAAG |
| | | GAGGACGAGCTGGGGGACAGAAGCATCATGTTCACCGTGCAGAACGAG |
| | | GAC |
| 722 | IgLC_IL18 | ATGGCCTGGACCGTCCTCCTTCTCGGCCTCCTCAGCCACTGCACCGGC |
| | | AGCGTCACCAGCTACTTCGGTAAGCTGGAGAGTAAGTTGAGCGTAATC |
| | | CGGAATCTCAACGACCAAGTCCTCTTCATCGACCAGGGGAACCGACCC |
| | | CTCTTCGAGGACATGACCGATTCGGACTGCCGGGACAACGCCCCCCGG |
| | | ACCATCTTCATCATCAGCATGTACAAGGACTCCCAACCCAGGGGAATG |
| | | GCCGTAACCATCTCCGTTAAGTGCGAGAAGATCTCAACCCTTAGCTGC |
| | | GAGAACAAAATCATCTCCTTTAAAGAGATGAACCCTCCCGACAACATC |
| | | AAGGACACCAAGTCGGACATCATCTTCTTCCAGAGGTCCGTGCCCGGG |
| | | CATGACAACAAGATGCAATTTGAGAGCAGCAGCTACGAGGGCTACTTT |
| | | CTCGCCTGCGAGAAGGAGCGGGACCTGTTCAAGCTGATCCTGAAGAAA |
| | | GAGGATGAGCTGGGCGACAGGTCCATAATGTTCACGGTGCAGAACGAA |
| | | GAT |
| 723 | IgLC_IL18 | ATGGCCTGGACCGTCCTTCTCTTGGGCCTCCTCTCCCACTGCACCGGC |
| | | TCCGTCACCTCCTACTTCGGCAAGCTCGAGAGCAAACTCAGCGTCATA |
| | | AGGAACCTCAACGACCAGGTTCTCTTCATCGACCAGGGCAACCGCCCC |
| | | TTATTCGAGGATATGACCGACAGCGATTGCCGGGACAACGCGCCCAGG |
| | | ACCATCTTCATCATCTCCATGTACAAGGACAGCCAGCCTAGGGGCATG |
| | | GCCGTCACCATCAGCGTCAAGTGTGAGAAGATCTCGACCTTGAGCTGC |
| | | GAAAATAAGATTATCAGCTTCAAGGAGATGAACCCACCGGATAATATC |
| | | AAGGACACCAAGAGCGACATAATCTTCTTCCAGCGGAGCGTGCCGGGG |
| | | CACGACAACAAGATGCAGTTCGAGTCGAGCTCCTACGAGGGTTACTTC |
| | | CTGGCCTGTGAGAAGGAGAGGGACCTGTTCAAGCTGATCCTGAAGAAG |
| | | GAGGACGAGCTGGGGGACAGGAGCATCATGTTCACCGTCCAGAACGAG |
| | | GAC |
| 724 | IgLC_IL18 | ATGGCCTGGACAGTCCTCCTCCTCGGGCTCCTCAGCCACTGCACCGGC |
| | | AGCGTCACCTCCTACTTCGGCAAGCTCGAGAGCAAGCTCAGCGTCATC |
| | | AGGAACCTCAACGATCAGGTCCTCTTCATCGACCAGGGGAACAGGCCC |
| | | CTCTTCGAGGATATGACCGACAGCGACTGCCGGGATAACGCGCCCCGG |
| | | ACCATCTTCATCATCAGCATGTACAAGGACAGCCAACCCAGGGGCATG |
| | | GCCGTCACCATCAGCGTCAAGTGCGAAAAGATCAGCACCCTCAGCTGC |
| | | GAGAACAAAATCATAAGCTTTAAGGAGATGAACCCTCCCGACAACATC |
| | | AAGGACACGAAGTCCGACATCATCTTCTTTCAGCGGAGCGTGCCCGGG |
| | | CATGACAACAAAATGCAGTTCGAGAGCTCCAGCTATGAGGGGTACTTT |
| | | CTGGCGTGCGAGAAGGAGAGGGATCTCTTCAAGCTGATCCTGAAAAAG |
| | | GAGGACGAGCTGGGCGACCGGAGCATCATGTTCACCGTCCAGAATGAA |
| | | GAC |
| 725 | IgLC_IL18 | ATGGCCTGGACCGTACTCCTCCTCGGGCTCCTCTCACACTGTACCGGC |
| | | AGCGTCACCAGCTACTTCGGGAAGCTCGAGTCCAAGCTCAGCGTCATC |
| | | CGGAACCTCAACGATCAGGTACTCTTCATCGACCAGGGCAACCGCCCG |
| | | CTGTTCGAGGATATGACGGACAGCGACTGCCGGGACAACGCCCCTCGG |
| | | ACCATCTTCATCATCAGCATGTACAAGGATAGCCAGCCCCGCGGTATG |
| | | GCCGTAACTATCAGCGTAAAGTGCGAGAAGATCTCCACCCTCAGCTGC |
| | | GAGAACAAGATCATAAGTTTCAAGGAGATGAACCCACCCGATAACATC |
| | | AAGGACACCAAGAGTGATATCATCTTCTTCCAGAGGTCGGTGCCCGGC |
| | | CACGACAACAAGATGCAGTTTGAAAGCAGCTCCTACGAGGGGTACTTC |
| | | CTGGCCTGCGAGAAGGAGAGGGACCTGTTCAAGCTGATCCTGAAAAAG |
| | | GAGGACGAGCTGGGCGACCGGAGCATCATGTTCACCGTGCAGAACGAG |
| | | GAT |
| 726 | IgLC_IL18 | ATGGCCTGGACCGTCCTCCTCCTCGGACTCCTCAGCCATTGCACCGGC |
| | | AGCGTCACCAGCTACTTCGGTAAGCTAGAGAGCAAGCTTAGCGTCATT |
| | | CGCAACCTCAACGACCAGGTACTCTTCATCGACCAGGGCAATCGGCCC |
| | | CTCTTCGAGGACATGACCGACAGCGACTGCCGGGACAACGCCCCCAGG |
| | | ACCATCTTCATCATCAGCATGTACAAAGACTCCCAGCCGAGGGGGATG |
| | | GCCGTTACCATCTCCGTAAAGTGCGAGAAGATTAGCACCCTCAGCTGC |
| | | GAAAACAAGATCATCTCCTTCAAGGAGATGAACCCGCCCGATAACATC |
| | | AAGGACACCAAGAGCGACATCATCTTCTTCCAGAGGAGCGTCCCCGGC |
| | | CACGACAATAAGATGCAGTTCGAGAGCAGCAGCTACGAGGGCTACTTC |
| | | CTGGCCTGCGAGAAGGAGAGGGACCTGTTCAAGCTCATCCTGAAAAAA |
| | | GAGGACGAGCTGGGCGACCGAAGCATCATGTTCACCGTTCAGAACGAG |
| | | GAC |
| 727 | IgLC_IL18 | ATGGCGTGGACCGTTCTCCTACTCGGATTGCTTAGCCACTGCACCGGC |
| | | AGCGTCACAAGCTACTTCGGTAAGCTCGAGAGCAAGCTCAGCGTGATC |
| | | CGGAACCTCAACGACCAGGTCCTCTTCATCGACCAGGGGAATCGGCCC |
| | | CTCTTCGAAGACATGACCGACTCCGACTGTAGGGACAACGCCCCCAGG |
| | | ACCATCTTCATCATCAGCATGTACAAGGACAGCCAGCCCCGCGGAATG |
| | | GCCGTCACGATCTCCGTAAAGTGCGAGAAGATCTCCACCCTTTCCTGC |
| | | GAGAACAAGATCATCAGCTTCAAGGAGATGAACCCGCCCGACAATATC |
| | | AAGGACACCAAGAGCGACATCATCTTCTTTCAGAGGAGCGTGCCCGGC |
| | | CATGACAATAAGATGCAGTTCGAGAGCAGCTCGTACGAGGGCTATTTC |
| | | CTGGCCTGCGAGAAGGAGAGGGACCTGTTTAAGCTGATCCTGAAGAAG |
| | | GAGGACGAGCTGGGGGACAGGAGCATCATGTTCACCGTGCAGAACGAG |
| | | GAC |
| 728 | IgLC_IL18 | ATGGCCTGGACCGTCCTCCTCCTCGGCCTCCTCTCCCACTGTACCGGC |
| | | TCCGTTACGAGCTACTTCGGCAAGCTAGAGAGCAAGCTCAGCGTTATC |
| | | AGGAACCTCAACGACCAGGTCCTTTTCATCGACCAGGGCAATCGGCCC |
| | | CTTTTCGAAGACATGACCGACAGCGACTGTCGGGACAACGCTCCGAGG |
| | | ACCATCTTCATCATCAGCATGTACAAGGACAGCCAGCCCAGAGGGATG |
| | | GCCGTCACCATCAGCGTCAAGTGCGAGAAGATAAGCACCCTCTCGTGC |
| | | GAGAACAAAATCATCTCCTTCAAAGAGATGAACCCCCCGGACAACATC |
| | | AAGGACACCAAGAGCGATATCATTTTCTTCCAACGTAGCGTCCCCGGG |
| | | CACGACAACAAGATGCAGTTCGAGAGCAGCAGCTACGAGGGCTACTTC |
| | | CTCGCCTGCGAAAAGGAAAGGGACCTCTTCAAGCTGATCCTGAAGAAG |
| | | GAGGATGAGCTCGGGGACAGGTCCATCATGTTCACGGTGCAGAACGAA |
| | | GAC |
| 729 | IgLC_IL18 | ATGGCCTGGACGGTCCTCCTCTTGGGGCTACTCAGCCATTGCACCGGC |
| | | TCCGTCACCAGCTACTTCGGCAAGCTCGAGTCCAAGCTCTCCGTAATC |
| | | AGGAATCTCAACGACCAGGTCCTCTTCATCGACCAGGGGAACCGGCCC |
| | | CTCTTCGAAGACATGACCGACAGCGACTGTCGGGACAACGCCCCCAGG |
| | | ACGATCTTCATAATCTCCATGTACAAGGATAGCCAGCCCAGGGGGATG |
| | | GCCGTCACCATCAGCGTCAAGTGTGAGAAGATCTCCACGCTCAGCTGC |
| | | GAGAATAAGATCATTTCCTTCAAGGAGATGAACCCGCCCGACAACATC |
| | | AAGGACACGAAAAGCGACATCATCTTCTTTCAGCGCTCCGTCCCGGGC |
| | | CACGACAACAAGATGCAGTTCGAGTCCAGCTCCTACGAGGGCTACTTT |
| | | CTGGCCTGCGAAAAGGAACGGGATCTCTTCAAGCTGATTCTCAAGAAG |
| | | GAGGACGAGCTGGGTGACAGGAGCATCATGTTTACGGTGCAGAATGAG |
| | | GAT |
| 730 | IgLC_IL18 | ATGGCGTGGACGGTCCTCCTCCTAGGCCTTCTCTCCCACTGCACCGGT |
| | | AGCGTCACCAGCTACTTCGGCAAGCTCGAGTCGAAGCTCAGCGTCATA |
| | | CGGAACCTCAACGACCAGGTTCTCTTCATCGACCAGGGAAACCGTCCC |
| | | CTCTTCGAAGACATGACCGACTCCGACTGCCGGGACAACGCGCCCAGG |
| | | ACGATCTTCATAATCAGCATGTACAAGGACTCGCAGCCCAGGGGCATG |
| | | GCCGTAACCATCAGCGTCAAGTGCGAAAAGATCTCCACCCTCAGCTGC |
| | | GAGAACAAGATAATCAGCTTCAAGGAGATGAACCCGCCCGACAACATC |
| | | AAGGACACCAAGTCCGACATCATCTTCTTCCAGCGCTCCGTGCCCGGC |
| | | CACGACAATAAGATGCAGTTTGAGAGCAGCTCCTACGAAGGCTACTTT |
| | | CTGGCCTGCGAGAAGGAGCGGGACCTGTTCAAGCTGATCCTGAAGAAG |
| | | GAGGACGAGCTGGGCGATCGGAGCATCATGTTCACGGTGCAGAACGAG |
| | | GAC |
| 731 | IgLC_IL18 | ATGGCGTGGACGGTCCTCCTCCTCGGCCTCCTCTCACACTGCACCGGG |
| | | AGCGTCACCAGCTACTTCGGCAAGCTCGAAAGCAAGCTCTCGGTCATC |
| | | AGGAACCTCAACGACCAGGTCCTCTTCATCGACCAGGGTAATCGCCCA |
| | | CTCTTCGAGGATATGACCGACAGCGATTGCCGGGACAACGCCCCGCGT |
| | | ACAATCTTCATCATCAGTATGTACAAGGACAGCCAGCCGCGGGGCATG |
| | | GCCGTCACCATCTCCGTCAAGTGCGAAAAGATCAGCACGCTTAGCTGC |
| | | GAGAACAAGATCATCAGCTTCAAGGAGATGAATCCTCCCGACAACATC |
| | | AAGGATACCAAGTCCGATATCATTTTCTTCCAGCGGTCCGTGCCAGGC |
| | | CACGACAACAAGATGCAATTTGAAAGCTCCTCCTACGAGGGCTACTTC |
| | | CTGGCCTGCGAGAAGGAAAGGGACCTGTTCAAGCTGATCCTGAAGAAG |
| | | GAGGACGAGCTGGGCGACAGGTCCATCATGTTTACTGTGCAGAACGAG |
| | | GAC |
| 732 | IgLC_IL18 | ATGGCCTGGACCGTACTACTCCTCGGCCTCCTTTCCCACTGCACCGGT |
| | | TCGGTCACGAGCTACTTCGGCAAGCTGGAGAGCAAGCTCTCGGTCATC |
| | | CGGAACCTCAACGACCAGGTCCTCTTCATCGACCAGGGCAACAGGCCC |
| | | TTATTCGAGGACATGACCGACAGCGACTGCAGGGACAACGCGCCCAGG |
| | | ACCATCTTCATCATCAGCATGTACAAGGACTCCCAGCCCAGGGGGATG |
| | | GCCGTAACCATCTCCGTAAAGTGCGAGAAGATCAGCACCCTCAGCTGC |
| | | GAAAACAAAATCATCAGCTTCAAGGAGATGAACCCGCCGGACAACATC |
| | | AAAGACACCAAGTCCGACATTATCTTCTTTCAGCGCAGCGTCCCCGGG |
| | | CACGACAACAAGATGCAGTTCGAGAGCAGCTCCTACGAGGGCTACTTC |
| | | CTGGCCTGCGAGAAGGAACGGGACCTCTTCAAGCTGATCCTCAAGAAG |
| | | GAGGATGAGCTCGGGGACCGCTCCATCATGTTTACCGTGCAGAACGAA |
| | | GAT |
| 733 | IgLC_IL18_ | ATGGCGTGGACGGTCTTGCTCCTCGGCCTCCTAAGCCACTGCACGGGC |
| | SN | TCCGTCACGAGCTATTTCGGCAAGCTCGAGAGCAAGTTGAGCGTCATC |
| | | AGGAACCTCAACGACCAAGTCCTCTTTATCGACCAGGGCAACCGGCCC |
| | | CTCTTCGAGGACATGACGTCCAGCGACTGCAGGAACAACGCCCCCAGG |
| | | ACCATCTTCATAATCAGCATGTATAAGGACTCCCAGCCCAGGGGGATG |
| | | GCCGTAACCATCTCGGTGAAGTGCGAAAAAATCAGCACCCTCAGCTGT |
| | | GAGAATAAGATCATCTCCTTCAAGGAGATGAACCCGCCGGACAACATA |
| | | AAAGACACCAAAAGCGACATCATCTTCTTCCAGCGGAGCGTGCCGGGC |
| | | CACGACAACAAAATGCAGTTCGAGAGCTCGAGCTATGAGGGCTACTTC |
| | | CTCGCCTGTGAGAAGGAGAGGGACCTCTTCAAGCTGATTCTGAAGAAG |
| | | GAGGACGAACTGGGGGACAGGAGCATCATGTTCACCGTGCAGAATGAG |
| | | GAT |
| 734 | IgLC_IL18_ | ATGGCCTGGACCGTCCTCCTCCTCGGCCTTCTCAGCCACTGCACCGGC |
| | SN | AGCGTCACCTCCTACTTCGGGAAGCTCGAGAGCAAGCTCAGCGTAATA |
| | | CGGAACCTCAACGACCAGGTCCTTTTCATCGATCAGGGTAACCGACCC |
| | | CTCTTCGAGGACATGACCAGCTCGGATTGCAGGAACAACGCCCCCCGG |
| | | ACCATCTTCATCATCAGCATGTACAAGGACAGCCAGCCCAGGGGCATG |
| | | GCCGTTACTATCAGCGTTAAGTGCGAGAAGATCTCCACACTCAGCTGT |
| | | GAGAACAAGATCATCTCCTTTAAGGAGATGAACCCCCCGGACAACATC |
| | | AAGGACACCAAGTCCGACATCATCTTCTTCCAGAGGAGCGTGCCGGGC |
| | | CATGACAATAAGATGCAATTCGAGTCCAGCAGCTACGAGGGCTACTTC |
| | | CTCGCCTGCGAGAAGGAGAGGGACCTGTTCAAGCTGATCCTGAAGAAG |
| | | GAGGATGAGCTCGGCGACCGAAGCATAATGTTTACCGTGCAGAACGAG |
| | | GAC |
| 735 | IgLC_IL18_ | ATGGCCTGGACCGTGCTCCTCTTAGGCCTTCTCAGCCACTGCACGGGC |
| | SN | AGCGTCACCTCCTACTTCGGCAAGCTTGAGAGCAAGCTTAGCGTAATC |
| | | AGGAACTTGAACGACCAGGTCCTCTTCATCGATCAGGGCAATAGGCCC |
| | | CTCTTCGAGGATATGACAAGCAGCGACTGCCGCAACAACGCCCCGAGG |
| | | ACCATCTTCATCATCAGCATGTACAAGGATAGCCAGCCCCGCGGGATG |
| | | GCCGTCACCATCTCCGTAAAGTGCGAGAAGATAAGCACCCTTAGCTGT |
| | | GAGAACAAGATCATCTCATTCAAGGAGATGAACCCGCCCGACAACATC |
| | | AAAGACACCAAGTCAGATATAATCTTCTTTCAGAGGAGCGTGCCCGGG |
| | | CATGACAACAAGATGCAGTTCGAGAGCTCCTCCTATGAGGGGTACTTC |
| | | CTCGCCTGCGAGAAGGAGCGGGACCTCTTCAAGCTGATCCTGAAGAAG |
| | | GAGGACGAGCTGGGGGACAGGAGCATCATGTTCACCGTTCAGAACGAA |
| | | GAC |
| 736 | IgLC_IL18_ | ATGGCCTGGACGGTCCTCCTCCTCGGACTCCTCAGCCACTGCACCGGC |
| | SN | AGCGTCACCTCGTATTTCGGCAAGCTCGAGAGCAAGCTCTCCGTTATC |
| | | CGGAACCTAAACGACCAGGTCCTCTTCATCGACCAGGGCAACAGGCCC |
| | | CTATTCGAGGATATGACCAGCAGCGACTGCCGAAACAACGCCCCCCGG |
| | | ACCATCTTCATCATCAGCATGTACAAGGACAGCCAGCCCAGGGGCATG |
| | | GCAGTCACCATCAGCGTCAAGTGCGAGAAGATAAGCACCCTTAGCTGC |
| | | GAAAACAAGATCATCTCCTTCAAGGAGATGAACCCGCCCGACAACATC |
| | | AAGGACACCAAGAGCGATATCATCTTCTTCCAGCGCTCCGTGCCTGGA |
| | | CACGACAACAAGATGCAGTTCGAGAGCAGCTCCTACGAGGGCTATTTC |
| | | CTGGCCTGCGAGAAGGAGCGGGACCTGTTCAAGCTGATCCTGAAGAAG |
| | | GAGGATGAGCTGGGGGACAGGTCCATAATGTTCACCGTCCAGAACGAG |
| | | GAT |
| 737 | IgLC_IL18_ | ATGGCGTGGACCGTCCTCCTCCTTGGCCTCCTAAGCCACTGCACCGGC |
| | SN | AGCGTCACAAGTTACTTCGGCAAGCTCGAGAGCAAGCTCTCGGTCATC |
| | | CGGAACCTCAACGACCAGGTCCTCTTTATCGACCAGGGGAACCGGCCC |
| | | CTCTTCGAGGATATGACCAGCTCCGACTGCAGGAACAACGCCCCGAGG |
| | | ACCATCTTCATCATCTCCATGTATAAGGATAGCCAGCCCCGGGGCATG |
| | | GCCGTCACCATCTCCGTCAAGTGCGAGAAGATCAGCACGCTCAGCTGT |
| | | GAGAATAAGATCATCTCCTTCAAGGAGATGAACCCACCCGACAACATC |
| | | AAGGACACCAAGAGCGACATCATCTTCTTCCAAAGGAGCGTCCCCGGC |
| | | CACGACAACAAGATGCAGTTCGAGAGCTCATCCTATGAGGGCTATTTC |
| | | CTGGCCTGTGAGAAGGAGAGGGACCTGTTCAAGCTGATACTCAAGAAA |
| | | GAGGATGAGCTGGGGGACAGGTCCATCATGTTCACCGTGCAGAATGAG |
| | | GAC |
| 738 | IgLC_IL18_ | ATGGCCTGGACGGTCCTCCTCCTAGGGCTCCTCAGCCACTGCACGGGG |
| | SN | AGCGTCACCAGCTACTTCGGGAAGCTAGAGTCCAAGTTGAGCGTCATC |
| | | AGGAACCTCAACGATCAGGTCCTCTTCATCGACCAGGGGAATAGGCCC |
| | | CTCTTCGAGGACATGACCAGCAGCGACTGCCGGAACAACGCCCCCCGC |
| | | ACCATCTTCATCATCTCCATGTACAAGGACTCCCAGCCCAGGGGGATG |
| | | GCGGTAACCATCTCCGTCAAGTGCGAGAAAATAAGCACCCTAAGCTGC |
| | | GAGAACAAAATCATCAGCTTCAAGGAGATGAACCCGCCCGACAACATC |
| | | AAGGACACCAAGAGCGACATCATCTTCTTCCAGCGTTCCGTGCCGGGA |
| | | CACGACAATAAGATGCAGTTCGAGAGCTCCAGCTACGAGGGCTATTTC |
| | | CTGGCATGCGAGAAGGAGAGGGACCTCTTCAAGCTGATCCTGAAGAAG |
| | | GAGGACGAGCTGGGCGACAGGTCCATCATGTTCACCGTGCAAAACGAG |
| | | GAC |
| 739 | IgLC_IL18_ | ATGGCCTGGACCGTCCTACTCTTGGGCCTACTCAGCCACTGCACCGGC |
| | SN | AGCGTCACGAGCTACTTCGGCAAGCTCGAGAGTAAACTCAGCGTCATA |
| | | AGGAACCTCAACGACCAGGTCCTCTTCATCGACCAGGGCAATAGGCCC |
| | | CTCTTCGAGGACATGACCAGCTCCGACTGTCGGAATAACGCCCCCCGG |
| | | ACCATCTTCATCATCAGCATGTACAAGGACTCGCAGCCCCGCGGCATG |
| | | GCCGTCACGATAAGCGTCAAGTGCGAGAAAATCTCGACACTCTCCTGC |
| | | GAAAACAAGATCATCTCCTTCAAGGAGATGAATCCCCCCGACAACATC |
| | | AAGGACACCAAGAGCGACATCATCTTCTTCCAGCGCAGCGTGCCCGGC |
| | | CACGACAATAAGATGCAGTTCGAGAGCAGCTCCTATGAGGGGTACTTC |
| | | CTCGCCTGCGAGAAGGAGAGGGATCTGTTCAAACTGATCTTGAAGAAG |
| | | GAGGATGAGCTGGGGGACAGGTCCATCATGTTCACCGTGCAGAACGAG |
| | | GAC |
| 740 | IgLC_IL18_ | ATGGCCTGGACCGTCCTATTGCTAGGCCTCCTCAGCCACTGCACCGGA |
| | SN | AGCGTAACCTCCTACTTCGGCAAGCTCGAGAGCAAACTCAGCGTGATC |
| | | AGGAATCTAAACGATCAGGTCCTCTTCATCGACCAGGGCAACCGCCCC |
| | | TTATTCGAGGACATGACGAGCAGCGACTGCCGAAACAACGCGCCCCGC |
| | | ACCATCTTTATCATCAGCATGTACAAGGATTCCCAGCCCAGGGGCATG |
| | | GCCGTCACGATATCCGTCAAGTGCGAAAAGATCAGCACCCTTAGCTGT |
| | | GAGAACAAGATCATCTCCTTCAAGGAGATGAATCCCCCCGACAACATC |
| | | AAGGACACCAAGTCCGACATCATTTTCTTCCAGAGGAGCGTCCCGGGG |
| | | CACGATAACAAGATGCAGTTCGAGTCCAGCTCCTACGAGGGCTACTTC |
| | | CTGGCCTGCGAGAAGGAGAGGGACCTGTTCAAGCTCATCCTCAAGAAG |
| | | GAGGATGAGCTGGGGGACCGGTCCATCATGTTCACCGTGCAGAACGAG |
| | | GAC |
| 741 | IgLC_IL18_ | ATGGCCTGGACCGTCCTCCTCCTCGGCCTACTCTCCCACTGTACCGGG |
| | SN | TCCGTCACCTCATACTTCGGCAAGCTCGAGAGCAAGCTCAGCGTCATC |
| | | AGGAACCTTAACGACCAGGTTCTTTTTATCGACCAGGGGAACAGGCCC |
| | | CTATTCGAGGACATGACCTCCAGCGACTGCAGGAACAACGCCCCCAGG |
| | | ACCATCTTCATCATCAGCATGTACAAGGACTCCCAGCCCCGGGGCATG |
| | | GCCGTTACCATCTCCGTCAAGTGCGAAAAAATTAGCACCCTCAGCTGT |
| | | GAGAACAAGATCATCAGCTTCAAAGAGATGAACCCGCCCGACAACATC |
| | | AAGGACACCAAGAGCGATATCATCTTCTTTCAGCGGTCCGTCCCCGGC |
| | | CACGACAACAAGATGCAGTTCGAGAGCAGCAGCTACGAGGGCTACTTC |
| | | CTGGCCTGCGAAAAGGAGAGGGACCTGTTCAAGCTGATCCTGAAGAAG |
| | | GAGGACGAGCTGGGGGACAGGTCCATCATGTTCACCGTCCAGAACGAG |
| | | GAC |
| 742 | IgLC_IL18_ | ATGGCCTGGACCGTCCTCCTCCTCGGCTTGCTCAGCCACTGCACCGGG |
| | SN | AGCGTTACCAGCTACTTCGGCAAGCTCGAGAGCAAGCTGTCAGTGATC |
| | | AGGAATCTCAACGACCAAGTCCTCTTCATCGATCAGGGGAACCGGCCC |
| | | CTCTTCGAGGACATGACGTCCTCCGACTGCCGGAATAACGCCCCTCGC |
| | | ACCATCTTCATCATCAGCATGTACAAGGATAGCCAGCCCAGGGGCATG |
| | | GCCGTCACCATCAGCGTAAAGTGTGAGAAGATCTCGACGCTCAGCTGC |
| | | GAAAATAAGATCATCAGCTTCAAGGAGATGAACCCGCCCGACAACATC |
| | | AAGGACACAAAGAGCGACATCATTTTCTTTCAGCGGAGCGTGCCCGGC |
| | | CACGACAATAAAATGCAGTTCGAGAGCAGCTCGTATGAAGGCTACTTC |
| | | CTCGCGTGCGAGAAGGAGCGGGATCTGTTCAAGCTGATCCTGAAGAAG |
| | | GAGGACGAGCTGGGGGACCGGAGCATCATGTTCACCGTGCAGAACGAA |
| | | GAC |
| 743 | IgLC_IL18_ | ATGGCCTGGACCGTCTTGCTCCTCGGGCTCCTGAGCCACTGCACCGGC |
| | SN | TCCGTCACCTCCTACTTCGGAAAGCTCGAGAGCAAGTTGAGCGTCATC |
| | | AGGAACCTCAACGACCAGGTCCTTTTTATCGACCAGGGGAACAGGCCC |
| | | CTATTCGAGGACATGACCAGCAGCGACTGTCGGAATAACGCACCCAGG |
| | | ACCATCTTCATCATCAGCATGTATAAGGACAGCCAGCCCAGGGGGATG |
| | | GCGGTCACCATCTCCGTAAAGTGCGAGAAGATCAGCACCCTCTCCTGC |
| | | GAGAATAAAATCATCTCGTTCAAGGAGATGAACCCTCCGGACAACATC |
| | | AAGGACACGAAGTCCGACATCATCTTCTTCCAGCGGAGCGTACCCGGC |
| | | CACGACAACAAAATGCAGTTTGAGAGCAGCAGCTACGAGGGGTACTTC |
| | | CTCGCCTGTGAAAAGGAGAGGGACCTGTTTAAGCTGATCCTGAAAAAA |
| | | GAAGACGAGCTCGGAGATCGGAGCATCATGTTTACGGTGCAGAATGAG |
| | | GAT |
| 744 | IgLC_IL18_ | ATGGCCTGGACCGTCCTACTCCTCGGCTTGCTAAGCCACTGTACGGGG |
| | SN | AGCGTCACGAGCTACTTCGGGAAGCTCGAGAGCAAGCTCTCCGTAATC |
| | | AGGAACCTCAACGACCAGGTACTCTTCATCGACCAGGGCAACAGGCCC |
| | | CTCTTCGAGGACATGACCAGCTCCGATTGCCGGAACAACGCCCCAAGG |
| | | ACGATCTTCATAATCAGCATGTACAAAGACAGCCAGCCCAGGGGCATG |
| | | GCCGTCACGATCTCCGTTAAGTGCGAGAAGATCAGCACCCTCAGCTGC |
| | | GAGAATAAGATCATAAGCTTCAAGGAGATGAACCCCCCGGATAACATC |
| | | AAGGACACCAAGAGCGACATCATCTTCTTTCAACGGTCCGTCCCCGGC |
| | | CACGACAACAAGATGCAGTTTGAGTCATCCTCCTACGAGGGTTACTTC |
| | | CTGGCCTGCGAGAAGGAGAGGGACCTGTTCAAGCTCATCCTGAAAAAG |
| | | GAGGATGAGCTGGGCGACAGGAGCATCATGTTCACCGTGCAGAACGAG |
| | | GAT |
| 745 | IgLC_IL18_ | ATGGCCTGGACGGTCCTCCTCCTCGGTCTGCTCAGCCACTGCACCGGC |
| | SN | AGCGTCACCTCCTACTTCGGCAAGTTGGAGAGCAAGCTCTCGGTGATC |
| | | CGGAACCTCAACGACCAGGTCCTCTTCATCGACCAGGGCAACAGGCCC |
| | | CTCTTCGAGGACATGACGTCCTCCGACTGCAGGAACAACGCTCCCAGG |
| | | ACCATCTTCATCATAAGCATGTACAAGGACTCCCAGCCCCGGGGCATG |
| | | GCGGTCACCATCTCCGTCAAGTGTGAGAAGATCAGCACCCTCTCCTGT |
| | | GAGAACAAGATCATCTCCTTCAAGGAGATGAATCCCCCCGACAACATC |
| | | AAGGATACCAAGAGCGACATCATCTTCTTCCAGCGGAGCGTACCCGGG |
| | | CACGACAATAAAATGCAGTTCGAGTCCAGCAGCTATGAGGGCTACTTC |
| | | CTGGCGTGCGAGAAGGAGAGGGACCTGTTCAAACTGATACTGAAGAAG |
| | | GAGGACGAGCTGGGCGACCGGAGCATCATGTTCACAGTGCAGAACGAG |
| | | GAT |
| 746 | IgLC_IL18_ | ATGGCCTGGACCGTCCTCCTCCTCGGCCTCCTCAGCCACTGCACCGGC |
| | SN | AGCGTAACGAGCTACTTCGGTAAGCTCGAGAGCAAGCTCAGCGTCATC |
| | | CGGAACCTCAACGACCAGGTCTTGTTCATCGACCAGGGCAACAGGCCC |
| | | CTCTTCGAGGACATGACCTCGAGCGATTGTAGGAACAACGCCCCCAGG |
| | | ACCATCTTCATCATCAGCATGTACAAAGATAGCCAGCCACGGGGCATG |
| | | GCCGTCACCATCTCGGTTAAGTGCGAGAAAATCTCCACCCTCAGCTGC |
| | | GAGAACAAAATAATCAGCTTCAAGGAGATGAATCCCCCCGATAACATA |
| | | AAGGATACCAAAAGCGACATCATCTTCTTCCAGAGGTCCGTGCCGGGC |
| | | CATGACAACAAGATGCAGTTCGAGTCCTCCAGCTACGAGGGCTACTTT |
| | | CTGGCCTGCGAGAAGGAGAGGGACCTGTTCAAGCTGATCCTGAAGAAG |
| | | GAGGATGAGCTGGGCGACAGGTCCATCATGTTCACCGTGCAGAATGAG |
| | | GAC |
| 747 | IgLC_IL18_ | ATGGCGTGGACAGTGCTCCTCCTCGGCCTCCTCAGCCACTGCACCGGT |
| | SN | AGCGTCACCTCCTACTTCGGGAAGCTTGAGTCCAAGCTCAGCGTAATC |
| | | AGGAACCTCAACGACCAGGTCCTCTTCATCGACCAGGGCAACCGCCCC |
| | | CTCTTCGAGGATATGACCAGCAGCGATTGTCGAAACAACGCCCCCCGG |
| | | ACCATCTTCATCATCAGCATGTACAAAGATAGCCAGCCCAGGGGGATG |
| | | GCCGTCACCATCTCCGTCAAGTGTGAGAAGATCAGCACGCTCTCCTGC |
| | | GAGAACAAGATCATCTCCTTCAAGGAGATGAACCCGCCCGACAACATC |
| | | AAGGACACGAAGTCCGATATCATCTTCTTCCAGCGGAGCGTCCCCGGC |
| | | CATGACAATAAGATGCAGTTCGAGTCCTCCAGTTACGAGGGCTATTTC |
| | | CTGGCCTGCGAAAAGGAGAGGGACCTGTTCAAGCTGATCCTGAAGAAG |
| | | GAAGACGAGCTGGGCGACAGGAGCATCATGTTCACCGTGCAGAACGAG |
| | | GAC |
| 748 | IgLC_IL18_ | ATGGCCTGGACCGTCCTCCTTCTCGGGCTACTCTCCCACTGCACCGGG |
| | SN | AGCGTCACCTCATACTTCGGCAAGCTCGAGAGCAAGCTCTCGGTCATC |
| | | AGGAACCTCAACGACCAGGTCCTCTTCATCGACCAGGGCAATAGGCCC |
| | | CTCTTCGAGGACATGACCAGCTCCGACTGCAGGAACAACGCCCCCCGC |
| | | ACCATCTTTATCATCAGCATGTATAAGGACAGCCAGCCGCGGGGCATG |
| | | GCCGTCACGATCTCCGTCAAGTGCGAGAAAATCAGCACGCTCAGCTGC |
| | | GAGAACAAAATCATCAGCTTTAAAGAGATGAATCCCCCCGACAACATC |
| | | AAAGACACGAAAAGCGACATCATCTTCTTCCAACGTAGCGTGCCCGGC |
| | | CACGACAACAAGATGCAGTTCGAGAGCAGCAGCTATGAGGGGTACTTC |
| | | CTGGCGTGCGAGAAGGAGAGGGACCTGTTCAAGCTGATCCTGAAGAAA |
| | | GAGGACGAGCTGGGCGACCGAAGCATCATGTTTACAGTCCAGAATGAG |
| | | GAT |
| 749 | IgLC_IL18_ | ATGGCCTGGACCGTTCTCCTCCTCGGCCTACTCAGCCACTGCACCGGC |
| | SN | AGCGTCACCTCCTACTTCGGCAAGCTAGAAAGCAAGCTCAGCGTTATC |
| | | AGGAATCTAAACGATCAGGTTCTCTTCATCGATCAAGGGAACCGCCCC |
| | | CTCTTCGAGGATATGACCAGCTCGGACTGTAGGAACAACGCCCCCAGG |
| | | ACCATTTTCATCATCTCCATGTACAAGGATAGCCAGCCCCGGGGGATG |
| | | GCCGTCACCATCAGCGTCAAGTGCGAGAAAATCAGCACGCTCAGCTGC |
| | | GAGAACAAAATCATATCCTTCAAGGAGATGAATCCGCCTGATAACATC |
| | | AAAGACACAAAGAGCGACATCATCTTCTTCCAGAGGAGCGTGCCCGGC |
| | | CACGATAACAAGATGCAGTTCGAGAGCAGCAGCTACGAGGGGTACTTC |
| | | CTGGCTTGCGAGAAGGAGAGGGATCTGTTTAAGCTCATCCTGAAGAAG |
| | | GAGGACGAGCTGGGGGACAGGAGCATCATGTTCACCGTCCAGAACGAG |
| | | GAT |
| 750 | IgLC_IL18_ | ATGGCGTGGACAGTCCTCCTCCTCGGACTTCTTAGCCACTGCACCGGC |
| | SN | TCCGTCACCTCCTACTTCGGGAAACTCGAGAGCAAGCTTTCGGTCATC |
| | | AGGAACCTCAACGACCAGGTCCTCTTCATCGACCAGGGGAACAGGCCC |
| | | CTCTTCGAGGACATGACCAGCTCCGACTGCAGGAATAACGCCCCCAGG |
| | | ACCATCTTCATCATCAGCATGTACAAGGACAGCCAGCCCCGGGGGATG |
| | | GCCGTCACCATCAGCGTCAAGTGCGAGAAGATCAGCACCTTGTCCTGC |
| | | GAGAATAAGATCATCTCCTTTAAGGAGATGAATCCCCCAGACAACATC |
| | | AAGGACACCAAGTCCGATATCATCTTCTTCCAGCGGTCCGTGCCCGGC |
| | | CACGACAACAAGATGCAGTTCGAGAGCTCCAGTTACGAGGGCTATTTC |
| | | CTCGCCTGCGAGAAGGAGAGGGACCTGTTCAAGCTGATACTGAAAAAG |
| | | GAGGACGAGCTGGGCGATCGGAGCATCATGTTCACCGTGCAGAACGAG |
| | | GAC |
| 751 | IgLC_IL18_ | ATGGCCTGGACCGTGCTCCTCCTCGGGCTCCTCAGCCACTGCACCGGC |
| | SN | AGCGTTACAAGCTACTTCGGCAAGCTCGAAAGCAAGCTCTCCGTCATC |
| | | AGGAACCTCAACGACCAGGTCCTCTTCATCGACCAGGGGAACAGGCCC |
| | | CTCTTCGAGGACATGACCAGCAGCGACTGTAGGAATAACGCGCCCAGG |
| | | ACCATCTTTATCATCAGTATGTACAAGGACAGCCAGCCCAGGGGAATG |
| | | GCCGTCACCATCTCCGTCAAGTGCGAGAAAATCAGCACCCTCAGCTGT |
| | | GAGAACAAGATCATCAGCTTCAAGGAGATGAACCCGCCCGATAACATC |
| | | AAGGACACTAAGAGCGACATCATCTTCTTCCAGAGGAGCGTGCCCGGC |
| | | CACGATAACAAGATGCAGTTCGAGTCCAGCTCATACGAGGGGTACTTT |
| | | CTGGCCTGTGAGAAGGAGAGGGACCTGTTCAAGCTCATCCTGAAGAAG |
| | | GAGGATGAGCTCGGCGACCGAAGCATCATGTTCACCGTGCAAAACGAG |
| | | GAC |
| 752 | IgLC_IL18_ | ATGGCCTGGACCGTCCTCCTCCTTGGCCTACTTAGCCACTGCACCGGT |
| | SN | AGCGTCACCAGCTACTTCGGCAAGCTCGAGAGCAAGCTCAGCGTCATC |
| | | AGGAACCTCAACGATCAGGTACTCTTCATCGACCAGGGGAATCGTCCC |
| | | CTCTTCGAGGACATGACCTCATCCGACTGCCGCAACAACGCCCCCCGG |
| | | ACCATCTTCATCATCTCGATGTACAAGGACTCCCAGCCCAGGGGGATG |
| | | GCCGTCACCATCTCCGTCAAGTGCGAGAAGATCAGCACCCTCAGCTGC |
| | | GAAAACAAGATAATCTCCTTCAAGGAGATGAACCCGCCCGACAACATC |
| | | AAGGACACGAAAAGCGACATTATCTTCTTCCAGAGGAGCGTGCCGGGG |
| | | CACGACAACAAGATGCAGTTCGAGTCGTCCAGCTACGAGGGCTATTTC |
| | | CTCGCCTGCGAGAAAGAGAGGGACCTGTTCAAGCTGATCCTGAAGAAG |
| | | GAGGACGAGCTGGGGGATAGGAGCATCATGTTCACCGTCCAGAACGAA |
| | | GAC |
| 753 | IgLC_IL18_ | ATGGCCTGGACGGTCCTCCTCCTCGGGCTCCTTAGCCACTGTACCGGG |
| | SN | TCGGTCACAAGCTACTTCGGCAAGCTCGAGAGCAAGCTTAGCGTAATC |
| | | AGAAACCTTAACGATCAGGTCCTTTTTATAGACCAGGGCAACCGTCCG |
| | | CTGTTCGAGGATATGACCAGCAGCGACTGCAGGAATAACGCCCCCCGG |
| | | ACGATATTCATCATCAGCATGTATAAGGATAGCCAGCCGCGAGGGATG |
| | | GCCGTCACCATCAGCGTCAAGTGCGAGAAGATCAGCACGCTCTCCTGC |
| | | GAGAATAAGATCATCTCCTTCAAGGAGATGAACCCCCCGGACAACATC |
| | | AAGGATACCAAGAGCGACATCATCTTCTTCCAGAGGAGCGTGCCAGGC |
| | | CACGACAATAAGATGCAGTTTGAGAGCAGCTCCTACGAGGGGTATTTT |
| | | CTGGCCTGCGAGAAGGAGAGGGACCTGTTTAAGCTGATCCTGAAGAAG |
| | | GAGGACGAGCTGGGCGACCGAAGCATCATGTTCACCGTGCAAAACGAG |
| | | GAT |
| 754 | IgLC_IL18_ | ATGGCCTGGACGGTCCTCCTCCTCGGTTTGCTCAGCCACTGCACCGGC |
| | SN | TCCGTCACGAGCTATTTCGGTAAGCTCGAGAGCAAGCTCTCCGTCATC |
| | | AGGAATCTCAACGACCAGGTCCTCTTTATCGACCAGGGGAACAGGCCC |
| | | CTCTTCGAAGACATGACCAGCTCCGACTGCAGGAACAACGCCCCCAGG |
| | | ACCATCTTCATCATCAGCATGTACAAGGACTCACAGCCCCGGGGCATG |
| | | GCGGTTACCATCAGCGTCAAGTGCGAGAAGATAAGCACGCTCAGCTGC |
| | | GAGAACAAAATCATCAGCTTCAAGGAGATGAACCCGCCCGATAACATC |
| | | AAAGACACCAAGAGCGATATCATCTTCTTCCAGCGCAGCGTGCCGGGG |
| | | CACGATAATAAGATGCAGTTCGAGTCCTCCAGCTATGAGGGCTATTTC |
| | | CTGGCCTGCGAGAAGGAGCGGGACCTGTTCAAGCTCATACTCAAGAAG |
| | | GAGGACGAGCTGGGTGACAGGTCGATCATGTTCACCGTGCAGAACGAA |
| | | GAT |
| 755 | IgLC_IL18_ | ATGGCGTGGACGGTCCTCCTTCTTGGGCTCCTAAGCCACTGCACCGGC |
| | SN | AGCGTAACCTCCTACTTCGGGAAGCTCGAGTCAAAGCTCAGCGTCATC |
| | | AGGAACCTCAACGACCAGGTCTTGTTCATCGACCAGGGAAACCGGCCC |
| | | CTATTCGAAGACATGACGAGCTCAGACTGCCGTAACAACGCCCCCAGG |
| | | ACCATCTTCATCATCAGCATGTACAAGGATTCCCAGCCCAGGGGAATG |
| | | GCCGTCACCATCAGCGTAAAGTGCGAGAAGATAAGCACCCTCAGCTGC |
| | | GAGAATAAAATCATCTCCTTCAAGGAGATGAACCCACCCGACAACATC |
| | | AAGGACACCAAGTCCGACATCATCTTCTTCCAGCGATCGGTGCCGGGG |
| | | CACGACAACAAGATGCAGTTCGAGAGCTCCAGCTACGAAGGCTACTTC |
| | | CTCGCCTGCGAGAAGGAGAGGGACCTCTTCAAGCTCATCCTGAAGAAG |
| | | GAGGACGAACTGGGCGATAGGAGCATTATGTTCACTGTGCAGAATGAG |
| | | GAC |
| 756 | IgLC_IL18_ | ATGGCCTGGACCGTCCTTCTCCTAGGGTTGCTAAGCCACTGCACCGGG |
| | SN | AGCGTCACCAGCTACTTCGGGAAGTTGGAGAGCAAGCTCAGCGTCATC |
| | | CGCAACTTGAACGACCAGGTCCTATTCATCGACCAGGGCAATAGGCCC |
| | | CTATTCGAGGATATGACCAGCTCCGACTGCCGGAACAACGCCCCCAGG |
| | | ACCATCTTCATCATCTCCATGTACAAGGATAGCCAGCCCAGGGGCATG |
| | | GCCGTAACGATCTCCGTAAAGTGCGAGAAGATCAGCACGCTCTCGTGT |
| | | GAGAATAAGATCATCTCTTTCAAAGAGATGAACCCGCCCGACAACATC |
| | | AAGGATACCAAGTCAGACATCATCTTCTTCCAGAGGTCCGTCCCCGGG |
| | | CACGACAACAAGATGCAGTTCGAGAGCTCCAGCTATGAGGGCTACTTC |
| | | CTGGCGTGCGAGAAGGAGAGGGACCTGTTCAAGCTGATCCTCAAAAAG |
| | | GAGGACGAGCTCGGGGACAGGAGCATCATGTTCACAGTGCAGAACGAG |
| | | GAC |
| 757 | IgLC_IL18_ | ATGGCCTGGACGGTCCTCCTACTCGGCCTCCTCAGCCACTGCACCGGG |
| | SN | TCCGTCACTAGCTACTTCGGCAAACTCGAATCCAAGCTAAGCGTCATC |
| | | CGGAACCTCAACGACCAGGTCTTGTTCATCGATCAGGGCAACCGCCCC |
| | | TTATTCGAAGACATGACCAGCTCCGACTGCCGGAACAACGCGCCCAGG |
| | | ACCATCTTCATAATTTCGATGTACAAGGACAGCCAGCCCAGGGGCATG |
| | | GCGGTCACCATCAGCGTCAAGTGCGAGAAGATATCCACCCTCTCGTGC |
| | | GAGAACAAGATCATCTCGTTCAAGGAGATGAACCCGCCCGACAACATC |
| | | AAAGACACCAAAAGCGACATCATCTTCTTTCAGCGCTCGGTGCCCGGG |
| | | CATGACAACAAAATGCAGTTCGAGAGCAGCAGCTACGAGGGGTACTTC |
| | | CTGGCCTGTGAAAAGGAGAGGGACCTGTTCAAGCTCATCCTCAAGAAA |
| | | GAGGACGAACTGGGCGACAGGAGCATCATGTTTACCGTGCAGAATGAG |
| | | GAC |
| 758 | IL1ra_IL18 | ATGGAAATTTGCAGGGGCCTTCGCAGCCACCTAATCACCCTCCTCCTC |
| | | TTCCTCTTCCATAGCGAGACTATCTGCTACTTCGGGAAGCTAGAGAGC |
| | | AAGCTCAGCGTCATCAGGAACCTCAACGACCAGGTCCTATTCATAGAC |
| | | CAGGGGAACCGGCCACTCTTCGAGGATATGACCGACAGCGATTGCCGG |
| | | GACAACGCCCCCCGAACCATCTTCATCATCAGCATGTACAAGGACTCC |
| | | CAGCCCAGGGGCATGGCCGTCACAATAAGCGTCAAGTGCGAGAAGATC |
| | | AGCACGCTCAGCTGCGAGAATAAGATCATCTCCTTCAAGGAGATGAAT |
| | | CCCCCGGACAACATCAAGGACACCAAAAGCGACATCATATTCTTCCAG |
| | | AGGAGCGTGCCTGGGCACGACAACAAGATGCAGTTCGAAAGCTCCAGC |
| | | TACGAGGGCTACTTCCTCGCCTGCGAGAAGGAGCGGGACCTGTTCAAG |
| | | CTCATCCTCAAGAAGGAGGATGAGCTGGGGGACAGGAGCATCATGTTC |
| | | ACCGTCCAGAATGAAGAC |
| 759 | IL1ra_IL18 | ATGGAGATCTGCAGGGGGCTAAGGTCCCACTTAATAACCCTCCTCCTA |
| | | TTCCTTTTTCACTCCGAGACGATTTGCTACTTCGGCAAGCTCGAGTCG |
| | | AAGCTCTCCGTCATCCGGAACCTCAACGACCAGGTCTTGTTCATCGAC |
| | | CAGGGGAACAGGCCCTTGTTCGAGGACATGACCGATTCCGACTGCCGG |
| | | GACAACGCCCCCCGCACCATCTTCATCATCTCCATGTACAAGGACAGC |
| | | CAGCCCAGGGGCATGGCCGTTACCATCTCGGTCAAGTGCGAGAAGATC |
| | | AGCACCCTCTCCTGCGAGAACAAGATCATCTCCTTCAAGGAGATGAAT |
| | | CCCCCGGACAACATCAAGGACACCAAGAGCGACATCATCTTCTTCCAG |
| | | AGGTCCGTGCCCGGCCACGACAACAAGATGCAGTTCGAGAGCAGCAGC |
| | | TACGAGGGCTACTTCCTGGCCTGCGAGAAGGAACGGGACCTGTTCAAG |
| | | CTGATCCTGAAAAAGGAGGACGAGCTGGGGGACCGCAGCATCATGTTC |
| | | ACCGTGCAAAACGAGGAC |
| 760 | IL1ra_IL18 | ATGGAGATCTGCAGGGGCTTACGTAGCCACCTCATCACCCTCCTCCTC |
| | | TTCCTCTTCCACTCCGAGACGATCTGCTACTTCGGAAAGCTCGAGAGC |
| | | AAGCTCTCCGTCATCAGAAACCTTAACGACCAGGTCCTTTTCATCGAC |
| | | CAGGGGAACCGGCCCCTTTTCGAGGACATGACCGACTCGGACTGCAGG |
| | | GATAACGCCCCCAGGACCATCTTCATCATCAGCATGTACAAGGACAGC |
| | | CAGCCCAGGGGCATGGCCGTCACCATCAGCGTCAAGTGCGAGAAGATC |
| | | TCCACCCTAAGCTGCGAGAACAAGATCATCAGCTTCAAGGAGATGAAC |
| | | CCGCCGGACAACATCAAAGACACCAAGTCCGACATCATCTTCTTCCAG |
| | | AGAAGCGTGCCCGGCCATGATAACAAAATGCAATTCGAAAGCTCGAGC |
| | | TACGAGGGGTATTTCCTGGCCTGTGAGAAGGAGAGGGATCTGTTCAAG |
| | | CTGATACTGAAGAAGGAGGACGAGCTGGGGGATCGGAGCATCATGTTC |
| | | ACCGTGCAGAATGAGGAC |
| 761 | IL1ra_IL18 | ATGGAGATCTGTAGGGGGCTCAGGAGCCACCTTATCACCCTCTTGCTG |
| | | TTCCTCTTCCACAGCGAGACGATCTGCTACTTCGGGAAACTCGAAAGC |
| | | AAGCTTAGCGTCATCAGGAACCTCAACGATCAGGTCCTCTTCATCGAC |
| | | CAGGGCAACAGGCCCTTGTTCGAGGACATGACCGACAGCGATTGCCGG |
| | | GACAACGCCCCAAGGACAATCTTCATCATTAGCATGTACAAGGACTCG |
| | | CAGCCGCGGGGCATGGCGGTCACAATCAGCGTCAAGTGCGAGAAGATC |
| | | AGCACCCTCAGCTGCGAGAATAAGATCATCTCCTTCAAGGAGATGAAC |
| | | CCGCCCGACAATATCAAGGACACCAAGAGCGATATCATATTCTTCCAG |
| | | CGGAGCGTCCCCGGGCACGACAACAAGATGCAGTTTGAGTCCAGCTCC |
| | | TATGAGGGGTACTTCCTCGCCTGTGAGAAGGAGAGGGACCTGTTCAAG |
| | | CTCATCCTGAAGAAGGAGGACGAGCTGGGCGACAGGAGCATCATGTTT |
| | | ACCGTGCAGAACGAGGAC |
| 762 | IL1ra_IL18 | ATGGAGATCTGTCGGGGGCTCAGGAGCCATCTCATCACCCTCCTCCTC |
| | | TTCCTCTTCCACTCCGAGACGATTTGCTACTTCGGCAAGCTCGAGAGC |
| | | AAGCTCAGCGTCATCAGGAACCTCAACGATCAGGTCCTTTTCATCGAC |
| | | CAGGGGAACAGGCCGCTGTTCGAGGACATGACCGATAGCGATTGTCGG |
| | | GACAACGCCCCCAGGACCATTTTCATAATCTCCATGTACAAGGACAGC |
| | | CAGCCCAGGGGCATGGCCGTCACCATCTCCGTCAAGTGTGAGAAGATC |
| | | TCCACCTTGAGCTGTGAGAACAAAATCATCTCCTTCAAAGAGATGAAC |
| | | CCTCCCGACAACATCAAGGATACCAAGAGCGACATCATCTTCTTCCAG |
| | | AGGAGCGTGCCTGGTCACGACAACAAGATGCAGTTTGAGTCCAGCTCC |
| | | TACGAGGGGTACTTCCTGGCCTGCGAGAAGGAGAGGGACCTGTTCAAG |
| | | CTCATCCTGAAAAAGGAAGACGAGCTGGGGGACAGGAGCATCATGTTC |
| | | ACCGTCCAGAACGAGGAC |
| 763 | IL1ra_IL18 | ATGGAGATCTGCAGGGGCCTCCGGAGCCACCTCATCACCCTCCTCCTC |
| | | TTCTTGTTCCACAGCGAAACGATCTGCTACTTCGGTAAGCTCGAGAGC |
| | | AAGCTTTCGGTGATCCGGAATCTCAACGATCAGGTCCTATTCATCGAT |
| | | CAGGGAAACAGGCCACTTTTCGAAGACATGACCGACTCCGACTGCAGG |
| | | GACAACGCCCCCAGGACCATCTTCATCATCTCCATGTATAAGGACTCG |
| | | CAGCCCAGGGGGATGGCCGTGACCATCTCGGTCAAGTGCGAGAAGATC |
| | | AGCACCCTCAGCTGTGAGAACAAGATCATCTCCTTTAAGGAGATGAAT |
| | | CCCCCCGACAACATCAAGGACACAAAGAGCGACATCATCTTCTTCCAA |
| | | AGGAGCGTGCCCGGTCACGATAATAAGATGCAGTTTGAGTCCAGCAGC |
| | | TATGAGGGCTACTTCCTGGCCTGCGAGAAGGAGAGGGACCTGTTTAAG |
| | | CTGATCCTCAAAAAGGAGGACGAGCTGGGCGACAGGTCCATCATGTTC |
| | | ACCGTGCAGAACGAGGAC |
| 764 | IL1ra_IL18 | ATGGAGATCTGCCGGGGCCTCAGGTCCCACCTCATCACCCTCTTACTC |
| | | TTCCTCTTCCACTCCGAGACAATCTGCTACTTCGGCAAACTCGAGAGC |
| | | AAGCTCTCCGTCATCAGGAACTTGAACGACCAAGTACTTTTCATCGAC |
| | | CAGGGGAACAGGCCCCTTTTCGAGGATATGACCGACAGCGACTGCCGG |
| | | GACAACGCCCCCCGCACCATCTTTATCATCAGCATGTACAAGGACAGC |
| | | CAGCCCAGGGGCATGGCCGTCACGATCAGCGTCAAGTGCGAGAAAATC |
| | | AGCACCCTCAGCTGCGAGAATAAGATCATCTCCTTCAAGGAGATGAAC |
| | | CCCCCGGATAATATCAAGGATACCAAGAGCGACATTATCTTCTTCCAG |
| | | CGGAGCGTCCCCGGACATGACAACAAAATGCAGTTCGAGTCCAGCTCG |
| | | TACGAGGGCTACTTCCTCGCGTGCGAGAAGGAGAGGGACCTCTTCAAG |
| | | CTGATCCTGAAGAAGGAGGACGAGCTGGGAGATAGGAGCATCATGTTC |
| | | ACAGTGCAGAACGAAGAC |
| 765 | IL1ra_IL18 | ATGGAAATCTGCAGGGGCCTCAGGTCCCACCTCATCACGCTCCTTCTC |
| | | TTCCTTTTTCATTCCGAAACCATCTGTTACTTCGGAAAGCTCGAGAGC |
| | | AAGCTTAGCGTCATCAGGAACCTGAACGACCAGGTCCTATTCATAGAC |
| | | CAGGGGAATAGGCCCCTCTTCGAGGACATGACCGACAGCGACTGCAGG |
| | | GACAACGCGCCCCGGACCATCTTTATCATCTCAATGTATAAGGACAGC |
| | | CAGCCCCGCGGCATGGCGGTCACCATCTCCGTCAAGTGCGAGAAGATT |
| | | AGCACCCTCTCCTGTGAGAACAAGATCATCTCCTTCAAGGAGATGAAC |
| | | CCGCCCGATAATATTAAGGACACCAAGTCTGACATTATCTTCTTCCAG |
| | | AGGTCCGTCCCCGGACATGATAATAAGATGCAGTTCGAGAGCAGCAGC |
| | | TACGAGGGCTACTTCCTGGCCTGCGAGAAGGAGCGGGACCTGTTCAAA |
| | | CTGATCCTCAAAAAGGAGGATGAACTGGGCGATAGGAGCATCATGTTC |
| | | ACCGTCCAAAACGAGGAT |
| 766 | IL1ra_IL18 | ATGGAAATCTGCAGAGGGCTCAGGAGCCACCTAATCACCCTTCTTCTC |
| | | TTCCTCTTCCACTCCGAGACTATCTGCTACTTCGGGAAACTCGAGTCC |
| | | AAGCTCAGCGTCATCAGGAACCTGAACGACCAGGTCCTATTCATCGAC |
| | | CAGGGGAACAGGCCCCTCTTCGAGGACATGACCGACAGCGACTGCAGG |
| | | GACAACGCCCCCAGGACTATCTTCATCATCAGCATGTACAAGGATAGC |
| | | CAGCCCAGGGGCATGGCCGTCACCATCAGCGTCAAGTGCGAGAAGATC |
| | | TCCACCCTAAGCTGCGAGAATAAGATTATCTCCTTCAAGGAGATGAAC |
| | | CCACCCGACAACATCAAAGACACCAAGAGCGACATCATCTTCTTCCAG |
| | | CGGAGCGTCCCCGGCCACGACAACAAGATGCAATTCGAAAGCTCGAGC |
| | | TACGAGGGCTACTTCCTGGCCTGCGAGAAGGAGCGGGACTTGTTCAAG |
| | | CTGATCCTGAAGAAGGAGGACGAGCTGGGCGACAGGTCCATAATGTTT |
| | | ACTGTCCAGAACGAGGAC |
| 767 | IL1ra_IL18 | ATGGAGATCTGCAGGGGGTTGAGGAGCCACCTCATCACCCTCCTCCTC |
| | | TTCTTATTCCACTCAGAAACCATCTGCTACTTCGGCAAGCTCGAGTCC |
| | | AAACTCAGCGTCATCAGGAACCTCAACGACCAGGTTCTCTTCATCGAC |
| | | CAGGGCAACCGGCCCTTGTTCGAGGACATGACAGACAGCGACTGCCGG |
| | | GACAACGCCCCCCGCACCATATTCATCATCAGCATGTATAAAGACAGC |
| | | CAGCCCAGGGGCATGGCCGTGACGATCAGCGTCAAGTGCGAGAAGATC |
| | | AGCACGCTCAGCTGCGAGAATAAGATCATCTCCTTCAAGGAGATGAAC |
| | | CCGCCCGACAACATCAAGGACACCAAAAGCGATATAATCTTCTTCCAA |
| | | AGGTCCGTCCCCGGGCATGATAACAAGATGCAGTTCGAGAGCAGCAGC |
| | | TACGAGGGCTATTTCCTGGCCTGCGAAAAGGAGAGGGACCTGTTCAAG |
| | | CTGATCCTGAAGAAGGAGGATGAACTGGGCGACAGGTCCATCATGTTC |
| | | ACCGTGCAGAACGAGGAC |
| 768 | IL1ra_IL18 | ATGGAGATCTGTAGGGGCCTCCGGAGCCACCTCATCACCCTCCTCCTC |
| | | TTCCTCTTCCACAGCGAGACGATCTGCTACTTCGGCAAGCTCGAGTCG |
| | | AAGCTCAGCGTCATCCGGAATCTAAACGACCAGGTCCTCTTCATCGAC |
| | | CAGGGAAATCGCCCCCTCTTCGAGGACATGACCGATTCCGATTGCAGG |
| | | GACAACGCCCCCCGCACCATCTTCATCATCTCGATGTACAAGGACAGC |
| | | CAACCCCGGGGCATGGCCGTCACCATCAGCGTCAAGTGCGAGAAGATC |
| | | TCCACCCTAAGCTGCGAGAATAAGATCATCAGCTTCAAGGAAATGAAT |
| | | CCCCCCGACAACATCAAGGACACCAAGAGCGACATCATCTTCTTCCAG |
| | | AGGAGCGTGCCCGGACACGACAACAAGATGCAGTTCGAGAGCTCGAGC |
| | | TATGAGGGATACTTCCTGGCCTGCGAGAAGGAGCGGGATCTGTTTAAG |
| | | CTGATTCTGAAGAAGGAGGACGAGCTGGGGGACAGGTCCATCATGTTC |
| | | ACGGTCCAGAATGAGGAC |
| 769 | IL1ra_IL18 | ATGGAAATCTGTAGGGGGCTCCGGTCCCACCTCATCACCCTCCTCTTG |
| | | TTCCTCTTCCACAGCGAAACCATCTGTTACTTCGGCAAGCTCGAGAGC |
| | | AAGCTCAGCGTCATCAGGAACCTTAACGATCAGGTCCTCTTCATCGAC |
| | | CAGGGCAACAGGCCCCTGTTCGAGGACATGACCGACAGCGACTGCCGG |
| | | GACAACGCCCCGAGGACCATCTTTATCATATCCATGTATAAAGATTCC |
| | | CAGCCCAGGGGGATGGCCGTCACCATCTCCGTCAAGTGCGAGAAAATC |
| | | TCCACCCTAAGCTGTGAAAACAAGATCATCAGCTTTAAGGAGATGAAC |
| | | CCCCCGGACAATATCAAGGACACCAAATCCGACATCATCTTTTTCCAG |
| | | AGGTCGGTGCCCGGCCACGATAACAAGATGCAGTTCGAGAGCAGCAGC |
| | | TACGAGGGCTACTTCCTGGCCTGCGAGAAGGAGAGGGACCTGTTCAAG |
| | | CTGATCCTGAAGAAGGAGGACGAACTGGGCGACCGGAGCATCATGTTC |
| | | ACCGTGCAGAATGAGGAC |
| 770 | IL1ra_IL18 | ATGGAAATCTGCAGGGGACTCCGCAGCCACCTCATCACCCTCTTGCTG |
| | | TTCCTTTTTCATAGCGAGACGATCTGCTACTTCGGCAAGCTCGAGAGC |
| | | AAGCTCTCGGTCATAAGGAACCTCAACGACCAGGTCCTCTTCATAGAC |
| | | CAGGGGAACCGGCCCCTCTTCGAAGACATGACCGACAGCGACTGCCGG |
| | | GACAACGCTCCCCGCACCATCTTCATCATCAGCATGTATAAGGACTCC |
| | | CAACCCAGGGGCATGGCCGTTACCATCTCCGTCAAGTGCGAGAAGATC |
| | | TCCACGCTCAGCTGCGAGAACAAGATCATCTCCTTCAAGGAAATGAAC |
| | | CCACCCGACAACATCAAGGACACCAAATCGGATATAATCTTCTTCCAG |
| | | AGGAGCGTACCCGGCCATGACAACAAGATGCAGTTTGAGAGCAGCAGC |
| | | TACGAGGGCTACTTTCTGGCCTGCGAGAAGGAGCGGGATCTGTTCAAG |
| | | CTCATCCTGAAAAAAGAGGATGAGCTGGGCGACAGGAGCATCATGTTC |
| | | ACCGTGCAGAACGAGGAC |
| 771 | IL1ra_IL18 | ATGGAGATCTGCCGGGGCCTACGCAGCCACCTAATCACCCTCCTTCTC |
| | | TTCCTCTTCCACAGCGAGACGATCTGCTACTTCGGAAAACTAGAGAGC |
| | | AAGCTCTCCGTTATCAGGAACCTAAACGATCAGGTCCTCTTCATCGAT |
| | | CAGGGGAACCGTCCCCTCTTCGAGGATATGACCGACTCCGACTGCAGG |
| | | GATAACGCCCCGCGGACCATATTCATCATCTCCATGTACAAGGATAGC |
| | | CAGCCAAGGGGCATGGCCGTCACGATCAGCGTAAAGTGCGAGAAAATC |
| | | TCCACACTCTCTTGCGAGAACAAGATCATCAGCTTCAAGGAGATGAAC |
| | | CCCCCGGACAATATCAAGGACACCAAGAGCGACATCATCTTCTTTCAG |
| | | AGGTCCGTCCCGGGGCATGACAACAAGATGCAGTTCGAATCCTCCAGC |
| | | TACGAGGGCTACTTCCTCGCCTGCGAGAAGGAGCGGGACCTGTTCAAG |
| | | CTGATCCTGAAGAAGGAGGACGAGCTGGGCGACCGCAGCATCATGTTC |
| | | ACCGTGCAGAACGAGGAC |
| 772 | IL1ra_IL18 | ATGGAGATCTGCAGGGGGTTGAGGAGCCACCTCATCACCCTCCTATTA |
| | | TTCCTCTTCCACAGCGAGACGATCTGCTACTTCGGTAAGCTCGAGAGC |
| | | AAGCTCTCCGTAATCAGGAACCTCAACGACCAGGTACTCTTCATCGAC |
| | | CAGGGCAACCGCCCCCTCTTCGAAGATATGACCGACTCGGACTGTCGA |
| | | GATAACGCCCCCAGGACCATCTTTATCATCTCGATGTATAAGGACAGC |
| | | CAGCCCCGGGGCATGGCCGTCACCATAAGCGTCAAGTGCGAGAAGATC |
| | | AGCACCCTCAGTTGTGAGAATAAGATAATCAGCTTTAAGGAGATGAAC |
| | | CCGCCCGACAACATCAAGGACACTAAGAGCGACATCATCTTTTTTCAG |
| | | CGGTCCGTGCCGGGGCATGACAACAAGATGCAGTTCGAGAGCAGCAGC |
| | | TACGAGGGGTACTTTCTGGCCTGCGAGAAGGAGAGGGACCTGTTCAAG |
| | | CTGATCCTGAAGAAAGAGGACGAGCTGGGCGATCGGTCCATCATGTTC |
| | | ACCGTGCAGAACGAGGAT |
| 773 | IL1ra_IL18 | ATGGAGATCTGTAGGGGCCTCCGGAGCCACCTCATCACCCTCCTCCTC |
| | | TTTCTCTTCCACTCGGAGACGATCTGCTACTTCGGGAAGCTCGAGTCC |
| | | AAGCTCTCCGTCATCAGGAACCTCAACGACCAGGTTCTCTTCATCGAC |
| | | CAGGGCAATCGGCCTCTCTTCGAGGACATGACCGATTCAGACTGTAGG |
| | | GACAACGCCCCGCGCACCATCTTCATCATTAGCATGTACAAGGACAGC |
| | | CAGCCCAGGGGCATGGCCGTAACCATAAGCGTCAAGTGCGAGAAGATC |
| | | AGCACCTTGAGCTGCGAAAACAAAATCATCAGCTTCAAGGAGATGAAT |
| | | CCCCCCGACAATATCAAGGACACCAAGTCCGATATCATCTTCTTCCAG |
| | | AGGAGCGTGCCCGGCCATGACAACAAGATGCAGTTCGAGAGCTCAAGC |
| | | TACGAGGGCTACTTCCTGGCCTGTGAGAAGGAGAGGGACCTGTTCAAG |
| | | CTCATCCTGAAGAAGGAGGATGAGCTGGGCGATAGGAGCATCATGTTC |
| | | ACCGTCCAAAACGAGGAC |
| 774 | IL1ra_IL18 | ATGGAGATCTGCAGGGGACTCAGGTCCCACCTCATCACCCTCCTCCTC |
| | | TTCCTCTTCCACAGCGAGACGATCTGTTACTTCGGTAAGCTTGAGTCC |
| | | AAGCTCAGCGTCATAAGGAACCTCAACGATCAGGTCCTTTTCATAGAC |
| | | CAGGGCAACAGGCCCCTTTTCGAGGACATGACCGACAGCGACTGTCGG |
| | | GACAACGCCCCTAGGACGATCTTCATCATCAGCATGTACAAGGACAGC |
| | | CAGCCCCGCGGCATGGCGGTAACCATCAGCGTAAAGTGCGAGAAGATC |
| | | TCCACCCTCAGCTGTGAGAACAAGATCATCTCCTTCAAGGAAATGAAC |
| | | CCCCCAGACAACATCAAGGATACAAAGAGCGATATCATCTTCTTTCAG |
| | | CGCAGCGTGCCTGGCCATGATAACAAGATGCAGTTCGAGAGCTCAAGC |
| | | TACGAGGGCTACTTCCTGGCCTGCGAGAAGGAGAGGGACCTGTTCAAG |
| | | CTGATCCTGAAGAAAGAGGATGAGCTGGGGGACCGGTCCATCATGTTC |
| | | ACGGTGCAGAATGAGGAC |
| 775 | IL1ra_IL18 | ATGGAGATCTGCAGGGGGTTAAGGAGCCACTTAATCACCTTGTTGCTG |
| | | TTCCTCTTCCACTCCGAGACTATCTGCTATTTCGGCAAGCTTGAGTCG |
| | | AAGCTATCGGTCATCCGCAACCTCAACGATCAGGTCCTCTTCATAGAT |
| | | CAGGGCAACAGGCCCCTTTTCGAGGACATGACCGACAGCGACTGCAGG |
| | | GATAACGCCCCCAGGACGATCTTCATCATCTCGATGTACAAAGACAGC |
| | | CAGCCCAGGGGCATGGCCGTTACCATCAGCGTCAAGTGCGAGAAGATC |
| | | AGCACCCTCAGCTGCGAGAACAAGATCATCTCCTTCAAGGAGATGAAC |
| | | CCGCCCGACAACATCAAGGACACCAAAAGCGATATCATCTTCTTCCAA |
| | | CGGTCCGTCCCCGGCCACGATAACAAGATGCAGTTCGAAAGCAGCAGC |
| | | TACGAGGGCTACTTCCTGGCCTGCGAAAAGGAGAGGGACCTGTTTAAG |
| | | CTGATACTGAAGAAGGAAGACGAGCTGGGCGACCGCTCGATCATGTTC |
| | | ACGGTGCAGAACGAGGAC |
| 776 | IL1ra_IL18 | ATGGAGATCTGCAGGGGCCTCCGCAGCCACCTCATCACCCTCCTCCTC |
| | | TTTCTCTTCCACAGCGAGACGATCTGCTATTTCGGCAAGCTCGAGTCT |
| | | AAACTCAGCGTCATCCGGAATCTCAACGACCAGGTCCTATTCATCGAC |
| | | CAGGGCAACCGACCGCTGTTCGAAGACATGACAGACAGCGACTGCAGG |
| | | GATAACGCCCCCCGCACCATCTTCATAATCAGCATGTACAAGGACTCC |
| | | CAGCCCAGGGGCATGGCCGTCACGATCAGCGTAAAGTGCGAGAAGATC |
| | | TCCACCCTCAGCTGCGAGAACAAGATCATCTCCTTCAAGGAGATGAAT |
| | | CCCCCCGATAACATCAAGGACACCAAGAGCGACATCATATTCTTCCAG |
| | | CGGTCGGTGCCGGGCCACGACAATAAAATGCAGTTCGAAAGCAGCTCC |
| | | TACGAGGGCTACTTCCTCGCCTGCGAGAAAGAGCGGGACCTGTTCAAG |
| | | CTGATCCTGAAGAAAGAGGACGAGCTGGGCGACAGGAGCATCATGTTC |
| | | ACCGTGCAGAACGAGGAC |
| 777 | IL1ra_IL18 | ATGGAGATCTGCAGGGGGCTAAGGTCCCACCTCATCACGCTCCTCCTC |
| | | TTCTTGTTCCACAGCGAGACGATCTGCTACTTCGGAAAGCTCGAGAGC |
| | | AAGTTGAGCGTCATCAGGAACCTCAACGACCAGGTCCTTTTCATCGAT |
| | | CAGGGCAACAGGCCGCTGTTCGAAGACATGACGGATAGCGATTGCAGG |
| | | GACAACGCCCCCCGAACCATCTTCATCATCTCCATGTACAAGGACAGC |
| | | CAGCCGAGGGGCATGGCCGTCACCATCAGCGTCAAGTGCGAGAAGATC |
| | | AGCACCCTCAGCTGCGAGAATAAGATCATCAGCTTCAAGGAGATGAAC |
| | | CCACCCGACAACATCAAGGACACTAAAAGCGACATCATCTTCTTCCAG |
| | | AGGAGCGTCCCGGGTCACGACAACAAGATGCAGTTCGAGAGCAGCTCC |
| | | TACGAGGGCTACTTTCTCGCCTGCGAGAAGGAGAGGGACCTGTTTAAG |
| | | CTCATCCTGAAGAAGGAAGACGAGCTCGGCGATAGGTCGATCATGTTC |
| | | ACCGTGCAGAACGAGGAC |
| 778 | IL1ra_IL18 | ATGGAGATCTGTAGGGGCCTTCGGAGCCACCTCATCACCCTTCTCCTC |
| | | TTCCTCTTCCACAGCGAGACGATCTGCTACTTCGGCAAGCTCGAGAGC |
| | | AAGCTTTCCGTAATACGGAACCTTAACGACCAGGTCCTCTTTATCGAC |
| | | CAGGGCAACAGGCCCCTCTTCGAAGACATGACCGACTCCGACTGTAGG |
| | | GACAACGCGCCGCGGACTATATTCATCATCAGCATGTACAAGGACAGC |
| | | CAGCCCCGGGGCATGGCCGTCACAATTTCCGTCAAGTGCGAGAAGATC |
| | | AGCACCCTCTCCTGTGAAAATAAGATCATCAGCTTCAAGGAGATGAAC |
| | | CCACCCGACAACATCAAGGACACGAAGTCCGACATCATCTTCTTCCAG |
| | | AGGTCCGTGCCCGGCCACGACAACAAGATGCAGTTCGAGAGCAGCAGC |
| | | TACGAGGGGTACTTCCTGGCCTGCGAGAAGGAGAGGGACCTCTTCAAG |
| | | CTGATCCTGAAGAAGGAGGACGAGCTGGGGGACAGGTCGATCATGTTT |
| | | ACCGTGCAGAACGAGGAC |
| 779 | IL1ra_IL18 | ATGGAGATCTGCAGGGGCCTCCGGTCCCATCTCATCACCCTCCTCCTC |
| | | TTCCTCTTCCACTCCGAGACAATCTGCTACTTCGGGAAACTCGAGAGC |
| | | AAGCTCTCCGTAATCCGTAATCTAAACGACCAGGTCCTCTTCATCGAC |
| | | CAGGGTAACAGGCCACTCTTCGAGGATATGACCGACAGCGATTGCCGG |
| | | GATAACGCCCCTCGCACCATCTTCATCATAAGCATGTACAAGGACAGC |
| | | CAGCCCAGGGGCATGGCCGTCACCATCTCGGTCAAGTGCGAGAAGATA |
| | | AGCACGCTCTCCTGCGAGAACAAGATTATCTCCTTCAAGGAAATGAAC |
| | | CCGCCCGATAACATCAAGGACACCAAGTCCGACATCATCTTTTTCCAG |
| | | CGGAGCGTGCCCGGGCATGATAACAAAATGCAGTTCGAGAGCTCCAGC |
| | | TATGAGGGGTACTTCCTGGCTTGCGAGAAGGAGCGGGACCTGTTCAAG |
| | | CTGATTCTGAAGAAGGAGGACGAGCTGGGTGACAGGAGCATAATGTTC |
| | | ACCGTGCAGAACGAGGAC |
| 780 | IL1ra_IL18 | ATGGAGATCTGCAGGGGCCTCCGCAGCCACCTCATCACCCTCCTCCTC |
| | | TTCCTCTTCCACTCGGAGACGATCTGCTACTTCGGGAAGCTCGAGTCC |
| | | AAGCTCAGCGTAATTAGGAACCTCAACGACCAGGTTCTCTTCATCGAT |
| | | CAGGGCAACCGTCCCTTGTTCGAGGACATGACCGACTCGGACTGCAGG |
| | | GATAACGCCCCCCGGACCATCTTCATAATCTCCATGTACAAGGATAGC |
| | | CAGCCCCGCGGCATGGCCGTCACCATAAGCGTCAAGTGCGAGAAGATC |
| | | TCCACCCTTAGCTGCGAGAACAAGATAATAAGCTTTAAGGAGATGAAC |
| | | CCGCCCGACAACATCAAGGACACGAAATCTGACATCATCTTCTTCCAG |
| | | CGCTCCGTGCCCGGCCACGACAACAAGATGCAGTTCGAGTCCTCCTCC |
| | | TACGAGGGCTATTTTCTGGCCTGTGAGAAGGAGAGGGACCTGTTCAAA |
| | | CTGATCCTGAAGAAGGAGGACGAGCTGGGGGACAGGTCCATCATGTTC |
| | | ACCGTGCAGAACGAGGAC |
| 781 | IL1ra_IL18 | ATGGAGATCTGCAGGGGACTTAGGTCCCACCTTATCACACTCTTACTC |
| | | TTCCTCTTCCACTCCGAGACGATCTGCTACTTCGGGAAACTCGAGAGC |
| | | AAGCTCAGCGTCATCAGGAACCTCAACGACCAGGTCCTCTTCATCGAC |
| | | CAGGGCAACAGGCCCCTCTTCGAGGACATGACCGACAGCGACTGCCGG |
| | | GACAACGCCCCCAGGACCATCTTCATCATCTCCATGTATAAGGACAGC |
| | | CAACCCCGCGGGATGGCGGTAACCATCAGCGTCAAGTGCGAGAAGATC |
| | | AGCACTTTGAGCTGCGAGAACAAGATCATCTCCTTCAAGGAGATGAAC |
| | | CCGCCCGACAACATCAAGGACACCAAGTCCGATATTATCTTCTTTCAG |
| | | AGGAGCGTGCCCGGCCACGACAACAAGATGCAGTTTGAGTCTAGCTCC |
| | | TACGAGGGCTACTTCCTGGCTTGCGAGAAAGAGAGGGATCTGTTTAAG |
| | | CTGATCCTGAAGAAGGAGGATGAGCTGGGTGACCGCAGCATAATGTTT |
| | | ACCGTGCAGAACGAGGAT |
| 782 | IL1ra_IL18 | ATGGAAATCTGTAGGGGGCTCAGGAGCCACCTCATCACCCTCCTACTC |
| | | TTCCTCTTCCACTCGGAAACCATTTGCTATTTCGGCAAGCTCGAAAGC |
| | | AAGCTCAGCGTCATCCGGAACCTCAACGACCAGGTTCTCTTCATCGAC |
| | | CAGGGCAACCGGCCCCTCTTCGAGGACATGACCGACAGCGACTGCAGG |
| | | GACAACGCCCCCCGGACGATCTTTATCATCAGCATGTATAAGGACAGC |
| | | CAGCCCAGGGGCATGGCCGTCACCATCTCCGTTAAGTGCGAAAAGATA |
| | | TCCACCCTCAGTTGTGAGAACAAGATCATCAGCTTCAAGGAGATGAAC |
| | | CCACCCGACAACATCAAGGACACCAAGAGCGACATCATCTTCTTCCAA |
| | | AGGAGGGTAGGGGGGGAGGATAAGAAGATGGAGTTGGAGTGGTGGAGG |
| | | TACGAGGGATACTTCCTGGCCTGCGAGAAGGAGAGGGATCTGTTCAAG |
| | | CTCATCCTGAAGAAGGAGGATGAGCTGGGGGATAGGAGCATAATGTTC |
| | | ACCGTCCAGAACGAAGAC |
| 783 | IL1ra_IL18_ | ATGGAGATCTGCCGAGGCCTCCGCTCCCACTTGATTACCCTCCTCCTC |
| | SN | TTCCTCTTCCACAGCGAGACGATCTGCTACTTCGGCAAGTTGGAGAGC |
| | | AAGCTCTCGGTTATCAGGAACCTCAACGACCAGGTCCTCTTCATCGAC |
| | | CAGGGGAATCGCCCGCTGTTCGAGGACATGACCAGCTCCGACTGTCGG |
| | | AACAACGCGCCCCGGACCATCTTCATTATCTCCATGTACAAGGACTCC |
| | | CAACCCAGGGGCATGGCCGTCACCATCTCGGTCAAGTGCGAGAAAATC |
| | | AGCACCCTCAGCTGCGAGAACAAGATCATCTCCTTCAAGGAGATGAAT |
| | | CCCCCCGACAACATCAAGGACACCAAGAGCGACATCATCTTCTTCCAG |
| | | CGCAGCGTCCCCGGGCACGACAACAAGATGCAGTTCGAGAGCAGCAGC |
| | | TACGAGGGGTACTTCCTCGCCTGCGAGAAGGAGAGGGACCTGTTCAAG |
| | | CTCATCCTGAAGAAAGAGGACGAGCTGGGGGACCGGAGCATCATGTTC |
| | | ACCGTGCAAAATGAGGAC |
| 784 | IL1ra_IL18_ | ATGGAGATCTGCAGGGGGTTGAGGAGCCACCTCATCACGCTCCTTTTG |
| | SN | TTCCTCTTCCACAGCGAGACGATCTGCTACTTCGGGAAGCTTGAGTCC |
| | | AAGCTCTCCGTCATCCGGAACCTCAACGACCAGGTCCTCTTCATCGAT |
| | | CAGGGGAACCGGCCGCTTTTCGAAGATATGACGTCCAGCGACTGTAGG |
| | | AACAACGCCCCCCGCACCATCTTCATCATCTCCATGTACAAGGACTCC |
| | | CAACCCAGGGGCATGGCCGTCACCATCAGCGTTAAGTGCGAGAAGATC |
| | | AGCACGCTAAGCTGCGAGAACAAGATCATCAGCTTCAAGGAGATGAAC |
| | | CCGCCCGACAACATTAAGGACACCAAAAGCGACATCATTTTCTTCCAA |
| | | AGGAGCGTGCCCGGCCACGACAATAAGATGCAGTTCGAAAGCAGCTCC |
| | | TACGAGGGCTACTTCCTCGCCTGCGAGAAGGAGCGGGACCTGTTCAAG |
| | | CTGATCCTGAAAAAGGAGGACGAGCTGGGGGACAGGAGCATCATGTTC |
| | | ACCGTGCAGAACGAGGAC |
| 785 | IL1ra_IL18_ | ATGGAGATCTGCCGGGGCTTGAGGAGCCACCTAATCACGCTCCTCCTC |
| | SN | TTCTTATTCCACAGCGAGACGATCTGCTACTTCGGCAAGCTTGAGTCC |
| | | AAGCTCAGCGTTATCCGGAACCTAAACGACCAAGTCCTCTTCATCGAC |
| | | CAGGGCAACCGGCCGCTGTTCGAGGACATGACCTCCAGCGACTGCAGG |
| | | AATAACGCCCCCAGGACCATCTTCATCATCAGCATGTACAAAGACAGC |
| | | CAGCCCCGGGGCATGGCCGTCACGATCTCCGTAAAGTGTGAGAAGATC |
| | | TCCACCCTCTCCTGCGAGAACAAGATCATAAGCTTCAAGGAGATGAAC |
| | | CCGCCCGACAACATCAAGGACACCAAGAGCGACATCATTTTCTTCCAA |
| | | CGGAGCGTGCCCGGCCATGACAACAAGATGCAGTTTGAGTCCAGCTCC |
| | | TACGAGGGCTACTTCCTGGCCTGCGAAAAGGAGCGGGACCTGTTCAAG |
| | | CTGATCCTGAAGAAGGAAGACGAGCTGGGGGACAGGTCCATCATGTTC |
| | | ACCGTGCAGAATGAGGAC |
| 786 | IL1ra_IL18_ | ATGGAGATCTGCCGCGGGCTCCGGTCCCATCTCATCACGCTCCTCCTC |
| | SN | TTCCTCTTCCACAGCGAGACTATCTGTTACTTCGGGAAGCTTGAGTCC |
| | | AAGCTCAGCGTCATCCGGAACCTCAACGACCAGGTCCTCTTCATCGAT |
| | | CAGGGGAACCGGCCCCTCTTCGAAGACATGACCTCGTCCGACTGCCGG |
| | | AACAACGCACCCAGGACCATATTCATCATCTCCATGTACAAGGACTCC |
| | | CAGCCCAGGGGCATGGCCGTTACCATCAGCGTAAAGTGCGAGAAGATC |
| | | AGCACCCTCAGCTGCGAGAATAAGATCATCTCCTTCAAGGAGATGAAC |
| | | CCCCCGGACAACATCAAGGACACCAAGTCCGACATCATCTTCTTTCAG |
| | | CGCAGCGTCCCCGGGCACGATAACAAGATGCAGTTCGAGTCCAGCAGC |
| | | TACGAGGGGTACTTCCTGGCCTGCGAAAAGGAGCGCGACCTGTTCAAG |
| | | CTGATCCTGAAGAAGGAGGACGAGCTCGGCGATAGATCCATCATGTTC |
| | | ACGGTGCAGAACGAGGAC |
| 787 | IL1ra_IL18_ | ATGGAGATCTGTAGGGGGCTCAGGTCCCACCTTATCACGCTCCTCCTC |
| | SN | TTTCTTTTCCACAGCGAGACGATCTGCTACTTCGGCAAGCTTGAGAGC |
| | | AAACTCTCGGTCATCAGGAACCTCAACGACCAGGTCCTCTTCATCGAT |
| | | CAGGGGAACAGGCCCTTGTTCGAGGACATGACCTCCAGCGACTGCAGG |
| | | AACAACGCCCCCCGGACCATCTTCATCATCTCCATGTACAAGGATAGC |
| | | CAGCCGCGGGGGATGGCCGTCACCATCTCGGTCAAGTGCGAGAAGATC |
| | | AGCACCCTTTCCTGCGAGAACAAGATCATCAGCTTCAAGGAGATGAAC |
| | | CCACCCGACAATATCAAAGACACGAAAAGCGATATCATCTTCTTCCAG |
| | | AGGAGCGTGCCGGGCCATGACAACAAGATGCAGTTCGAGAGCAGCAGC |
| | | TACGAGGGCTATTTTCTGGCCTGCGAGAAGGAGAGGGACCTGTTCAAG |
| | | CTGATCCTGAAGAAAGAGGACGAGCTGGGGGACAGGAGCATCATGTTC |
| | | ACCGTGCAGAACGAGGAC |
| 788 | IL1ra_IL18_ | ATGGAGATCTGCAGGGGCCTCAGGAGCCACCTCATCACCCTCCTCCTC |
| | SN | TTCCTCTTCCATAGCGAGACAATCTGCTACTTCGGGAAGCTTGAGTCC |
| | | AAGCTCAGCGTCATCAGGAATCTCAACGATCAGGTCCTCTTCATCGAC |
| | | CAAGGGAACCGGCCCCTCTTCGAGGACATGACCTCCAGCGATTGCAGG |
| | | AACAACGCTCCCAGGACCATATTCATCATCTCCATGTACAAGGACTCC |
| | | CAGCCCAGGGGCATGGCCGTCACCATCTCGGTCAAGTGCGAGAAGATC |
| | | AGCACGCTCAGCTGCGAGAACAAAATCATCTCCTTCAAGGAGATGAAC |
| | | CCACCCGACAACATCAAAGACACCAAGAGCGACATCATCTTCTTCCAG |
| | | AGGAGCGTGCCGGGCCACGACAACAAAATGCAGTTTGAGTCGTCCAGC |
| | | TACGAGGGCTACTTCCTGGCCTGCGAGAAGGAGCGGGACCTATTCAAG |
| | | CTCATCCTGAAGAAGGAGGACGAGCTGGGGGATAGGAGCATCATGTTC |
| | | ACGGTGCAGAACGAGGAC |
| 789 | IL1ra_IL18_ | ATGGAGATCTGCAGGGGGCTCAGGAGCCACCTCATCACGCTCCTACTC |
| | SN | TTCCTATTCCATAGCGAAACCATCTGTTACTTCGGCAAGCTTGAGAGC |
| | | AAGCTTAGCGTCATCCGGAACCTTAACGACCAGGTCCTCTTTATCGAC |
| | | CAGGGCAACCGACCCCTCTTCGAGGATATGACGTCCAGCGACTGCCGG |
| | | AACAACGCCCCCCGGACCATATTCATCATCAGCATGTACAAAGATAGC |
| | | CAGCCCAGGGGGATGGCCGTAACCATCAGCGTCAAGTGCGAGAAGATC |
| | | TCCACCTTGTCGTGCGAGAATAAGATCATCTCCTTCAAGGAGATGAAC |
| | | CCGCCCGATAACATCAAGGACACCAAGAGCGATATCATCTTCTTCCAG |
| | | AGGAGTGTGCCCGGCCACGACAACAAGATGCAGTTCGAGAGCAGCTCC |
| | | TACGAGGGCTACTTCCTGGCCTGTGAAAAGGAGAGGGATCTGTTCAAA |
| | | CTGATTCTCAAGAAGGAGGACGAGCTGGGGGACCGGAGCATCATGTTC |
| | | ACCGTGCAGAACGAGGAC |
| 790 | IL1ra_IL18_ | ATGGAGATCTGTAGGGGGCTCAGGAGCCACCTCATCACCCTACTCCTC |
| | SN | TTCCTCTTCCATAGCGAAACCATCTGCTACTTCGGCAAGCTAGAGAGC |
| | | AAGTTGAGCGTAATCCGGAACCTCAACGATCAAGTCCTCTTTATCGAT |
| | | CAGGGGAACCGGCCCCTCTTCGAGGACATGACCAGCAGCGACTGCAGG |
| | | AACAACGCCCCCAGGACCATCTTCATCATCTCCATGTACAAGGACAGC |
| | | CAGCCGCGCGGCATGGCCGTCACAATCTCCGTAAAGTGCGAGAAGATT |
| | | AGCACGCTAAGCTGCGAGAACAAGATCATCAGCTTCAAGGAGATGAAC |
| | | CCGCCCGACAACATTAAGGACACCAAGTCCGATATCATCTTCTTCCAG |
| | | AGGAGCGTCCCTGGGCACGACAACAAGATGCAGTTTGAAAGTAGCAGC |
| | | TACGAGGGGTATTTCCTCGCGTGCGAGAAGGAGAGGGATCTGTTCAAG |
| | | CTGATTCTGAAAAAGGAAGACGAGCTCGGCGACAGGAGCATCATGTTC |
| | | ACCGTGCAGAACGAAGAC |
| 791 | IL1ra_IL18_ | ATGGAGATCTGCAGGGGCCTCAGGAGCCACCTCATAACGCTCCTCCTC |
| | SN | TTCTTATTCCACAGCGAGACGATCTGCTACTTCGGAAAACTCGAGAGC |
| | | AAGCTCAGCGTCATCAGGAACCTCAACGACCAGGTCCTCTTCATCGAC |
| | | CAGGGCAACAGGCCGCTGTTCGAGGACATGACCAGCAGCGACTGCCGC |
| | | AACAACGCCCCCAGGACGATCTTCATCATCAGCATGTATAAAGACAGC |
| | | CAGCCGAGGGGCATGGCAGTAACCATCTCCGTAAAGTGCGAAAAGATC |
| | | AGCACACTCTCGTGCGAGAACAAGATCATCTCGTTCAAGGAGATGAAC |
| | | CCGCCCGACAACATCAAAGACACCAAGAGCGACATCATCTTTTTCCAG |
| | | CGGAGCGTACCTGGCCACGACAACAAAATGCAGTTCGAATCCAGCAGC |
| | | TACGAGGGCTATTTCCTGGCGTGCGAGAAGGAGCGCGACCTGTTCAAG |
| | | CTCATCCTGAAGAAGGAGGATGAGCTGGGGGACCGGTCGATCATGTTC |
| | | ACCGTGCAGAACGAGGAC |
| 792 | IL1ra_IL18_ | ATGGAGATCTGCAGGGGGCTCAGGTCCCACCTCATCACCCTCCTCCTA |
| | SN | TTTCTCTTCCACTCCGAGACTATCTGCTACTTCGGGAAGCTCGAGAGC |
| | | AAGCTCAGCGTCATCCGGAACTTGAACGACCAGGTACTCTTTATCGAC |
| | | CAGGGCAATCGGCCGCTGTTCGAGGACATGACCAGCAGCGACTGCCGC |
| | | AATAACGCCCCCAGGACCATCTTCATCATCAGCATGTATAAGGACAGC |
| | | CAGCCCAGGGGCATGGCCGTAACCATCAGCGTAAAGTGCGAGAAAATC |
| | | AGCACCCTTAGCTGCGAGAATAAGATAATAAGCTTCAAGGAGATGAAC |
| | | CCACCCGACAATATCAAGGACACCAAGAGCGACATCATCTTCTTCCAG |
| | | AGGAGCGTGCCCGGACATGATAATAAAATGCAGTTCGAGAGCAGCTCC |
| | | TATGAGGGCTACTTCCTCGCCTGCGAGAAGGAGAGGGACCTGTTCAAG |
| | | CTCATCCTGAAGAAGGAGGATGAGCTGGGGGACAGGTCCATCATGTTC |
| | | ACGGTGCAGAACGAGGAC |
| 793 | IL1ra_IL18_ | ATGGAGATCTGCCGGGGCCTCAGGTCCCACCTCATCACCTTGCTCCTC |
| | SN | TTTTTGTTCCACAGCGAGACGATCTGCTATTTCGGCAAACTCGAGTCG |
| | | AAGCTCAGCGTCATCAGGAACCTCAACGATCAGGTCCTCTTTATCGAC |
| | | CAGGGCAACAGGCCCCTCTTCGAGGACATGACCTCCAGCGACTGTCGG |
| | | AACAACGCCCCCAGGACGATCTTCATCATCAGCATGTACAAGGATTCC |
| | | CAGCCCAGGGGGATGGCCGTTACCATCTCCGTAAAGTGCGAAAAGATT |
| | | TCCACCCTCTCCTGTGAGAATAAGATCATCAGCTTCAAGGAGATGAAT |
| | | CCCCCGGACAACATCAAGGACACCAAGAGCGACATCATCTTCTTCCAG |
| | | AGGAGCGTGCCCGGCCACGACAACAAGATGCAGTTCGAATCCTCCTCC |
| | | TATGAGGGCTACTTCCTCGCCTGCGAGAAGGAAAGGGACCTGTTCAAG |
| | | CTGATCCTGAAGAAGGAGGACGAGCTGGGGGACCGGTCCATCATGTTT |
| | | ACCGTACAGAACGAGGAT |
| 794 | IL1ra_IL18_ | ATGGAGATCTGCAGGGGCTTGAGGAGCCATCTCATCACCCTCCTCCTC |
| | SN | TTCCTCTTTCACAGCGAGACGATCTGCTACTTCGGCAAGCTCGAGTCC |
| | | AAGCTCAGCGTCATCCGGAATCTCAACGACCAGGTACTTTTCATCGAC |
| | | CAGGGCAACCGGCCGCTGTTCGAGGACATGACCTCGAGCGACTGCCGG |
| | | AACAACGCCCCCAGGACCATCTTCATCATCTCCATGTACAAGGACAGC |
| | | CAGCCGCGGGGGATGGCCGTCACCATCAGCGTCAAGTGCGAGAAGATC |
| | | TCCACCCTCAGCTGCGAAAATAAAATCATCTCCTTCAAGGAGATGAAC |
| | | CCGCCCGACAACATCAAAGACACCAAGAGCGACATCATATTTTTCCAG |
| | | AGGAGCGTGCCCGGCCACGATAACAAGATGCAGTTCGAGTCATCGAGC |
| | | TACGAGGGGTATTTCCTCGCCTGCGAAAAGGAACGGGACCTCTTCAAG |
| | | CTGATCCTCAAGAAGGAGGATGAACTTGGAGATCGGAGCATCATGTTC |
| | | ACCGTGCAGAACGAGGAC |
| 795 | IL1ra_IL18_ | ATGGAAATCTGCAGGGGGCTCAGGTCCCACCTCATTACCCTCCTCCTC |
| | SN | TTCCTCTTTCACAGCGAGACTATCTGCTACTTCGGCAAGTTGGAGTCC |
| | | AAGCTCTCGGTCATCCGGAATCTCAACGACCAGGTACTCTTCATCGAC |
| | | CAGGGCAACCGGCCGCTGTTCGAAGACATGACCAGCTCCGACTGCCGA |
| | | AACAACGCCCCCAGGACCATCTTCATCATCTCCATGTATAAGGACTCC |
| | | CAGCCCCGCGGCATGGCCGTAACCATCAGCGTCAAGTGCGAGAAGATC |
| | | TCCACGTTGAGCTGTGAAAACAAGATTATATCCTTCAAGGAGATGAAC |
| | | CCTCCCGACAACATTAAGGACACCAAATCGGACATCATCTTCTTTCAG |
| | | AGGAGCGTGCCCGGCCACGACAACAAGATGCAGTTCGAGAGCTCCAGT |
| | | TATGAGGGGTACTTCCTGGCCTGCGAGAAGGAGAGGGACCTGTTCAAG |
| | | CTGATCCTGAAAAAGGAGGACGAGCTGGGGGACCGGTCCATCATGTTC |
| | | ACCGTGCAGAACGAGGAC |
| 796 | IL1ra_IL18_ | ATGGAGATCTGCCGGGGATTACGCAGCCACCTTATCACCCTCTTGCTC |
| | SN | TTTCTCTTTCACAGCGAGACAATCTGCTACTTCGGCAAGCTCGAGAGC |
| | | AAGTTGTCCGTCATCAGGAACCTCAACGATCAGGTCCTCTTTATCGAC |
| | | CAGGGCAACAGGCCCCTCTTCGAGGACATGACCAGCAGCGACTGCAGG |
| | | AACAACGCCCCGCGGACCATCTTCATCATTTCCATGTACAAGGACAGC |
| | | CAGCCGAGGGGTATGGCCGTCACTATCTCCGTAAAGTGCGAGAAGATC |
| | | AGCACGTTGTCCTGCGAAAACAAAATCATCTCCTTCAAGGAGATGAAC |
| | | CCCCCGGACAATATAAAGGACACCAAAAGCGACATCATCTTCTTCCAG |
| | | AGGAGCGTGCCCGGCCACGATAATAAAATGCAGTTCGAGAGCTCCTCC |
| | | TACGAGGGGTACTTTCTCGCCTGCGAGAAGGAGAGGGACCTGTTCAAA |
| | | CTCATCCTCAAGAAGGAGGACGAGCTGGGCGACCGGTCCATCATGTTC |
| | | ACGGTGCAGAACGAGGAC |
| 797 | IL1ra_IL18_ | ATGGAAATCTGCCGGGGGCTACGGAGCCATCTCATAACCCTCCTCCTC |
| | SN | TTCCTCTTCCACAGCGAGACAATCTGTTACTTCGGCAAGCTCGAGTCC |
| | | AAGCTCAGCGTCATCCGGAACCTCAACGACCAAGTCCTCTTCATAGAT |
| | | CAGGGCAACAGGCCGCTGTTCGAGGACATGACCTCCTCCGACTGCCGC |
| | | AACAACGCCCCCAGGACCATCTTCATCATCAGCATGTACAAGGACAGC |
| | | CAGCCCAGGGGCATGGCCGTCACCATCTCGGTCAAGTGCGAGAAAATC |
| | | TCGACGCTCAGCTGCGAGAACAAGATCATCAGCTTCAAGGAGATGAAC |
| | | CCGCCCGACAACATCAAGGATACCAAGAGCGACATCATCTTCTTCCAG |
| | | AGGAGCGTGCCCGGCCACGACAACAAGATGCAGTTCGAGTCCTCCAGC |
| | | TACGAGGGGTACTTCCTCGCCTGTGAGAAGGAGAGGGACCTCTTCAAG |
| | | CTGATACTCAAGAAAGAGGACGAGCTGGGGGACCGAAGCATAATGTTC |
| | | ACGGTGCAGAACGAGGAT |
| 798 | IL1ra_IL18_ | ATGGAGATCTGCAGGGGCCTCCGGAGCCACCTCATCACACTACTCCTC |
| | SN | TTCCTCTTCCATAGCGAAACCATCTGCTACTTCGGCAAGCTCGAGAGC |
| | | AAGCTCAGCGTCATCCGGAACCTCAACGACCAGGTCCTCTTTATCGAC |
| | | CAGGGCAACCGGCCGTTGTTCGAGGACATGACCAGCTCCGACTGCCGG |
| | | AACAACGCCCCGCGGACGATCTTCATCATTAGCATGTACAAGGACAGT |
| | | CAACCTAGGGGCATGGCCGTCACGATTAGCGTCAAGTGCGAAAAGATC |
| | | AGCACTCTCAGCTGCGAGAACAAAATCATCTCCTTCAAGGAGATGAAC |
| | | CCGCCCGACAACATCAAGGACACCAAGAGCGACATCATCTTCTTCCAG |
| | | CGGAGTGTGCCCGGCCACGATAACAAAATGCAGTTCGAAAGCTCCTCC |
| | | TACGAGGGCTACTTCCTGGCCTGTGAGAAGGAGCGGGATCTGTTCAAG |
| | | CTCATCCTGAAGAAGGAGGATGAGCTGGGCGACAGGAGCATCATGTTC |
| | | ACCGTGCAGAATGAGGAC |
| 799 | IL1ra_IL18_ | ATGGAGATCTGTAGGGGCCTCCGATCCCACCTCATCACCTTGCTACTC |
| | SN | TTCCTCTTCCACAGCGAGACGATCTGCTATTTCGGCAAGCTCGAGAGC |
| | | AAGTTGAGCGTCATCCGGAATCTCAACGACCAGGTCTTGTTCATCGAT |
| | | CAGGGGAACAGGCCCCTCTTCGAGGACATGACCTCCAGCGACTGCCGG |
| | | AACAACGCCCCCCGGACCATATTCATCATATCCATGTACAAGGACTCC |
| | | CAGCCCAGAGGCATGGCCGTCACCATTAGCGTGAAGTGCGAGAAGATC |
| | | AGCACCCTCAGCTGCGAGAACAAGATCATCTCTTTCAAGGAGATGAAC |
| | | CCGCCCGACAATATCAAGGATACTAAGTCCGACATCATCTTCTTCCAG |
| | | AGGAGCGTGCCCGGCCACGACAACAAAATGCAGTTCGAGAGCTCAAGC |
| | | TACGAGGGCTACTTCCTGGCGTGCGAGAAGGAGCGGGACCTGTTCAAG |
| | | CTGATCCTGAAGAAAGAGGATGAGCTGGGGGACAGGAGCATCATGTTC |
| | | ACCGTGCAGAACGAGGAC |
| 800 | IL1ra_IL18_ | ATGGAGATCTGTAGGGGCCTCCGGTCCCACCTCATCACCCTCCTCCTT |
| | SN | TTCCTCTTCCACTCCGAGACGATCTGCTATTTCGGCAAGCTCGAGAGC |
| | | AAGCTCAGCGTAATACGCAACCTCAACGACCAGGTCCTCTTTATAGAT |
| | | CAGGGGAACCGTCCCCTCTTCGAGGACATGACCAGCAGCGATTGTAGG |
| | | AACAACGCCCCCCGGACCATCTTCATCATATCCATGTACAAGGACAGC |
| | | CAACCGCGGGGCATGGCCGTCACCATCAGCGTTAAGTGCGAGAAAATC |
| | | AGCACCCTTAGCTGTGAAAACAAGATCATCTCCTTCAAGGAGATGAAC |
| | | CCTCCCGACAACATCAAGGACACCAAGTCCGACATCATATTCTTTCAG |
| | | AGGAGCGTGCCCGGCCATGATAACAAGATGCAGTTCGAGAGCTCCTCG |
| | | TACGAAGGTTACTTCCTGGCCTGCGAGAAGGAGAGGGACCTGTTTAAG |
| | | CTCATCCTGAAGAAAGAGGACGAGCTGGGCGACAGGAGCATCATGTTC |
| | | ACCGTGCAGAACGAGGAC |
| 801 | IL1ra_IL18_ | ATGGAAATCTGCAGGGGGCTCAGGTCCCACCTAATAACCCTCCTTCTC |
| | SN | TTCCTCTTCCACTCGGAGACTATCTGCTACTTCGGCAAGCTCGAGTCG |
| | | AAGCTCAGCGTTATCAGGAACCTCAACGACCAGGTCTTGTTCATCGAT |
| | | CAGGGCAATCGGCCCCTCTTCGAGGACATGACCAGCAGCGACTGCAGG |
| | | AACAACGCCCCGAGGACTATCTTCATAATCAGCATGTACAAGGATAGC |
| | | CAGCCTAGGGGCATGGCCGTCACCATAAGCGTAAAGTGCGAAAAGATC |
| | | AGCACCCTTAGCTGCGAAAACAAGATCATCAGCTTCAAGGAGATGAAC |
| | | CCGCCCGACAACATAAAGGACACCAAATCCGACATCATCTTCTTCCAG |
| | | AGGAGCGTGCCTGGCCACGACAACAAAATGCAGTTCGAGAGCTCCAGC |
| | | TACGAGGGCTATTTCCTGGCATGTGAGAAGGAGAGGGACCTCTTTAAG |
| | | CTCATCCTGAAGAAGGAGGATGAGCTCGGGGACAGGAGCATCATGTTC |
| | | ACCGTGCAAAACGAGGAT |
| 802 | IL1ra_IL18_ | ATGGAGATCTGCCGGGGCCTCAGGAGCCACCTCATCACGCTCCTCTTG |
| | SN | TTCCTCTTCCATAGCGAGACAATCTGCTATTTCGGCAAGCTCGAATCC |
| | | AAACTCAGCGTAATCCGGAACCTTAACGACCAGGTCCTCTTTATCGAC |
| | | CAGGGGAACCGGCCGCTTTTCGAGGACATGACGTCCAGCGACTGCCGA |
| | | AACAACGCCCCCAGGACCATCTTTATCATCAGCATGTACAAGGACAGC |
| | | CAGCCCCGGGGCATGGCCGTCACGATCTCCGTCAAGTGCGAGAAGATC |
| | | AGCACCCTTAGCTGTGAGAACAAGATCATCAGCTTCAAGGAGATGAAC |
| | | CCGCCCGACAACATAAAGGACACCAAGAGCGACATCATCTTCTTCCAG |
| | | CGGTCTGTGCCCGGCCACGACAACAAGATGCAGTTCGAGAGCTCCAGC |
| | | TACGAGGGCTACTTCCTGGCCTGTGAAAAGGAGAGGGACCTGTTCAAG |
| | | CTGATCCTCAAGAAGGAGGACGAGCTCGGAGACAGGAGCATCATGTTC |
| | | ACGGTGCAGAATGAGGAT |
| 803 | IL1ra_IL18_ | ATGGAGATCTGCAGGGGCCTCAGGTCCCACCTTATCACCCTACTTCTC |
| | SN | TTTCTCTTTCACAGCGAAACTATCTGTTACTTCGGCAAGCTCGAGAGC |
| | | AAGCTCTCCGTCATCAGGAACCTCAACGACCAGGTCCTCTTCATCGAT |
| | | CAGGGCAACAGGCCCCTATTCGAGGACATGACGAGCAGCGACTGCCGA |
| | | AATAACGCCCCCAGGACGATCTTCATCATCTCCATGTACAAGGACTCC |
| | | CAACCCCGCGGCATGGCCGTCACCATCTCGGTTAAGTGCGAGAAGATC |
| | | AGCACCCTCAGCTGCGAGAACAAGATCATCAGCTTCAAAGAGATGAAT |
| | | CCCCCAGACAACATCAAGGACACCAAGTCCGACATCATCTTCTTTCAG |
| | | AGGTCCGTCCCCGGACACGATAACAAAATGCAGTTCGAGTCCAGCAGC |
| | | TACGAGGGCTACTTCCTCGCCTGCGAGAAGGAGCGGGATCTCTTCAAG |
| | | CTGATCCTGAAGAAAGAGGACGAGCTCGGCGACCGCTCCATCATGTTC |
| | | ACGGTGCAGAACGAGGAC |
| 804 | IL1ra_IL18_ | ATGGAAATTTGCCGCGGGCTACGGTCCCACCTCATCACCCTTCTCTTA |
| | SN | TTCCTATTCCACTCGGAGACAATCTGCTACTTCGGCAAGCTCGAGAGC |
| | | AAGCTCTCCGTCATACGGAACCTCAACGACCAGGTCCTCTTCATCGAC |
| | | CAGGGGAATCGACCCCTCTTCGAAGACATGACCAGCAGCGACTGCAGG |
| | | AACAACGCCCCCCGCACCATCTTCATCATCAGCATGTACAAGGATTCG |
| | | CAGCCCCGGGGCATGGCCGTCACCATCTCCGTGAAGTGTGAGAAAATC |
| | | AGCACCCTCAGTTGTGAGAACAAGATTATCTCCTTCAAGGAGATGAAC |
| | | CCGCCCGACAACATTAAGGACACCAAGAGCGACATCATCTTCTTCCAG |
| | | AGGTCGGTGCCCGGCCACGATAACAAGATGCAGTTCGAGTCCAGCTCC |
| | | TACGAGGGCTATTTCCTGGCCTGCGAGAAGGAGCGGGACCTGTTTAAG |
| | | CTTATCCTGAAGAAGGAGGATGAGCTGGGCGACAGGAGCATCATGTTT |
| | | ACCGTGCAAAACGAGGAT |
| 805 | IL1ra_IL18_ | ATGGAGATTTGCCGCGGGCTCAGGAGCCACCTTATCACCCTCCTCCTC |
| | SN | TTCCTATTCCACTCAGAGACGATCTGCTATTTCGGAAAGCTCGAGAGC |
| | | AAGCTCTCCGTAATCAGGAACCTCAACGACCAGGTTCTCTTCATCGAC |
| | | CAGGGCAACAGGCCCCTCTTCGAGGACATGACGTCCAGCGACTGCCGC |
| | | AACAACGCCCCCCGGACCATCTTCATCATCTCCATGTACAAAGACAGC |
| | | CAGCCCAGGGGCATGGCCGTCACCATCAGCGTCAAGTGCGAGAAGATC |
| | | TCCACCCTAAGCTGTGAGAACAAGATTATCTCGTTCAAGGAGATGAAC |
| | | CCACCCGACAACATCAAGGACACCAAGTCCGACATCATCTTCTTCCAG |
| | | AGGAGCGTACCCGGCCACGATAACAAGATGCAGTTCGAGAGCTCCTCC |
| | | TACGAGGGCTACTTCCTGGCCTGCGAAAAGGAGAGGGACCTGTTCAAG |
| | | CTGATCCTGAAGAAAGAGGATGAGCTGGGTGACCGCTCCATAATGTTC |
| | | ACGGTGCAGAACGAGGAC |
| 806 | IL1ra_IL18_ | ATGGAGATCTGCCGGGGCCTCAGGTCCCACCTCATCACCCTCCTACTC |
| | SN | TTCTTATTCCACTCGGAGACGATCTGTTACTTCGGAAAGCTCGAGAGC |
| | | AAGCTCAGCGTCATCCGTAACCTCAACGACCAGGTCCTCTTCATCGAT |
| | | CAGGGCAACAGGCCGCTATTCGAGGACATGACCTCCAGCGACTGCCGG |
| | | AACAACGCCCCGCGGACCATATTCATCATCAGCATGTACAAGGACTCC |
| | | CAACCCCGGGGCATGGCCGTCACTATCAGCGTTAAGTGCGAGAAAATC |
| | | TCCACCCTTAGCTGCGAGAACAAGATCATCTCGTTCAAGGAGATGAAC |
| | | CCGCCCGACAACATCAAGGACACCAAGTCGGACATAATCTTCTTCCAG |
| | | CGGTCAGTCCCCGGCCATGACAACAAGATGCAGTTTGAGTCCAGCTCC |
| | | TACGAGGGCTACTTTCTGGCCTGCGAGAAGGAGAGGGACCTCTTTAAG |
| | | CTGATCCTCAAGAAGGAGGACGAGCTGGGCGACAGGTCCATCATGTTC |
| | | ACCGTCCAGAACGAGGAC |
| 807 | IL1ra_IL18_ | ATGGAGATCTGCAGGGGCCTCCGCTCCCACCTCATCACCCTCCTCCTC |
| | SN | TTCCTCTTCCACAGCGAGACGATCTGCTACTTCGGCAAGCTAGAGTCC |
| | | AAGCTCTCGGTCATCCGGAACCTAAACGACCAGGTACTCTTCATCGAC |
| | | CAGGGGAACAGGCCCCTCTTCGAAGACATGACTAGCAGCGATTGCAGG |
| | | AACAACGCCCCGAGGACCATCTTCATCATCAGCATGTATAAGGATAGC |
| | | CAGCCCCGGGGCATGGCCGTCACCATCTCGGTGAAGTGCGAGAAGATC |
| | | AGCACCTTGTCCTGCGAGAACAAGATAATCTCATTCAAGGAGATGAAC |
| | | CCTCCCGACAATATAAAGGACACTAAGTCCGACATCATCTTCTTCCAG |
| | | AGGAGCGTGCCAGGGCACGACAACAAGATGCAGTTCGAAAGCAGCAGC |
| | | TACGAGGGGTATTTCCTGGCCTGCGAAAAGGAGCGGGACCTGTTCAAG |
| | | CTGATCCTGAAGAAGGAGGATGAACTGGGGGACCGCTCCATCATGTTC |
| | | ACCGTGCAGAACGAGGAC |

[1711] The sequence-optimized IL18 polynucleotide sequences disclosed herein are distinct from the corresponding wild type IL18 polynucleotide sequences and from other known sequence-optimized IL18 polynucleotide sequences, e.g., these sequence-optimized nucleic acids have unique compositional characteristics. See FIGS. 100A to 101E.

[1712] In some embodiments, the percentage of uracil or thymine nucleobases in a sequence-optimized IL18 polynucleotide sequence (e.g., encoding an IL18 polypeptide, a functional fragment, or a variant thereof) is modified (e.g., reduced) with respect to the percentage of uracil or thymine nucleobases in the reference wild-type polynucleotide sequence. Such a sequence is referred to as a uracil-modifed or thymine-modified sequence. In some embodiments, the sequence-optimized IL18 polynucleotide sequence has a lower uracil or thymine content than the uracil or thymine content in the reference wild-type sequence. In some embodiments, the uracil or thymine content in a sequence-optimized IL18 polynucleotide sequence of the disclosure is greater than the uracil or thymine content in the reference wild-type sequence and still maintain beneficial effects, e.g., increased expression of interferon-γ when compared to the reference wild-type sequence.

[1713] The uracil or thymine content of the wild type IL18 polypeptide (e.g., SEQ ID NO: 564) without the signal peptide is about 28%. In some embodiments, the uracil or thymine content of a uracil- or thymine-modified sequence encoding an IL18 polypeptide is less than the uracil or thymidine content of the wild type IL18, e.g., less than 28%. In some embodiments, the uracil or thymine content of a uracil- or thymine-modified sequence encoding an IL18 polypeptide of the disclosure is less than 28%, less than 25%, less than 24%, less than 23%, less than 22%, less than 21%, less than 20%, less than 19%, less than 18%, less than 17%, or less than 16%. In some embodiments, the uracil or thymine content is not less than 18%, 17%, or 16%. The uracil or thymine content of a sequence disclosed herein, i.e., its total uracil or thymine content is abbreviated herein as % U_{TL} or % T_{TL}. In some embodiments, the uracil or thymine content (% U_{TL} or % T_{TL}) of a uracil- or thymine-modified sequence encoding an IL18 polypeptide of the disclosure is less than about 50%, less than about 40%, less than about 30%, less than about 25%, or less than about 20%.

[1714] In some embodiments, the uracil or thymine content (% U_{TL} or % T_{TL}) of a uracil-or thymine-modified sequence encoding an IL18 polypeptide of the disclosure is between 12% and 25%, between 12% and 24%, between 13% and 24%, between 13% and 23%, between 14% and 23%, between 14% and 22%, between 15% and 22%, between 15% and 21%, between 16% and 21%, between 16% and 20%, or between 17% and 20%.

[1715] In some embodiments, the uracil or thymine content (% U_{TL} or % T_{TL}) of a uracil-or thymine-modified sequence encoding an IL18 polypeptide of the disclosure is between 15% and 22%, between 15% and 21%, 16% and 21%, 16% and 20%, or between 17% and 20%.

[1716] In a particular embodiment, the uracil or thymine content (% U_{TL} or % T_{TL}) of a uracil- or thymine modified sequence encoding an IL18 polypeptide of the disclosure is between about 17% and about 20%.

[1717] The uracil or thymine content of IL2sp IL18 wt (e.g., SEQ ID NO: 575) is about 30%. In some embodiments, the uracil or thymine content of a uracil- or thymine-modified sequence encoding an IL18 polypeptide is less than 30%. In some embodiments, the uracil or thymine content of a uracil- or thymine-modified sequence encoding an IL18 polypeptide of the disclosure is less than 30%, less than 25%, less than 24%, less than 23%, less than 22%, less than 21%, less than 20%, less than 19%, less than 18%, less than 17%, or less than 16%. In some embodiments, the uracil or thymine content is not less than 18%, 17%, or 16%. The uracil or thymine content of a sequence disclosed herein, i.e., its total uracil or thymine content is abbreviated herein as % U_{TL} or % T_{TL}.

[1718] In some embodiments, the uracil or thymine content (% U_{TL} or % T_{TL}) of a uracil-or thymine-modified sequence encoding an IL18 polypeptide of the disclosure is between 12% and 25%, between 12% and 24%, between 13% and 24%, between 13% and 23%, between 14% and 23%, between 14% and 22%, between 15% and 22%, between 15% and 21%, between 16% and 21%, between 16% and 20%, or between 17% and 20%.

[1719] In some embodiments, the uracil or thymine content (% U_{TL} or % T_{TL}) of a uracil-or thymine-modified sequence encoding an IL18 polypeptide of the disclosure is between 15% and 22%, between 16% and 21%, between 15% and 20%, between 16% and 20%, between 15% and 21%, between 16% and 21%, between 17% and 21%, or between 17% and 20%.

[1720] In a particular embodiment, the uracil or thymine content (% U_{TL} or % T_{TL}) of a uracil- or thymine modified sequence encoding an IL18 polypeptide of the disclosure is between about 17% and about 20%.

[1721] A uracil- or thymine-modified sequence encoding an IL18 polypeptide of the disclosure can also be described according to its uracil or thymine content relative to the uracil or thymine content in the corresponding wild-type nucleic acid sequence (% U_{WT} or % T_{WT}), or according to its uracil or thymine content relative to the theoretical minimum uracil or thymine content of a nucleic acid encoding the wild-type protein sequence (% U_{TM} or (% T_{TM}).

[1722] In some embodiments, the % U_{WT} or % T_{WT} of a uracil- or thymine-modified sequence encoding an IL18 polypeptide of the disclosure is above 50%, above 55%, above 60%, or above 65%. In some embodiments, the % U_{WT} or % T_{WT} of a uracil- or thymine-modified sequence encoding an IL18 polypeptide of the disclosure is less than about 95%, less than about 90%, less than about 85%, less than 80%, less than 75%, less than 70%, or less than 66%.

[1723] In some embodiments, the % U_{WT} or % T_{WT} of a uracil- or thymine modified sequence encoding an IL18 polypeptide of the disclosure is between 50% and 80%, between 51% and 79%, between 52% and 78%, between 53% and 77%, between 54% and 76%, between 55% and 75%, between 56% and 74%, between 57% and 73%, between 58% and 72%, between 59% and 71%, between 59% and 70%, or between 60% and 69%.

[1724] In some embodiments, the % U_{WT} or % T_{WT} of a uracil- or thymine-modified sequence encoding an IL18 polypeptide of the disclosure is between 58% and 71%, between 58% and 72%, between 58% and 70%, between 59% and 70%, between 59% and 71%, between 59% and 72%, between 60% and 69%, between 60% and 70%, between 60% and 71%, between 60% and 72%, or between 60% and 69%.

[1725] In a particular embodiment, the % U_{WT} or % T_{WT} of a uracil- or thymine-modified sequence encoding an IL18 polypeptide of the disclosure is between about 50% and about 70%, or between about 55% and about 66%.

[1726] In some embodiments, the % U_{WT} or % T_{WT} of a uracil- or thymine modified sequence encoding an IL18 polypeptide of the disclosure is between 50% and 80%, between 51% and 79%, between 52% and 78%, between 53% and 77%, between 54% and 76%, between 55% and 75%, between 56% and 74%, between 57% and 73%, between 57% and 72%, between 57% and 71%, between 57% and 70%, between 57% and 69%, between 57% and 68%, or between 57% and 67%.

[1727] In some embodiments, the % U_{WT} or % T_{WT} of a uracil- or thymine-modified sequence encoding an IL18 polypeptide of the disclosure is between 55% and 69%, between 55% and 68%, between 55% and 67%, between 56% and 69%, between 56% and 68%, between 56% and 67%, between 55% and 69%, between 55% and 68%, between 55% and 67%, or between 57% and 67%.

[1728] In a particular embodiment, the % U_{WT} or % T_{WT} of a uracil- or thymine-modified sequence encoding an IL18 polypeptide of the disclosure is between about 57% and about 67%.

[1729] For DNA it is recognized that thymine is present instead of uracil, and one would substitute T where U appears. Thus, all the disclosures related to, e.g., % U_{TM}, % U_{WT}, or % U_{TL}, with respect to RNA are equally applicable to % T_{TM}, % T_{WT}, or % T_{TL} with respect to DNA.

[1730] In some embodiments, the % U_{TM} of a uracil-modified sequence encoding an IL18 polypeptide of the disclosure is below 300%, below 295%, below 290%, below 285%, below 280%, below 275%, below 270%, below 265%, below 260%, below 255%, below 250%, below 245%, below 240%, below 235%, below 230%, below 225%, below 220%, below 215%, below 200%, below 195%, below 190%, below 185%, below 180%, below 175%, below 170%, below 165%, below 160%, below 155%, below 150%, below 145%, below 140%, below 139%, below 138%, below 137%, below 136%, below 135%, below 134%, below 133%, below 132%, below 131%, below 130%, below 129%, below 128%, below 127%, below 126%, below 125%, below 124%, below 123%, below 122%, below 121%, or below 120%.

[1731] In some embodiments, the % U_{TM} of a uracil-modified sequence encoding an IL18 polypeptide of the disclosure is above 100%, above 101%, above 102%, above 103%, above 104%, above 105%, above 106%, above 107%, above 108%, above 109%, above 110%, above 111%, above 112%, above 113%, above 114%, above 115%, above 116%, above 117%, above 118%, above 119%, above 120%, above 121%, above 122%, above 123%, above 124%, above 125%, or above 126%, above 127%, above 128%, above 129%, above 130%, above 131%, above 132%, above 133%, above 134%, above 135%, above 136%, above 137%, above 138%, above 139%, above 140%, above 141%, above 142%, above 143%, above 144%, or above 145%.

[1732] In some embodiments, the % U_{TM} of a uracil-modified sequence encoding an IL18 polypeptide of the disclosure is between 133% and 136%, between 132% and 137%, between 131% and 138%, between 130% and 139%, between 129% and 140%, between 128% and 141%, between 127% and 142%, between 126% and 143%, between 125% and 144%, between 124% and 145%, between 123% and 146%, between 122% and 147%, or between 121% and 148%.

[1733] In some embodiments, the % U_{TM} of a uracil-modified sequence encoding an IL18 polypeptide of the disclosure is between about 115% and about 160%, between about 120% and about 160%, between about 125% and about 160%, between about 115% and about 155%, between about 120% and about 155%, between about 125% and about 155%, between about 115% and about 150%, between about 120% and about 150%, or between about 125% and about 150%.

[1734] In some embodiments, the % U_{TM} of a uracil-modified sequence encoding an IL18 polypeptide of the disclosure is between (i) 118%, 119%, 120%, 121%, 122%, 123%, 124%, or 125% and (ii) 139%, 140%, 141%, 142%, 143%, 144%, 145%, or 146%.

[1735] In some embodiments, the % U_{TM} of a uracil-modified sequence encoding an IL18 polypeptide of the disclosure is between about 127% and about 146%.

[1736] In some embodiments, the % U_{TM} of a uracil-modified sequence encoding an IL18 polypeptide of the disclosure is between about 123% and about 144%.

[1737] In some embodiments, a uracil-modified sequence encoding an IL18polypeptide of the disclosure has a reduced number of consecutive uracils with respect to the corresponding wild-type nucleic acid sequence. For example, two consecutive leucines can be encoded by the sequence CUUUUG, which includes a four uracil cluster. Such a subsequence can be substituted, e.g., with CUGCUC, which removes the uracil cluster.

[1738] As discussed above, the number of phenylalanines in a sequence establishes a minimum number of uracil pairs (UU) that cannot be eliminated without altering the number of phenylalanines in the encoded polypeptide.

[1739] tPA IL18 wt (e.g., SEQ ID NO: 573) contains 16 uracil pairs (UU), and 11 uracil triplets (UUU). IL2sp IL18 wt (e.g., SEQ ID NO: 575) contains 19 uracil pairs (UU), and 10 uracil triplets (UUU). In some embodiments, a uracil-modified sequence encoding an IL18 polypeptide of the disclosure has a reduced number of uracil triplets (UUU) with respect to the wild-type nucleic acid sequence. In some embodiments, a uracil-modified sequence encoding an IL18 polypeptide of the disclosure contains 8, 7, 6, 5, 4, 3, 2, 1 or no uracil triplets (UUU).

[1740] In some embodiments, a uracil-modified sequence encoding an IL18 polypeptide has a reduced number of uracil pairs (UU) with respect to the number of uracil pairs (UU) in the wild-type nucleic acid sequence. In some embodiments, a uracil-modified sequence encoding an IL18 polypeptide of the disclosure has a number of uracil pairs (UU) corresponding to the minimum possible number of uracil pairs (UU) in the wild-type nucleic acid sequence, e.g., 35 uracil pairs in the case of wild type IL18 (e.g., SEQ ID NO: 565).

[1741] In some embodiments, a uracil-modified sequence encoding an IL18 polypeptide of the disclosure has at least 1, 2, 3, 4, 5, 6, 7, 8, 9, 10, 11, or 12 uracil pairs (UU) less than the number of uracil pairs (UU) in the wild-type nucleic acid sequence. In some embodiments, a uracil-modified sequence encoding an IL18 polypeptide of the disclosure has between 10 and 19 uracil pairs (UU). In some embodiments, a uracil-modified sequence encoding an IL18 polypeptide of the disclosure has between 7 and 16 uracil pairs (UU).

[1742] In some embodiments, a uracil-modified sequence encoding an IL18 polypeptide of the disclosure has a % UU_{wt} less than 120%, less than 115%, less than 110%, less than 105%, less than 100%, less than 99%, less than 95%, less than 90%, less than 85%, less than 80%, less than 75%, less than 70%, less than 65%, less than 60%, less than 65%, less than 60%, less than 55%, less than 50%, less than 40%, less than 30%, or less than 20%.

[1743] In some embodiments, a uracil-modified sequence encoding an IL18 polypeptide has a % UU_{Wt} between 62% and 119%. In a particular embodiment, a uracil-modified sequence encoding an IL18 polypeptide of the disclosure has a % UU_{wt} between 62% and 119%.

[1744] In some embodiments, a uracil-modified sequence encoding an IL18 polypeptide has a % UU_{wt} between 36% and 85%. In a particular embodiment, a uracil-modified sequence encoding an IL18 polypeptide of the disclosure has a % UU_{wt} between 36% and 85%.

[1745] In some embodiments, the polynucleotide of the disclosure comprises a uracil-modified sequence encoding an IL18 polypeptide disclosed herein. In some embodiments, the uracil-modified sequence encoding an IL18 polypeptide comprises at least one chemically modified nucleobase, e.g., 5-methoxyuracil. In some embodiments, at least 95% of a nucleobase (e.g., uracil) in a uracil-modified sequence encoding an IL18 polypeptide of the disclosure are modified nucleobases. In some embodiments, at least 95% of uracil in a uracil-modified sequence encoding an IL18 polypeptide is 5-methoxyuracil. In some embodiments, the polynucleotide comprising a uracil-modified sequence further comprises a miRNA binding site, e.g., a miRNA binding site that binds to miR-122. In some embodiments, the polynucleotide comprising a uracil-modified sequence is formulated with a delivery agent, e.g., a compound having Formula (I), e.g., any of Compounds 1-147.

[1746] In some embodiments, the “guanine content of the sequence optimized ORF encoding IL18 with respect to the theoretical maximum guanine content of a nucleotide sequence encoding the IL18 polypeptide,” abbreviated as % G_{TMX} is at least 69%, at least 70%, at least 71%, at least 75%, at least about 80%, at least about 85%, at least about 90%, at least about 95%, or about 100%. In some embodiments, the % G_{TMX} is between about 65% and about 85%, between about 67% and about 83%, between about 69% and about 81%, or between about 71% and about 80%. In some embodiments, the % G_{TMX} is less than 100%, less than about 90%, less than about 85%, or less than about 83%. In some embodiments, the % G_{TMX} is between about 65% and about 87%, between about 69% and about 85%, or between about 71% and about 83%.

[1747] In some embodiments, the “cytosine content of the ORF relative to the theoretical maximum cytosine content of a nucleotide sequence encoding the IL18 polypeptide,” abbreviated as % C_{TMX}, is at least 60%, at least about 65%, at least about 70%, at least about 75%, at least about 80%, at least about 85%, at least about 90%, at least about 95%, or about 100%. In some embodiments, the % C_{TMX} is between about 60% and about 85%, between about 65% and about 82%, between about 69% and about 78%, or between about 69% and about 80%. In some embodiments, the % C_{TMX} is less than 95%, less than 90%, or less than 85%. In some embodiments, is between about 60% and about 85%, between about 65% and about 83%, or between about 67% and about 81%.

[1748] In some embodiments, the “guanine and cytosine content (G/C) of the ORF relative to the theoretical maximum G/C content in a nucleotide sequence encoding the IL18 polypeptide,” abbreviated as % G/C_{TMX} is at least about 85%,at least about 89% at least about 90%, at least about 95%, or about 100%. In some embodiments, the % G/C_{TMX} is between about 80% and about 100%, between about 85% and about 99%, between about 89% and about 95%, or between about 89% and about 94%. In some embodiments, the % G/C_{TMX} is less than 100%, less than 99%, less than 98%, less than 97%, less than 96%, or less than 95%. In some embodiments, the % G/C_{TMX} is between about 87% and about 96% or between about 88% and about 95%.

[1749] In some embodiments, the “G/C content in the ORF relative to the G/C content in the corresponding wild-type ORF,” abbreviated as % G/C_{WT} is at least 100%, at least 102%, at least 103%, at least 104%, at least 105%, at least 106%, at least 107%, at least 110%, at least 115%, or at least 120%, at least 125%, at least 130%, at least 135%, at least 140%, at least 145%, at least 150%, at least 155%, or at least 157%.

[1750] In some embodiments, the average G/C content in the 3rd codon position in the ORF is at least 20%, at least 21%, at least 22%, at least 23%, at least 24%, at least 25%, at least 26%, at least 27%, at least 28%, at least 29%, at least 30%, at least 35%, at least 40%, at least 45%, or at least 50% higher than the average G/C content in the 3rd codon position in the corresponding wild-type ORF.

[1751] In some embodiments, the average G/C content in the 3rd codon position in the ORF is at least 45%, at least 46%, at least 47%, at least 48%, at least 49%, at least 50%, at least 51%, at least 52%, at least 53%, at least 54%, at least 55%, at least 56%, at least 57%, or at least 58% higher than the average G/C content in the 3^{rd} codon position in the corresponding wild type IL18 ORF.

[1752] In some embodiments, the IL18 polynucleotide of the disclosure comprises an open reading frame (ORF) encoding an IL18 polypeptide, wherein the ORF has been sequence optimized, and wherein each of % U_{TL}, % U_{WT}, % U_{TM}, % G_{TL}, % G_{WT}, % G_{TMX}, % C_{TL}, % C_{WT}, % C_{TMX}, % G/C_{TL}, % G/C_{WT}, or % G/C_{TMX}, alone or in a combination thereof is in a range between (i) a maximum corresponding to the parameter's maximum value (MAX) plus about 0.5, 1, 1.5, 2, 2.5, 3, 3.5, 4, 4.5, 5, 5.5, 6, 6.5, 7, 7.5, 8, 8.5, 9, 9.5, or 10 standard deviations (STD DEV), and (ii) a minimum corresponding to the parameter's minimum value (MIN) less 0.5, 1, 1.5, 2, 2.5, 3, 3.5, 4, 4.5, 5, 5.5, 6, 6.5, 7, 7.5, 8, 8.5, 9, 9.5, or 10 standard deviations (STD DEV).

[1753] Modified Nucleotide Sequences Encoding IL18 Polypeptides: In some embodiments, the IL18 polynucleotide (e.g., a RNA, e.g., a mRNA) comprises a chemically modified nucleobase, e.g., 5-methoxyuracil. In some embodiments, the mRNA is a uracil-modified sequence comprising an ORF encoding an IL18 polypeptide, wherein the mRNA comprises a chemically modified nucleobase, e.g., 5-methoxyuracil.

[1754] In certain aspects of the present disclosure, when the 5-methoxyuracil base is connected to a ribose sugar, as it is in polynucleotides, the resulting modified nucleoside or nucleotide is referred to as 5-methoxyuridine. In some embodiments, uracil in the IL18 polynucleotide is at least about 25%, at least about 30%, at least about 40%, at least about 50%, at least about 60%, at least about 70%, at least about 80%, at least 90%, at least 95%, at least 99%, or about 100% 5-methoxyuracil. In one embodiment, uracil in the IL18 polynucleotide is at least 95% 5-methoxyuracil. In another embodiment, uracil in the polynucleotide is 100% 5-methoxyuracil.

[1755] In embodiments where uracil in the IL18 polynucleotide is at least 95% 5-methoxyuracil, overall uracil content can be adjusted such that an mRNA provides suitable protein expression levels while inducing little to no immune response. In some embodiments, the uracil content of the ORF is between about 105% and about 145%, about 105% and about 140%, about 110% and about 140%, about 110% and about 145%, about 115% and about 135%, about 105% and about 135%, about 110% and about 135%, about 115% and about 145%, or about 115% and about 140% of the theoretical minimum uracil content in the corresponding wild-type ORF (% U_{TM}). In other embodiments, the uracil content of the ORF is between about 117% and about 134% or between 118% and 132% of the % U_{TM}. In some embodiments, the uracil content of the ORF encoding an IL18 polypeptide is about 115%, about 120%, about 125%, about 130%, about 135%, about 140%, about 145%, or about 150% of the % U_{TM}. In this context, the term “uracil” can refer to 5-methoxyuracil and/or naturally occurring uracil.

[1756] In some embodiments, the uracil content in the ORF of the mRNA encoding an IL18 polypeptide disclosed herein is less than about 50%, about 40%, about 30%, or about 20% of the total nucleobase content in the ORF. In some embodiments, the uracil content in the ORF is between about 15% and about 25% of the total nucleobase content in the ORF. In other embodiments, the uracil content in the ORF is between about 18% and about 21% of the total nucleobase content in the ORF. In one embodiment, the uracil content in the ORF of the mRNA encoding an IL18 polypeptide is less than about 21% of the total nucleobase content in the open reading frame. In this context, the term “uracil” can refer to 5-methoxyuracil and/or naturally occurring uracil.

[1757] In further embodiments, the ORF of the mRNA encoding an IL18 polypeptide having 5-methoxyuracil and adjusted uracil content has increased Cytosine (C), Guanine (G), or Guanine/Cytosine (G/C) content (absolute or relative). In some embodiments, the overall increase in C, G, or G/C content (absolute or relative) of the ORF is at least about 2%, at least about 3%, at least about 4%, at least about 5%, at least about 6%, at least about 7%, at least about 10%, at least about 15%, at least about 20%, at least about 40%, at least about 50%, at least about 60%, at least about 70%, at least about 80%, at least about 90%, at least about 95%, or at least about 100% relative to the G/C content (absolute or relative) of the wild-type ORF. In some embodiments, the G, the C, or the G/C content in the ORF is less than about 100%, less than about 90%, less than about 85%, or less than about 80% of the theoretical maximum G, C, or G/C content of the corresponding wild type nucleotide sequence encoding the PBDG polypeptide (% G_{TMX}; % C_{TMX}, or % G/C_{TMX}).

[1758] In other embodiments, the G, the C, or the G/C content in the ORF is between about 70% and about 80%, between about 71% and about 79%, between about 71% and about 78%, between about 71% and about 77%, or between about 90% and about 95% of the % G_{TMX}, % C_{TMX}, or % G/C_{TMX}. In some embodiments, the increases in G and/or C content (absolute or relative) described herein can be conducted by replacing synonymous codons with low G, C, or G/C content with synonymous codons having higher G, C, or G/C content. In other embodiments, the increase in G and/or C content (absolute or relative) is conducted by replacing a codon ending with U with a synonymous codon ending with G or C.

[1759] In further embodiments, the ORF of the mRNA encoding an IL18 polypeptide disclosed herein comprises 5-methoxyuracil and has an adjusted uracil content containing less uracil pairs (UU) and/or uracil triplets (UUU) and/or uracil quadruplets (UUUU) than the corresponding wild-type nucleotide sequence encoding the IL18 polypeptide. In some embodiments, the ORF of the mRNA encoding an IL18 polypeptide of the disclosure contains no uracil pairs and/or uracil triplets and/or uracil quadruplets. In some embodiments, uracil pairs and/or uracil triplets and/or uracil quadruplets are reduced below a certain threshold, e.g., no more than 1, 2, 3, 4, 5, 6, 7, 8, 9, 10, 11, 12, 13, 14, 15, 16, 17, 18, 19, or 20 occurrences in the ORF of the mRNA encoding the IL18 polypeptide. In a particular embodiment, the ORF of the mRNA encoding the IL18 polypeptide of the disclosure contains less than 20, 19, 18, 17, 16, 15, 14, 13, 12, 11, 10, 9, 8, 7, 6, 5, 4, 3, 2, or 1 non-phenylalanine uracil pairs and/or triplets. In another embodiment, the ORF of the mRNA encoding the IL18 polypeptide contains no non-phenylalanine uracil pairs and/or triplets.

[1760] In further embodiments, the ORF of the mRNA encoding an IL18 polypeptide of the disclosure comprises 5-methoxyuracil and has an adjusted uracil content containing less uracil-rich clusters than the corresponding wild-type nucleotide sequence encoding the IL18 polypeptide. In some embodiments, the ORF of the mRNA encoding the IL18 polypeptide of the disclosure contains uracil-rich clusters that are shorter in length than corresponding uracil-rich clusters in the corresponding wild-type nucleotide sequence encoding the IL18 polypeptide.

[1761] Polynucleotide comprising an mRNA encoding an IL18 polypeptide: In certain embodiments, an IL18 polynucleotide of the present disclosure, for example an IL18 polynucleotide comprising an mRNA nucleotide sequence encoding an IL18 polypeptide, comprises from 5′ to 3′ end:
[1762] (i) a 5′ UTR, such as the sequences provided below, comprising a 5′ cap provided below;
[1763] (ii) an open reading frame encoding an IL18 polypeptide, e.g., a sequence optimized nucleic acid sequence encoding IL18 disclosed herein;
[1764] (iii) at least one stop codon;
[1765] (iv) a 3′ UTR, such as the sequences provided below; and
[1766] (v) a poly-A tail provided below.

[1767] In some embodiments, the IL18 polynucleotide further comprises a miRNA binding site, e.g, a miRNA binding site that binds to miRNA-122. In some embodiments, the 3′UTR comprises the miRNA binding site.

[1768] In some embodiments, a IL18 polynucleotide of the present disclosure comprises a nucleotide sequence encoding a polypeptide sequence at least 70%, at least 80%, at least 81%, at least 82%, at least 83%, at least 84%, at least 85%, at least 86%, at least 87%, at least 88%, at least 89%, at least 90%, at least 91%, at least 92%, at least 93%, at least 94%, at least 95%, at least 96%, at least 97%, at least 98%, at least 99%, or 100% identical to the protein sequence of a wild type IL18 (e.g, isoform 1, 2, 3, or 4).

[1769] IL18 Compositions and Formulations for Use: Certain aspects of the present disclosure are directed to compositions or formulations comprising any of the IL18 polynucleotides disclosed above. In some embodiments, the composition or formulation comprises:
[1770] (i) an IL18 polynucleotide (e.g., a RNA, e.g., a mRNA) comprising a sequence-optimized nucleotide sequence (e.g., an ORF) encoding an IL18 polypeptide (e.g., the wild-type sequence, functional fragment, or variant thereof), wherein the polynucleotide comprises at least one chemically modified nucleobase, e.g., 5-methoxyuracil (e.g., wherein at least about 25%, at least about 30%, at least about 40%, at least about 50%, at least about 60%, at least about 70%, at least about 80%, at least about 90%, at least about 95%, at least about 99%, or 100% of the uracils are 5-methoxyuracils), and wherein the IL18 polynucleotide further comprises a miRNA binding site, e.g., a miRNA binding site that binds to miR-122 (e.g., a miR-122-3p or miR-122-5p binding site); and
[1771] (ii) a delivery agent comprising a compound having Formula (I), e.g., any of Compounds 1-147 (e.g., Compound 18, 25, 26 or 48).

[1772] In some embodiments, the uracil or thymine content of the ORF relative to the theoretical minimum uracil or thymine content of a nucleotide sequence encoding the IL18 polypeptide (% U_{TM} or % T_{TM}), is between about 100% and about 150%. In some embodiments, the polynucleotides, compositions or formulations above are used to treat a cancer.

[1773] E. Interleukin-15 (IL15)

[1774] In some embodiments, the combination therapies disclosed herein comprise one or more IL15 polynucleotides (e.g., mRNAs), i.e., polynucleotides comprising one or more ORFs encoding an IL15 polypeptide.

[1775] Interleukin 15 (“IL15”) IL15 is a member of the 4u-helix bundle family of cytokines and plays an important role in the development of an effective immune response. Waldmann, T. A., Cancer Immunol. Res. 3: 219-227 (2015). IL15 is essential for the proper development of NK cells and long-term maintenance of memory CD8+ T cells. The IL15 gene encodes a 162 amino acid preprotein having a signal peptide of 48 amino acids, with the mature protein being 114 amino acids in length. Bamford, R. N., et al., Proc. Natl. Acad. Sci. USA 93: 2897-2902 (1996). See also, e.g., GenBank Accession Numbers NM_000585 for the Homo sapiens IL15 transcript variant 3 mRNA sequence and NP_000576 for the corresponding IL15 isoform 1 preproprotein.

[1776] IL15 shares certain structural similarity to interleukin-2 (IL2). Like IL2, IL15 signals through the IL2 receptor beta chain (CD122) and the common gamma chain (CD132). But, unlike IL2, IL15 cannot effectively bind CD122 and CD132 on its own. IL15 must first bind to the IL15 alpha receptor subunit (“IL15Ra”).

[1777] The IL15Rα gene encodes a 267 amino acid preprotein having a signal peptide of 30 amino acids, with the mature protein being 237 amino acids in length. See, e.g., GenBank Accession Numbers NM_002189 for the Homo sapiens IL15Ru transcript variant 1 mRNA and NP_002180 for the Homo sapiens IL15Rα isoform 1 precursor amino acid sequence.

[1778] Wild-type IL15Rα is predominantly a transmembrane protein that binds to IL15 on the surface of cells such as activated dendritic cells and monocytes. Waldmann, T. A., Cancer Immunol. Res. 3: 219-227 (2015). The membrane bound complex of IL15/IL15Rα then presents IL15 in trans to CD122 and CD132 subunits located on the surface of cells such as natural killer (NK) and CD8+ memory T cells. Binding of IL15 to CD122 and CD132 activates signal transduction. Accordingly, IL15Rα is an essential component of IL15 activity. Studies have shown that the biological activity of soluble IL15 can be improved in the presence of a soluble form of IL15Ra. Rubinstein, M. P., et al., Proc. Natl. Acad. Sci. USA 103:9166-9171 (2006).

[1779] In some embodiments, the combination therapies disclosed herein comprise an IL15 polynucleotide, i.e., a polynucleotide comprising a nucleic acid sequence (e.g., an ORF) encoding an IL15 polypeptide. In some embodiments, the IL15 polynucleotide encodes an IL15Rα polypeptide. In some embodiments, the IL15 polynucleotide, e.g., a ribonucleic acid (RNA) such as a messenger RNA (mRNA) comprises a nucleotide sequence (e.g., an ORF) encoding an fusion protein comprising an IL15 polypeptide (e.g., an IL15-IL15Rα fusion protein).

[1780] In other embodiments, the combination therapies disclosed herein can comprise two or more IL15 polynucleotides (e.g., RNA, e.g., mRNA), wherein a first IL15 polynucleotide encodes an IL15 polypeptide, and a second IL15 polynucleotide encodes an IL15Rα polypeptide. In certain embodiments, the combination therapies disclosed herein comprise an IL15 polynucleotide, e.g., an RNA, comprising a nucleotide sequence encoding both an IL15 polypeptide and an IL15Rα polypeptide, wherein the IL15 and the IL15a polypeptides are fused directly or by a linker.

[1781] In some embodiments, the IL15 polypeptide and/or IL15Rα polypeptide encoded by the IL15 polynucleotide is a variant, a peptide or a polypeptide containing a substitution, and insertion and/or an addition, a deletion and/or a covalent modification with respect to a wild-type IL15 and/or IL15Rα sequence.

[1782] In the context of the present disclosure, the term “IL15 polypeptide” refers to polypeptides comprising a mature IL15 polypeptide (i.e., without its signal peptide and propeptide). The “IL15 polypeptide” can include a signal peptide and/or propeptide. Also, the IL15 polypeptide can include other components, e.g., an IL15Rα polypeptide. Thus, a chimeric polypeptide comprising a IL15 moiety and a IL15Rα moiety is considered an IL15 polypeptide in the context of the present disclosure.

[1783] The term “IL15Rα polypeptide” as used herein includes at least a Sushi domain of a full-length IL15Rα polypeptide, without a signal peptide. In some embodiments, the “IL15Rα polypeptide” comprises the extracellular domain of the full-length IL15Rα polypeptide. In other embodiments, the “IL15Rα polypeptide” can comprise the transmembrane region and/or cytoplasmic region of the full-length IL15Rα polypeptide. In some embodiments, sequence tags or amino acids, can be added to the sequences encoded by the polynucleotides of the disclosure (e.g., at the N-terminal or C-terminal ends), e.g., for localization. In some embodiments, amino acid residues located at the carboxy, amino terminal, or internal regions of a polypeptide of the disclosure can optionally be deleted providing for fragments.

[1784] In some embodiments, the IL15 and/or IL1R5α polypeptide encoded by the IL15 polynucleotide (e.g., a RNA, e.g., an mRNA) comprises a substitutional variant of an IL15 and/or IL15Rα sequence, which can comprise one, two, three or more than three substitutions. In some embodiments, the substitutional variant can comprise one or more conservative amino acids substitutions. In other embodiments, the variant is an insertional variant. In other embodiments, the variant is a deletional variant.

[1785] In other embodiments, the IL15 and/or IL15Rα polypeptide encoded the IL15 polynucleotide (e.g., a RNA, e.g., an mRNA) comprises a linker fusing the IL15Rα and IL15 polypeptides. Non-limiting examples of linkers are disclosed elsewhere herein. As recognized by those skilled in the art, IL15 and/or IL15Rα protein fragments, functional protein domains, variants, and homologous proteins (orthologs) are also considered to be within the scope of the IL15 and/or IL15Rα polypeptides disclosed herein.

[1786] Nonlimiting examples of polypeptides encoded by the IL15 polynucleotides of the disclosure are shown in TABLE 9.

TABLE 9

| SEQ | | | |
|---|---|---|---|
| ID NO | Description | Sequence | Comments |
| 808 | Full Length IL15R | MAPRRARGCRTLGLPALLLLLLLRPPATRGITCPPPMSVEHADIWV | Signal peptide is |
| | Amino Acid | KSYSLYSRERYICNSGFKRKAGTSSLTECVLNKATNVAHWTTPSLK | italicized, The |
| | Sequence (Wild | CIRDPALVHQRPAPPSTVTTAGVTPQPESLSPSGKEPAASSPSSNN | sushi domain of |
| | Type) | TAATTAAIVPGSQLMPSKSPSTGTTEISSHESSHGTPSQTTAKNWE | the wild-type |
| | | LTASASHQPPGVYPQGHSDTTVAISTSTVLLCGLSAVSLLACYLKS | IL15Ra is double |
| | | RQTPPLASVE MEAMEALPVTWGTSSRDEDLENCSHHL | underlined. |
| 809 | Full-Length IL15R | ATGGCTCCCCGCCGCGCGCGAGGCTGTCGCACCCTCGGACTTCCTG | Signal peptide is |
| | Nucleotide Sequence | CACTCTTGCTTTTGCTCCTCCTTAGACCCCCTGCAACCAGAGGGAT | italicized, The |
| | | AACCTGTCCACCTCCAATGAGCGTCGAGCACGCAGACATTTGGGTG | sushi domain of |
| | | AAATCATACAGTCTGTACAGTAGAGAGCGGTACATCTGCAACAGTG | the wild-type |
| | | GGTTTAAAAGAAAAGCAGGCACTTCATCTCTGACAGAGTGCGTGCT | IL15Ra is double |
| | | GAACAAAGCAACTAATGTAGCTCATTGGACAACCCCATCACTGAAA | underlined. |
| | | TGCATTAGAGATCCAGCTCTGGTGCATCAAAGACCAGCACCACCAA | |
| | | GTACCGTAACAACCGCAGGGGTGACCCCTCAGCCTGAGTCCCTATC | |
| | | TCCCTCCGGCAAGGAGCCAGCAGCATCTTCACCTAGCTCCAATAAC | |
| | | ACCGCAGCTACCACTGCCGCCATAGTCCCCGGAAGCCAGCTGATGC | |
| | | CTAGTAAATCTCCCTCAACAGGTACCACCGAAATTTCTAGCCATGA | |
| | | GTCCTCGCACGGCACCCCGTCACAGACTACAGCTAAAAACTGGGAG | |
| | | CTAACGGCTTCGGCATCCCACCAACCTCCAGGCGTTTATCCCCAAG | |
| | | GTCACTCCGACACTACTGTGGCGATTAGCACAAGTACCGTCCTTCT | |
| | | GTGTGGACTGAGTGCAGTTTCATTGCTGGCCTGTTATCTGAAATCT | |
| | | CGCCAGACCCCTCCCCTCGCCAGTGTTGAGATGGAAGCCATGGAAG | |
| | | CACTTCCTGTGACTTGGGGAACATCCTCGAGGGACGAGGACCTCGA | |
| | | GAACTGCTCTCACCACCTG | |
| 810 | Full-Length IL15 | [chemical structure] | The Signal peptide |
| | Amino Acid | [chemical structure] | is italicized. The |
| | Sequence (Wild | [chemical structure] | propeptide is solid |
| | Type) | [chemical structure] | line underlined. |
| | | | Mature IL15 is dot |
| | | | underlined. |
| 811 | Full-length IL15 | ATGCGCATCAGCAAACCTCATTTACGGAGTATCAGCATCCAGTGCT | |
| | Nucleotide Sequence | ATCTCTGCCTGCTTCTGAACAGTCATTTTCTGACTGAGGCGGGCAT | |
| | (Wild Type) | TCATGTCTTTATTTTAGGCTGCTTTTCCGCAGGTCTGCCCAAAACA | |
| | | GAAGCAAATTGGGTGAACGTGATCAGCGACCTGAAGAAGATTGAGG | |
| | | ATCTAATTCAAAGCATGCATATTGATGCCACACTCTACACCGAATC | |
| | | CGACGTGCACCCTTCGTGTAAAGTGACTGCAATGAAGTGTTTCTTA | |
| | | CTGGAACTGCAGGTGATCAGTCTGGAGTCCGGGGATGCATCAATCC | |
| | | ACGACACAGTGGAAAACCTGATTATCCTGGCAAACAATTCCCTGAG | |
| | | CAGTAATGGCAATGTCACGGAGAGCGGATGTAAGGAGTGTGAGGAA | |
| | | TTAGAGGAAAAGAATATCAAGGAATTCCTTCAGTCCTTTGTGCACA | |
| | | TCGTACAGATGTTTATTAATACATCC | |
| 812 | tPA-IL15 Amino acid | [chemical structure] | Signal peptide and |
| | Sequence | [chemical structure] | propeptide from |
| | | [chemical structure] | tPA is italicized; |
| | | [chemical structure] | the mature IL15 |
| | | | peptide has a |
| | | | dotted underline |
| 813 | Full Fc-IL15R- | METDTLLLWVLLLWVPGSTGEPKSCDKTHTCPPCPAPELLGGPSVF | The signal peptide |
| | Linker-IL15 Amino | LFPPKPKDTLMISRTPEVTCVVVAVSHEDPEVKFNWYVDGVEVHNA | is italicized and the |
| | acid Sequence | KTKPREEQYNSTYRVVSVLTVLHQDWLNGKEYKCKVSNKALPAPIE | mature IL15 is |
| | | KTISKAKGQPREPQVYTLPPSRDELTKNQVSLTCLVKGFYPSDIAV | represented by a |
| | | EWESNGQPENNYKTTPPVLDSDGSFFLYSKLTVDKSRWQQGNVFSC | dotted underline. |
| | | SVMHEALHNHYTQKSLSLSPGKITCPPPMSVEHADIWVKSYSLYSR | |
| | | ERYICNSGFKRKAGTSSLTECVLNKATNVAHWTTPSLKCIRDPALV | |
| | | [chemical structure] | |
| | | [chemical structure] | |
| | | [chemical structure] | |
| | | [chemical structure] | |

[1787] IL15 Polynucleotides and Open Reading Frames (ORFs): In some aspects of the present disclosure, the combination therapies disclosed herein comprise an IL15 polynucleotide (e.g., a RNA, e.g., an mRNA) that comprises a nucleotide sequence (e.g., an ORF) encoding an IL15 polypeptide, an IL15Rα polypeptide, or a combination thereof.

[1788] In some embodiments, the IL15 polynucleotide (e.g., a RNA, e.g., an mRNA) comprises a nucleotide sequence (e.g., an ORF) encoding an IL15 polypeptide. In some embodiments, the IL15 polynucleotide (e.g., a RNA, e.g., an mRNA) comprises a nucleotide sequence (e.g., an ORF) encoding an IL15Rα polypeptide.

[1789] In some embodiments, the IL15 polynucleotide (e.g., a RNA, e.g., an mRNA) comprises a nucleotide sequence that encodes a fusion protein comprising an IL15 polypeptide and an IL15Rα polypeptide comprising or consisting of a Sushi domain, which are fused directly or by a linker, wherein
[1790] (a) the IL15 polypeptide is selected from:
   [1791] (i) the mature IL15 polypeptide (e.g., having the same or essentially the same length as wild-type IL15) with or without a signal peptide;
   [1792] (ii) a functional fragment of the IL15 polypeptide, e.g., a truncated (e.g., deletion of carboxy, amino terminal, or internal regions) sequence shorter than a wild-type IL15, but still retaining IL15 activity;
   [1793] (iii) a variant thereof, e.g., full length, mature, or truncated IL15 proteins in which one or more amino acids have been replaced (e.g., variants that retain all or most of the IL15 activity of the polypeptide with respect to the wild-type IL15 polypeptide); or,
   [1794] (iv) a fusion protein comprising (i) a mature IL15 wild-type, a functional fragment or a variant thereof, with or without a signal peptide and (ii) a heterologous protein (e.g., tPA-IL15); and/or,
[1795] (b) the IL15Rα polypeptide is selected from:
   [1796] (i) the full-length IL15Rα polypeptide (e.g., having the same or essentially the same length as wild-type IL15Ru);
   [1797] (ii) a functional fragment of the full-length IL15Rα polypeptide, e.g., a truncated (e.g., deletion of carboxy, amino terminal, or internal regions) sequence shorter than an IL15Rα wild-type (e.g, a Sushi domain); but still retaining IL15Rα activity;
   [1798] (iii) a variant thereof, e.g., full length or truncated IL15Rα polypeptide in which one or more amino acids have been replaced, e.g., variants that retain all or most of the IL15Rα activity of the polypeptide with respect to the wild-type IL15Rα polypeptide (such as natural or artificial variants known in the art); or,
   [1799] (iv) a fusion protein comprising (i) a full length IL15Rα wild-type, a functional fragment or a variant thereof, and (ii) a heterologous protein.

[1800] In other embodiments, the IL15 polynucleotide (e.g., a RNA, e.g., an mRNA) encodes two polypeptide chains, the first chain comprising an IL15 polypeptide and the second chain comprising an IL15Rα polypeptide, wherein
[1801] (a) the IL15 polypeptide is selected from:
   [1802] (i) the full-length IL15 polypeptide (e.g., having the same or essentially the same length as wild-type IL15);
   [1803] (ii) a functional fragment of any of the full-length IL15 polypeptide, e.g., a truncated (e.g., deletion of carboxy, amino terminal, or internal regions) sequence shorter than an IL15 wild-type; but still retaining IL15 activity;
   [1804] (iii) a variant thereof, e.g., full length or truncated IL15 proteins in which one or more amino acids have been replaced (e.g., variants that retain all or most of the IL15 activity of the polypeptide with respect to the wild-type IL15 polypeptide); or
   [1805] (iv) a fusion protein comprising (i) a full length IL15 wild-type, a functional fragment or a variant thereof, and (ii) a heterologous protein (e.g., tPA-IL15); and/or,
[1806] (b) the IL15Rα is selected from:
   [1807] (i) the full-length IL15Rα polypeptide (e.g., having the same or essentially the same length as wild-type IL15Ra);
   [1808] (ii) a functional fragment of any of the wild-type IL15Rα polypeptide, e.g., a truncated (e.g., deletion of carboxy, amino terminal, or internal regions) sequence shorter than an IL15Rα wild-type; but still retaining IL15Rα activity (e.g., a Sushi domain);
   [1809] (iii) a variant thereof, e.g., full length or truncated IL15Rα proteins in which one or more amino acids have been replaced (e.g., variants that retain all or most of the IL15Rα activity of the polypeptide with respect to a reference isoform, such as natural or artificial variants known in the art); or
   [1810] (iv) a fusion protein comprising (i) a full length IL15Rα wild-type, a functional fragment or a variant thereof, and (ii) a heterologous protein.

[1811] In certain embodiments, the IL15 polynucleotide (e.g., a RNA, e.g., an mRNA) encodes a mammalian IL15 and/or IL15Rα polypeptide, such as a human IL15 and/or IL15Rα polypeptide, a functional fragment or a variant thereof.

[1812] In some embodiments, the IL15 polynucleotide (e.g., an mRNA) comprises an ORF which has the structure:

[IL15R]-[L]-[IL15]

wherein [IL15R] comprises a nucleic acid sequence encoding an extracellular portion of the IL15Ralpha receptor, for example, its Sushi domain, [L] is a nucleic acid sequence encoding a linker, and [IL15] is nucleic acid sequence encoding a mature IL15 polypeptide, e.g., an mature IL15 genetically fuse to a heterologous sequence (e.g., tPA-IL15). polypeptide. In some specific embodiments, the IL15 polynucleotide (e.g., an mRNA) according to the structure disclosed above comprises an ORF encoding an IL15 polypeptide comprising, from N-terminus to C-terminus the following sequences operably linked: (i) a Sushi Domain of wild-type IL15Ra, as indicated in FIG. 110A; (ii) a linker, e.g., GGSGGGGSGGGSGGGGSLQ (SEQ ID NO: 1263); and, (iii) a optimized mature IL15, e.g., tPA-IL15, such as SEQ ID NO: 812.

[1813] In some embodiments, the IL15 polynucleotide (e.g., a RNA, e.g., an mRNA) increases IL15 and/or IL15Rα protein expression levels and/or detectable IL15 activity levels in cells when introduced in those cells, e.g., by at least 10%, at least 15%, at least 20%, at least 25%, at least 30%, at least 35%, at least 40%, at least 45%, at least 50%, at least 55%, at least 60%, at least 65%, at least 70%, at least 75%, at least 80%, at least 85%, at least 90%, at least 95%, or at least 100%, compared to IL15 and/or IL15Rα protein expression levels and/or detectable IL15 activity levels in the cells prior to the administration of the IL15 polynucleotide. IL15 and/or IL15Rα protein expression levels and/or IL15 activity can be measured according to methods know in the art. In some embodiments, the polynucleotide is introduced to the cells in vitro. In some embodiments, the polynucleotide is introduced to the cells in vivo.

[1814] In some embodiments, the IL15 polynucleotide (e.g., a RNA, e.g., an mRNA) comprises a nucleotide sequence (e.g., an ORF) that encodes a wild-type human IL15 (e.g., SEQ ID NO: 810 or functional fragment thereof) and/or IL15R (e.g., SEQ ID NO: 808 or a functional fragment thereof).

[1815] In some embodiments, the IL15 polynucleotide (e.g., a RNA, e.g., an mRNA) comprises a codon optimized nucleic acid sequence, wherein the open reading frame (ORF) of the codon optimized nucleic sequence is derived from a wild-type IL15Rα and/or IL15 sequence.

[1816] In some embodiments, the IL15 polynucleotide (e.g., a RNA, e.g., an mRNA) comprises a nucleotide sequence encoding IL15 and/or IL15Rα having the full length sequence of human IL15 and/or IL15Ra, i.e., including initiator methionine, signal peptide, and propeptide (in the case of IL15).

[1817] In mature human IL15 and IL15Ra, the initiator methionine, signal peptide and propeptide (in the case of IL15) can be removed to yield a “mature IL15” and “mature IL15Ra” comprising amino acid residues of SEQ ID NO: 810 and SEQ ID NO: 808, respectively.

[1818] SEQ ID NO: 808 corresponds to amino acids 23 to 328 of SEQ ID NO: 857 or amino acids 24 to 329 of SEQ ID NO: 858, and SEQ ID NO: 810 corresponds to amino acids 336 to 532 of SEQ ID NO: 857 or 337 to 533 of SEQ ID NO: 858, respectively.

[1819] The teachings of the present disclosure directed to the full sequence of human IL15 and/or IL15Rα are also applicable to the mature form of human IL15 and/or IL15Rα lacking the initiator methionine and/or the signal peptide. Thus, in some embodiments, the IL15 polynucleotide (e.g., a RNA, e.g., an mRNA) comprises a nucleotide sequence encoding IL15 and/or IL15Rα having the mature sequence of human IL15 and/or IL15Ra. In some embodiments, the IL15 polynucleotide (e.g., a RNA, e.g., an mRNA) comprising a nucleotide sequence encoding IL15 and/or IL15Rα is sequence optimized.

[1820] In some embodiments, the IL15 polynucleotide (e.g., a RNA, e.g., an mRNA) comprises a nucleotide sequence (e.g., an ORF) encoding a mutant IL15 and/or IL15Rα polypeptide. In some embodiments, the IL15 polynucleotide comprises an ORF encoding a IL15 and/or IL15Rα polypeptide that comprises at least one point mutation in the IL15 and/or IL15Ru sequence and retains IL15 and/or IL15Rα activity.

[1821] In some embodiments, the mutant IL15 and/or IL15Rα polypeptide has a IL15 and/or IL15Rα activity which is at least 10%, at least 15%, at least 20%, at least 25%, at least 30%, at least 35%, at least 40%, at least 45%, at least 50%, at least 55%, at least 60%, at least 65%, at least 70%, at least 75%, at least 80%, at least 85%, at least 90%, at least 95%, or at least 100% of the IL15 and/or IL15Rα activity of the corresponding wild-type IL15 and/or IL15Rα (i.e., the same IL15 and/or IL15Rα but without the mutation(s)).

[1822] In some embodiments, the IL15 polynucleotide (e.g., a RNA, e.g., an mRNA) comprising an ORF encoding a mutant IL15 and/or IL15Rα polypeptide is sequence optimized.

[1823] In some embodiments, the IL15 polynucleotide (e.g., a RNA, e.g., an mRNA) comprises a nucleotide sequence (e.g., an ORF) that encodes a IL15 and/or IL15Rα polypeptide with mutations that do not alter IL15 and/or IL15Rα activity. Such mutant IL15 and/or IL15Rα polypeptides can be referred to as function-neutral. In some embodiments, the IL15 polynucleotide comprises an ORF that encodes a mutant IL15 and/or IL15Rα polypeptide comprising one or more function-neutral point mutations.

[1824] In some embodiments, the mutant IL15 and/or IL15Rα polypeptide has higher IL15 and/or IL15Rα activity than the corresponding wild-type IL15 and/or IL15Ra. In some embodiments, the mutant IL15 and/or IL15Rα polypeptide has a IL15 and/or IL15Rα activity that is at least 10%, at least 15%, at least 20%, at least 25%, at least 30%, at least 35%, at least 40%, at least 45%, at least 50%, at least 55%, at least 60%, at least 65%, at least 70%, at least 75%, at least 80%, at least 85%, at least 90%, at least 95%, or at least 100% higher than the activity of the corresponding wild-type IL15 and/or IL15Rα (i.e., the same IL15 and/or IL15Rα but without the mutation(s)).

[1825] In some embodiments, the IL15 polynucleotide (e.g., a RNA, e.g., an mRNA) comprises a nucleotide sequence (e.g., an ORF) encoding a functional IL15 and/or IL15Rα fragment, e.g., where one or more fragments correspond to a polypeptide subsequence of a wild-type IL15 and/or IL15Rα polypeptide and retain IL15 and/or IL15Rα activity. In some embodiments, the IL15 and/or IL15Rα fragment has a IL15 and/or IL15Rα activity which is at least 10%, at least 15%, at least 20%, at least 25%, at least 30%, at least 35%, at least 40%, at least 45%, at least 50%, at least 55%, at least 60%, at least 65%, at least 70%, at least 75%, at least 80%, at least 85%, at least 90%, at least 95%, or at least 100% of the IL15 and or IL15Rα activity of the corresponding full length IL15 and/or IL15Ra. In some embodiments, the IL15 polynucleotide (e.g., a RNA, e.g., an mRNA) comprising an ORF encoding a functional IL15 and/or IL15Rα fragment is sequence optimized.

[1826] In some embodiments, the IL15 polynucleotide (e.g., a RNA, e.g., an mRNA) comprises a nucleotide sequence (e.g., an ORF) encoding a IL15 and/or IL15Rα fragment that has higher IL15 and/or IL15Rα activity than the corresponding full length IL15 and/or IL15Ra. Thus, in some embodiments the IL15 and/or IL15Rα fragment has a IL15 and/or IL15Rα activity which is at least 10%, at least 15%, at least 20%, at least 25%, at least 30%, at least 35%, at least 40%, at least 45%, at least 50%, at least 55%, at least 60%, at least 65%, at least 70%, at least 75%, at least 80%, at least 85%, at least 90%, at least 95%, or at least 100% higher than the IL15 and/or IL15Rα activity of the corresponding full length IL15 and/or IL15Ra.

[1827] In some embodiments, the IL15 polynucleotide (e.g., a RNA, e.g., an mRNA) comprises a nucleotide sequence (e.g., an ORF) encoding a IL15 and/or IL15Rα fragment that is at least 1%, 2%, 3%, 4%, 5%, 6%, 7%, 8%, 9%, 10%, 11%, 12%, 13%, 14%, 15%, 16%, 17%, 18%, 19%, 20%, 21%, 22%, 23%, 24% or 25% shorter than wild-type IL15 and/or IL15Ra.

[1828] In other embodiments, the IL15 polynucleotide (e.g., a RNA, e.g., an mRNA) comprises a nucleotide sequence (e.g., an ORF) encoding an IL15 polypeptide, wherein the ORF has:
[1829] (i) at least 83%, at least 84%, at least 85%, at least 86%, at least 87%, at least 88%, at least 89%, at least 90%, at least 91%, at least 92%, at least 93%, at least 94%, at least 95%, at least 96%, at least 97%, at least 98%, at least 99%, or 100% sequence identity to nucleotides 159-1076 of hIL15RαB_007, hIL15RαB_010, or hIL15RαB_012;
[1830] (ii) at least 84%, at least 85%, at least 86%, at least 87%, at least 88%, at least 89%, at least 90%, at least 91%, at least 92%, at least 93%, at least 94%, at least 95%, at least 96%, at least 97%, at least 98%, at least 99%, or 100% sequence identity to nucleotides 159-1076 of hIL15RαB_018 or hIL15RαB_019;
[1831] (iii) at least 86%, at least 87%, at least 88%, at least 89%, at least 90%, at least 91%, at least 92%, at least 93%, at least 94%, at least 95%, at least 96%, at least 97%, at least 98%, at least 99%, or 100% sequence identity to nucleotides 159-1076 of hIL15RαB_008;
[1832] (iv) at least 87%, at least 88%, at least 89%, at least 90%, at least 91%, at least 92%, at least 93%, at least 94%, at least 95%, at least 96%, at least 97%, at least 98%, at least 99%, or 100% sequence identity to nucleotides 159-1076 of hIL15RαB_004, hIL15RαB_005, hIL15RαB 013, or hIL15RαB_017;
[1833] (v) at least 88%, at least 89%, at least 90%, at least 91%, at least 92%, at least 93%, at least 94%, at least 95%, at least 96%, at least 97%, at least 98%, at least 99%, or 100% sequence identity to nucleotides 159-1076 of hIL15RαB_001 or hIL15RαB_009;
[1834] (vi) at least 85%, at least 86%, at least 87%, at least 88%, at least 89%, at least 90%, at least 91%, at least 92%, at least 93%, at least 94%, at least 95%, at least 96%, at least 97%, at least 98%, at least 99%, or 100% sequence identity to nucleotides 159-1076 of hIL15RαB 012 or hIL15RαB 005;
[1835] (vii) at least 89%, at least 90%, at least 91%, at least 92%, at least 93%, at least 94%, at least 95%, at least 96%, at least 97%, at least 98%, at least 99%, or 100% sequence identity to nucleotides 159-1076 of hIL15RαB_022 or hIL15RαB_038;
[1836] (viii) at least 90%, at least 91%, at least 92%, at least 93%, at least 94%, at least 95%, at least 96%, at least 97%, at least 98%, at least 99%, or 100% sequence identity to nucleotides 159-1076 of hIL15RαB 024, hIL15RαB_031, hIL15RαB 032, or hIL15RαB_036;
[1837] (ix) at least 91%, at least 92%, at least 93%, at least 94%, at least 95%, at least 96%, at least 97%, at least 98%, at least 99%, or 100% sequence identity to nucleotides 159-1076 of hIL15RαB_021, hIL15RαB 023, hIL15RαB 025, hIL15RαB_026, hIL15RαB_027, hIL15RαB 029, hIL15RαB_030, hIL15RαB 034, hIL15RαB 039, or hIL15RαB 040;
[1838] (x) at least 92%, at least 93%, at least 94%, at least 95%, at least 96%, at least 97%, at least 98%, at least 99%, or 100% sequence identity to nucleotides 159-1076 of hIL15RαB_016, hIL15RαB 035, or hIL15RαB_037;
[1839] (xi) at least 93%, at least 94%, at least 95%, at least 96%, at least 97%, at least 98%, at least 99%, or 100% sequence identity to nucleotides 159-1076 of hIL15RαB_011, hIL15RαB 028, or hIL15RαB_033;
[1840] (xii) at least 94%, at least 95%, at least 96%, at least 97%, at least 98%, at least 99%, or 100% sequence identity to nucleotides 159-1076 of hIL15RαB_015;
[1841] (xiii) at least 95%, at least 96%, at least 97%, at least 98%, at least 99%, or 100% sequence identity to nucleotides 159-1076 of hIL15RαB_020;
[1842] (xiv) 100% sequence identity to nucleotides 159-1076 of hIL15RαB_006;
[1843] (xv) at least 88%, 89%, 90%, at least 91%, at least 92%, at least 93%, at least 94%, at least 95%, at least 96%, at least 97%, at least 98%, at least 99%, or 100% sequence identity to nucleotides 106 to 447 of IL15opt-tPa-C001 to IL15opt-tPa-CO5 or IL15opt-tPa-CO7 to IL15opt-tPa-CO50;
[1844] (xvi) at least 82%, at least 83%, at least 84%, at least 85%, at least 86%, at least 87%, at least 88%, 89%, 90%, at least 91%, at least 92%, at least 93%, at least 94%, at least 95%, at least 96%, at least 97%, at least 98%, at least 99%, or 100% sequence identity to nucleotides 106 to 447 of IL15opt-tPa-C006;
[1845] (xvii) at least 88%, 89%, 90%, at least 91%, at least 92%, at least 93%, at least 94%, at least 95%, at least 96%, at least 97%, at least 98%, at least 99%, or 100% sequence identity to nucleotides 85 to 318 of IL15_RLI-C001 to IL15_RLI-C0025; or
[1846] (xviii) at least 88%, 89%, 90%, at least 91%, at least 92%, at least 93%, at least 94%, at least 95%, at least 96%, at least 97%, at least 98%, at least 99%, or 100% sequence identity to nucleotides 757-990 of IL15_Fc_RLI-C001 to IL15_Fc_RLI-CO25.

[1847] In other embodiments, the IL15 polynucleotide (e.g., a RNA, e.g., an mRNA) comprises a nucleotide sequence (e.g., an ORF) encoding an IL15Rα polypeptide, wherein the ORF has:
[1848] (i) at least 83%, at least 84%, at least 85%, at least 86%, at least 87%, at least 88%, at least 89%, at least 90%, at least 91%, at least 92%, at least 93%, at least 94%, at least 95%, at least 96%, at least 97%, at least 98%, at least 99%, or 100% sequence identity to nucleotides 159-1076 of hIL15RαB_007, hIL15RαB_010, or hIL15RαB_012;
[1849] (ii) at least 84%, at least 85%, at least 86%, at least 87%, at least 88%, at least 89%, at least 90%, at least 91%, at least 92%, at least 93%, at least 94%, at least 95%, at least 96%, at least 97%, at least 98%, at least 99%, or 100% sequence identity to nucleotides 159-1076 of hIL15RαB 018 or hIL15RαB 019;
[1850] (iii) at least 86%, at least 87%, at least 88%, at least 89%, at least 90%, at least 91%, at least 92%, at least 93%, at least 94%, at least 95%, at least 96%, at least 97%, at least 98%, at least 99%, or 100% sequence identity to nucleotides 159-1076 of hIL15RαB 008;
[1851] (iv) at least 87%, at least 88%, at least 89%, at least 90%, at least 91%, at least 92%, at least 93%, at least 94%, at least 95%, at least 96%, at least 97%, at least 98%, at least 99%, or 100% sequence identity to nucleotides 159-1076 of hIL15RαB_004, hIL15RαB_005, hIL15RαB 013, or hIL15RαB_017;
[1852] (v) at least 88%, at least 89%, at least 90%, at least 91%, at least 92%, at least 93%, at least 94%, at least 95%, at least 96%, at least 97%, at least 98%, at least 99%, or 100% sequence identity to nucleotides 159-1076 of hIL15RαB_001 or hIL15RαB_009;
[1853] (vi) at least 85%, at least 86%, at least 87%, at least 88%, at least 89%, at least 90%, at least 91%, at least 92%, at least 93%, at least 94%, at least 95%, at least 96%, at least 97%, at least 98%, at least 99%, or 100% sequence identity to nucleotides 159-1076 of hIL15RαB 012 or hIL15RαB 005;
[1854] (vii) at least 89%, at least 90%, at least 91%, at least 92%, at least 93%, at least 94%, at least 95%, at least 96%, at least 97%, at least 98%, at least 99%, or 100% sequence identity to nucleotides 159-1076 of hIL15RαB_022 or hIL15RαB_038;
[1855] (viii) at least 90%, at least 91%, at least 92%, at least 93%, at least 94%, at least 95%, at least 96%, at least 97%, at least 98%, at least 99%, or 100% sequence identity to nucleotides 159-1076 of hIL15RαB 024, hIL15RαB_031, hIL15RαB 032, or hIL15RαB_036;
[1856] (ix) at least 91%, at least 92%, at least 93%, at least 94%, at least 95%, at least 96%, at least 97%, at least 98%, at least 99%, or 100% sequence identity to nucleotides 159-1076 of hIL15RαB_021, hIL15RαB 023, hIL15RαB 025, hIL15RαB_026, hIL15RαB_027, hIL15RαB 029, hIL15RαB_030, hIL15RαB 034, hIL15RαB 039, or hIL15RαB 040;
[1857] (x) at least 92%, at least 93%, at least 94%, at least 95%, at least 96%, at least 97%, at least 98%, at least 99%, or 100% sequence identity to nucleotides 159-1076 of hIL15RαB_016, hIL15RαB 035, or hIL15RαB_037;
[1858] (xi) at least 93%, at least 94%, at least 95%, at least 96%, at least 97%, at least 98%, at least 99%, or 100% sequence identity to nucleotides 159-1076 of hIL15RαB_011, hIL15RαB 028, or hIL15RαB_033;
[1859] (xii) at least 94%, at least 95%, at least 96%, at least 97%, at least 98%, at least 99%, or 100% sequence identity to nucleotides 159-1076 of hIL15RαB_015;
[1860] (xiii) at least 95%, at least 96%, at least 97%, at least 98%, at least 99%, or 100% sequence identity to nucleotides 159-1076 of hIL15RαB_020;
[1861] (xiv) 100% sequence identity to nucleotides 159-1076 of hIL15RαB_006;
[1862] (xv) at least 88%, 89%, 90%, at least 91%, at least 92%, at least 93%, at least 94%, at least 95%, at least 96%, at least 97%, at least 98%, at least 99%, or 100% sequence identity to nucleotides 106 to 447 of IL15opt-tPa-C001 to IL15opt-tPa-CO5 or IL15opt-tPa-CO7 to IL15opt-tPa-CO50;
[1863] (xvi) at least 82%, at least 83%, at least 84%, at least 85%, at least 86%, at least 87%, at least 88%, 89%, 90%, at least 91%, at least 92%, at least 93%, at least 94%, at least 95%, at least 96%, at least 97%, at least 98%, at least 99%, or 100% sequence identity to nucleotides 106 to 447 of IL15opt-tPa-C006;
[1864] (xvii) at least 88%, 89%, 90%, at least 91%, at least 92%, at least 93%, at least 94%, at least 95%, at least 96%, at least 97%, at least 98%, at least 99%, or 100% sequence identity to nucleotides 85 to 318 of IL15_RLI-C001 to IL15_RLI-C0025; or
[1865] (xviii) at least 88%, 89%, 90%, at least 91%, at least 92%, at least 93%, at least 94%, at least 95%, at least 96%, at least 97%, at least 98%, at least 99%, or 100% sequence identity to nucleotides 757-990 of IL15_Fc_RLI-C001 to IL15_Fc_RLI-CO25.

[1866] In certain embodiments, the IL15 polynucleotide (e.g., a RNA, e.g., an mRNA) of the disclosure comprises a first ORF encoding IL15 and a second ORF encoding IL15Ra, wherein the first ORF comprises a sequence that has:
[1867] (i) at least 83%, at least 84%, at least 85%, at least 86%, at least 87%, at least 88%, at least 89%, at least 90%, at least 91%, at least 92%, at least 93%, at least 94%, at least 95%, at least 96%, at least 97%, at least 98%, at least 99%, or 100% sequence identity to nucleotides 159-1076 of hIL15RαB_007, hIL15RαB_010, or hIL15RαB_012;
[1868] (ii) at least 84%, at least 85%, at least 86%, at least 87%, at least 88%, at least 89%, at least 90%, at least 91%, at least 92%, at least 93%, at least 94%, at least 95%, at least 96%, at least 97%, at least 98%, at least 99%, or 100% sequence identity to nucleotides 159-1076 of hIL15RαB 018 or hIL15RαB 019;
[1869] (iii) at least 86%, at least 87%, at least 88%, at least 89%, at least 90%, at least 91%, at least 92%, at least 93%, at least 94%, at least 95%, at least 96%, at least 97%, at least 98%, at least 99%, or 100% sequence identity to nucleotides 159-1076 of hIL15RαB 008;
[1870] (iv) at least 87%, at least 88%, at least 89%, at least 90%, at least 91%, at least 92%, at least 93%, at least 94%, at least 95%, at least 96%, at least 97%, at least 98%, at least 99%, or 100% sequence identity to nucleotides 159-1076 of hIL15RαB_004, hIL15RαB_005, hIL15RαB 013, or hIL15RαB_017;
[1871] (v) at least 88%, at least 89%, at least 90%, at least 91%, at least 92%, at least 93%, at least 94%, at least 95%, at least 96%, at least 97%, at least 98%, at least 99%, or 100% sequence identity to nucleotides 159-1076 of hIL15RαB_001 or hIL15RαB_009;
[1872] (vi) at least 85%, at least 86%, at least 87%, at least 88%, at least 89%, at least 90%, at least 91%, at least 92%, at least 93%, at least 94%, at least 95%, at least 96%, at least 97%, at least 98%, at least 99%, or 100% sequence identity to nucleotides 159-1076 of hIL15RαB 012 or hIL15RαB 005;
[1873] (vii) at least 89%, at least 90%, at least 91%, at least 92%, at least 93%, at least 94%, at least 95%, at least 96%, at least 97%, at least 98%, at least 99%, or 100% sequence identity to nucleotides 159-1076 of hIL15RαB_022 or hIL15RαB_038;
[1874] (viii) at least 90%, at least 91%, at least 92%, at least 93%, at least 94%, at least 95%, at least 96%, at least 97%, at least 98%, at least 99%, or 100% sequence identity to nucleotides 159-1076 of hIL15RαB 024, hIL15RαB_031, hIL15RαB 032, or hIL15RαB_036;
[1875] (ix) at least 91%, at least 92%, at least 93%, at least 94%, at least 95%, at least 96%, at least 97%, at least 98%, at least 99%, or 100% sequence identity to nucleotides 159-1076 of hIL15RαB_021, hIL15RαB 023, hIL15RαB 025, hIL15RαB_026, hIL15RαB_027, hIL15RαB 029, hIL15RαB_030, hIL15RαB 034, hIL15RαB 039, or hIL15RαB 040;
[1876] (x) at least 92%, at least 93%, at least 94%, at least 95%, at least 96%, at least 97%, at least 98%, at least 99%, or 100% sequence identity to nucleotides 159-1076 of hIL15RαB_016, hIL15RαB 035, or hIL15RαB_037;
[1877] (xi) at least 93%, at least 94%, at least 95%, at least 96%, at least 97%, at least 98%, at least 99%, or 100% sequence identity to nucleotides 159-1076 of hIL15RαB_011, hIL15RαB 028, or hIL15RαB_033;
[1878] (xii) at least 94%, at least 95%, at least 96%, at least 97%, at least 98%, at least 99%, or 100% sequence identity to nucleotides 159-1076 of hIL15RαB_015;
[1879] (xiii) at least 95%, at least 96%, at least 97%, at least 98%, at least 99%, or 100% sequence identity to nucleotides 159-1076 of hIL15RαB_020; or,
[1880] (xiv) 100% sequence identity to nucleotides 159-1076 of hIL15RαB_006;
[1881] (xv) at least 88%, 89%, 90%, at least 91%, at least 92%, at least 93%, at least 94%, at least 95%, at least 96%, at least 97%, at least 98%, at least 99%, or 100% sequence identity to nucleotides 106 to 447 of IL15opt-tPa-C001 to IL15opt-tPa-CO5 or IL15opt-tPa-CO7 to IL15opt-tPa-CO50;
[1882] (xvi) at least 82%, at least 83%, at least 84%, at least 85%, at least 86%, at least 87%, at least 88%, 89%, 90%, at least 91%, at least 92%, at least 93%, at least 94%, at least 95%, at least 96%, at least 97%, at least 98%, at least 99%, or 100% sequence identity to nucleotides 106 to 447 of IL15opt-tPa-C006;
[1883] (xvii) at least 88%, 89%, 90%, at least 91%, at least 92%, at least 93%, at least 94%, at least 95%, at least 96%, at least 97%, at least 98%, at least 99%, or 100% sequence identity to nucleotides 85 to 318 of IL15_RLI-C001 to IL15_RLI-C0025; or,
[1884] (xviii) at least 88%, 89%, 90%, at least 91%, at least 92%, at least 93%, at least 94%, at least 95%, at least 96%, at least 97%, at least 98%, at least 99%, or 100% sequence identity to nucleotides 757-990 of IL15_Fc_RLI-CO01 to IL15_Fc_RLI-CO25; or wherein the second ORF has:
[1885] (i) at least 83%, at least 84%, at least 85%, at least 86%, at least 87%, at least 88%, at least 89%, at least 90%, at least 91%, at least 92%, at least 93%, at least 94%, at least 95%, at least 96%, at least 97%, at least 98%, at least 99%, or 100% sequence identity to nucleotides 159-1076 of hIL15RαB_007, hIL15RαB_010, or hIL15RαB_012;
[1886] (ii) at least 84%, at least 85%, at least 86%, at least 87%, at least 88%, at least 89%, at least 90%, at least 91%, at least 92%, at least 93%, at least 94%, at least 95%, at least 96%, at least 97%, at least 98%, at least 99%, or 100% sequence identity to nucleotides 159-1076 of hIL15RαB_018 or hIL15RαB_019;
[1887] (iii) at least 86%, at least 87%, at least 88%, at least 89%, at least 90%, at least 91%, at least 92%, at least 93%, at least 94%, at least 95%, at least 96%, at least 97%, at least 98%, at least 99%, or 100% sequence identity to nucleotides 159-1076 of hIL15RαB_008;
[1888] (iv) at least 87%, at least 88%, at least 89%, at least 90%, at least 91%, at least 92%, at least 93%, at least 94%, at least 95%, at least 96%, at least 97%, at least 98%, at least 99%, or 100% sequence identity to nucleotides 159-1076 of hIL15RαB_004, hIL15RαB_005, hIL15RαB 013, or hIL15RαB_017;
[1889] (v) at least 88%, at least 89%, at least 90%, at least 91%, at least 92%, at least 93%, at least 94%, at least 95%, at least 96%, at least 97%, at least 98%, at least 99%, or 100% sequence identity to nucleotides 159-1076 of hIL15RαB_001 or hIL15RαB_009;
[1890] (vi) at least 85%, at least 86%, at least 87%, at least 88%, at least 89%, at least 90%, at least 91%, at least 92%, at least 93%, at least 94%, at least 95%, at least 96%, at least 97%, at least 98%, at least 99%, or 100% sequence identity to nucleotides 159-1076 of hIL15RαB_012 or hIL15RαB_005;
[1891] (vii) at least 89%, at least 90%, at least 91%, at least 92%, at least 93%, at least 94%, at least 95%, at least 96%, at least 97%, at least 98%, at least 99%, or 100% sequence identity to nucleotides 159-1076 of hIL15RαB_022 or hIL15RαB_038;
[1892] (viii) at least 90%, at least 91%, at least 92%, at least 93%, at least 94%, at least 95%, at least 96%, at least 97%, at least 98%, at least 99%, or 100% sequence identity to nucleotides 159-1076 of hIL15RαB 024, hIL15RαB_031, hIL15RαB 032, or hIL15RαB_036;
[1893] (ix) at least 91%, at least 92%, at least 93%, at least 94%, at least 95%, at least 96%, at least 97%, at least 98%, at least 99%, or 100% sequence identity to nucleotides 159-1076 of hIL15RαB_021, hIL15RαB 023, hIL15RαB 025, hIL15RαB_026, hIL15RαB_027, hIL15RαB 029, hIL15RαB_030, hIL15RαB 034, hIL15RαB 039, or hIL15RαB_040;
[1894] (x) at least 92%, at least 93%, at least 94%, at least 95%, at least 96%, at least 97%, at least 98%, at least 99%, or 100% sequence identity to nucleotides 159-1076 of hIL15RαB_016, hIL15RαB 035, or hIL15RαB_037;
[1895] (xi) at least 93%, at least 94%, at least 95%, at least 96%, at least 97%, at least 98%, at least 99%, or 100% sequence identity to nucleotides 159-1076 of hIL15RαB_011, hIL15RαB 028, or hIL15RαB_033;
[1896] (xii) at least 94%, at least 95%, at least 96%, at least 97%, at least 98%, at least 99%, or 100% sequence identity to nucleotides 159-1076 of hIL15RαB_015;
[1897] (xiii) at least 95%, at least 96%, at least 97%, at least 98%, at least 99%, or 100% sequence identity to nucleotides 159-1076 of hIL15RαB_020;
[1898] (xiv) 100% sequence identity to nucleotides 159-1076 of hIL15RαB_006;
[1899] (xv) at least 88%, 89%, 90%, at least 91%, at least 92%, at least 93%, at least 94%, at least 95%, at least 96%, at least 97%, at least 98%, at least 99%, or 100% sequence identity to nucleotides 106 to 447 of IL15opt-tPa-C001 to IL15opt-tPa-CO5 or IL15opt-tPa-CO7 to IL15opt-tPa-CO50;
[1900] (xvi) at least 82%, at least 83%, at least 84%, at least 85%, at least 86%, at least 87%, at least 88%, 89%, 90%, at least 91%, at least 92%, at least 93%, at least 94%, at least 95%, at least 96%, at least 97%, at least 98%, at least 99%, or 100% sequence identity to nucleotides 106 to 447 of IL15opt-tPa-C006;
[1901] (xvii) at least 88%, 89%, 90%, at least 91%, at least 92%, at least 93%, at least 94%, at least 95%, at least 96%, at least 97%, at least 98%, at least 99%, or 100% sequence identity to nucleotides 85 to 318 of IL15_RLI-C001 to IL15_RLI-C0025; or
[1902] (xviii) at least 88%, 89%, 90%, at least 91%, at least 92%, at least 93%, at least 94%, at least 95%, at least 96%, at least 97%, at least 98%, at least 99%, or 100% sequence identity to nucleotides 757-990 of IL15_Fc_RLI-CO01 to IL15_Fc_RLI-CO25.

[1903] In one embodiment, the first ORF encoding the IL15 polypeptide and the second ORF encoding the IL15Rα polypeptide are fused directly or by a linker. In another embodiment, the first ORF encoding the IL15 polypeptide and the second ORF encoding the IL15Rα polypeptide are not fused to each other.

[1904] In some embodiments, the IL15 polynucleotide (e.g., a RNA, e.g., an mRNA) comprises a nucleotide sequence (e.g., an ORF) encoding a IL15-IL15Rα fusion polypeptide (e.g., the wild-type sequence, functional fragment, or variant thereof), wherein the nucleotide sequence has at least 60%, at least 65%, at least 70%, at least 71%, at least 72%, at least 73%, at least 74%, at least 75%, at least 76%, at least 77%, at least 78%, at least 79%, at least 80%, at least 81%, at least 82%, at least 83%, at least 84%, at least 85%, at least 86%, at least 87%, at least 88%, at least 89%, at least 90%, at least 91%, at least 92%, at least 93%, at least 94%, at least 95%, at least 96%, at least 97%, at least 98%, at least 99%, or 100% sequence identity to any sequence disclosed in TABLE 10 or TABLE 11.

[1905] In some embodiments, the IL15 polynucleotide (e.g., a RNA, e.g., an mRNA) comprises a nucleotide sequence (e.g., an ORF) encoding a IL15-IL15Rα fusion polypeptide (e.g., the wild-type sequence, functional fragment, or variant thereof), wherein the nucleotide sequence has 70% to 100%, 75% to 100%, 80% to 100%, 85% to 100%, 70% to 95%, 80% to 95%, 70% to 85%, 75% to 90%, 80% to 95%, 70% to 75%, 75% to 80%, 80% to 85%, 85% to 90%, 90% to 95%, or 95% to 100%, sequence identity to any sequence disclosed in TABLE 10 or TABLE 11.

[1906] In some embodiments, the IL15 polynucleotide (e.g., a RNA, e.g., an mRNA) comprises from about 100 to about 100,000 nucleotides (e.g., from 100 to 1,000, from 100 to 1,100, from 100 to 1,200, from 100 to 1,300, from 100 to 1,400, from 100 to 1,500, from 300 to 1,100, from 300 to 1,100, from 300 to 1,200, from 300 to 1,300, from 300 to 1,400, from 300 to 1,500, from 342 to 1,200, from 342 to 1,400, from 342 to 1,600, from 342 to 1,800, from 342 to 2,000, from 342 to 3,000, from 342 to 5,000, from 342 to 7,000, from 342 to 10,000, from 342 to 25,000, from 342 to 50,000, from 342 to 70,000, or from 342 to 100,000).

[1907] In some embodiments, the IL15Rα polynucleotide (e.g., a RNA, e.g., an mRNA) comprises from about 500 to about 100,000 nucleotides (e.g., from 500 to 1,000, from 500 to 1,100, from 500 to 1,200, from 500 to 1,300, from 500 to 1,400, from 500 to 1,500, from 600 to 1,100, from 600 to 1,100, from 600 to 1,200, from 600 to 1,300, from 600 to 1,400, from 600 to 1,500, from 711 to 1,200, from 711 to 1,400, from 711 to 1,600, from 711 to 1,800, from 711 to 2,000, from 711 to 3,000, from 711 to 5,000, from 711 to 7,000, from 711 to 10,000, from 711 to 25,000, from 711 to 50,000, from 711 to 70,000, or from 711 to 100,000).

[1908] In some embodiments, the IL15 polynucleotide (e.g., a RNA, e.g., an mRNA) comprises a nucleotide sequence (e.g., an ORF) encoding a IL15-IL15Rα fusion polypeptide (e.g., the wild-type sequence, functional fragment, or variant thereof), wherein the length of the nucleotide sequence (e.g., an ORF) is at least 500 nucleotides in length (e.g., at least or greater than about 500, 600, 700, 80, 900, 1,000, 1,050, 1,083, 1,100, 1,200, 1,300, 1,400, 1,500, 1,600, 1,700, 1,800, 1,900, 2,000, 2,100, 2,200, 2,300, 2,400, 2,500, 2,600, 2,700, 2,800, 2,900, 3,000, 3,100, 3,200, 3,300, 3,400, 3,500, 3,600, 3,700, 3,800, 3,900, 4,000, 4,100, 4,200, 4,300, 4,400, 4,500, 4,600, 4,700, 4,800, 4,900, 5,000, 5,100, 5,200, 5,300, 5,400, 5,500, 5,600, 5,700, 5,800, 5,900, 6,000, 7,000, 8,000, 9,000, 10,000, 20,000, 30,000, 40,000, 50,000, 60,000, 70,000, 80,000, 90,000 or up to and including 100,000 nucleotides).

[1909] In some embodiments, the IL15 polynucleotide (e.g., a RNA, e.g., an mRNA) comprises a nucleotide sequence (e.g., an ORF) encoding a IL15 and/or IL15Rα polypeptide (e.g., the wild-type sequence, functional fragment, or variant thereof) further comprises at least one nucleic acid sequence that is noncoding, e.g., a miRNA binding site.

[1910] In some embodiments, the IL15 polynucleotide (e.g., a RNA, e.g., an mRNA) comprises a nucleotide sequence (e.g., an ORF) encoding a IL15 and/or IL15Rα polypeptide is single stranded or double stranded.

[1911] In some embodiments, the IL15 polynucleotide comprising a nucleotide sequence (e.g., an ORF) encoding a IL15 and/or IL15Rα polypeptide (e.g., the wild-type sequence, functional fragment, or variant thereof) is DNA or RNA. In some embodiments, the IL15 polynucleotide is RNA. In some embodiments, the IL15 polynucleotide is, or functions as, a messenger RNA (mRNA). In some embodiments, the mRNA comprises a nucleotide sequence (e.g., an ORF) that encodes at least one IL15 and/or IL15Rα polypeptide, and is capable of being translated to produce the encoded IL15 and/or IL15Rα polypeptide in vitro, in vivo, in situ or ex vivo.

[1912] In some embodiments, the IL15 polynucleotide (e.g., a RNA, e.g., an mRNA) comprises a sequence-optimized nucleotide sequence (e.g., an ORF) encoding a IL15 and/or IL15Rα polypeptide (e.g., the wild-type sequence, functional fragment, or variant thereof), wherein the polynucleotide comprises at least one chemically modified nucleobase, e.g., 5-methoxyuracil. In some embodiments, the IL15 polynucleotide further comprises a miRNA binding site, e.g., a miRNA binding site that binds to miR-122. In some embodiments, the IL15 polynucleotide disclosed herein is formulated with a delivery agent, e.g., a compound having Formula (I), e.g., any of Compounds 1-147.

[1913] The IL15 polynucleotides (e.g., a RNA, e.g., an mRNA) disclosed herein can also comprise nucleotide sequences that encode additional features that facilitate trafficking of the encoded polypeptides to therapeutically relevant sites. One such feature that aids in protein trafficking is the signal sequence, or targeting sequence. The peptides encoded by these signal sequences are known by a variety of names, including targeting peptides, transit peptides, and signal peptides. In some embodiments, the IL15 polynucleotide (e.g., a RNA, e.g., an mRNA) comprises a nucleotide sequence (e.g., an ORF) that encodes a signal peptide operably linked a nucleotide sequence that encodes a IL15 and/or IL15Rα polypeptide described herein.

[1914] In some embodiments, the “signal sequence” or “signal peptide” is a polynucleotide or polypeptide, respectively, which is from about 9 to 200 nucleotides (3-70 amino acids) in length that, optionally, is incorporated at the 5′ (or N-terminus) of the coding region or the IL15 polypeptide, respectively. Addition of these sequences results in trafficking the encoded IL15 polypeptide to a desired site, such as the endoplasmic reticulum or the mitochondria through one or more targeting pathways. Some signal peptides are cleaved from the protein, for example by a signal peptidase after the proteins are transported to the desired site.

[1915] In some embodiments, the IL15 polynucleotide comprises a nucleotide sequence encoding an IL15 and/or IL15Rα polypeptide, wherein the nucleotide sequence further comprises a 5′ nucleic acid sequence encoding a native signal peptide. In another embodiment, the IL15 polynucleotide comprises a nucleotide sequence encoding an IL15 and/or IL15Rα polypeptide, wherein the nucleotide sequence lacks the nucleic acid sequence encoding a native signal peptide. In some embodiments, the IL15 polynucleotide comprises a nucleotide sequence encoding a IL15 and/or IL15Rα polypeptide, wherein the nucleotide sequence further comprises a 5′ nucleic acid sequence encoding a heterologous signal peptide.

[1916] Sequence-Optimized Nucleotide Sequences Encoding IL15 and/or IL15Rα Polypeptides: In some embodiments, the IL15 polynucleotide (e.g., a RNA, e.g., an mRNA) comprises a sequence-optimized nucleotide sequence encoding a IL15 and/or IL15Rα polypeptide disclosed herein. In some embodiments, the IL15 polynucleotide comprises an open reading frame (ORF) encoding a IL15 and/or IL15Rα polypeptide, wherein the ORF has been sequence optimized.

[1917] Exemplary sequence-optimized nucleotide sequences encoding human IL15 and/or IL15Rα are shown in TABLE 10 and TABLE 11. In some embodiments, the sequence optimized IL15 and/or IL15Rα sequences in TABLE 10 and TABLE 11, fragments, and variants thereof are used to practice the methods disclosed herein. In some embodiments, the sequence optimized IL15 and/or IL15Rα sequences in TABLE 10 and TABLE 11, fragments and variants thereof are combined with or alternatives to the wild-type sequences (SEQ ID NOS: 1-4).

TABLE 10
Optimized sequences encoding human IL15, IL15Ra, or IL15Ra-IL15 fusion

>hIL15RαB_001 (SEQ ID NO: 814)
ATGTGTCACCAGCAGCTGGTCATTAGCTGGTTTAGCCTTGTGTTCCTGGCCTCCCCCCTTGTCGCTATTTGGGAGCTCAAGAAGG
ACGTGTACGTGGTGGAGCTGGACTGGTACCCAGACGCGCCCGGAGAGATGGTAGTTCTGACCTGTGATACCCCAGAGGAGGACGG
CATCACCTGGACTCTGGACCAAAGCAGCGAGGTTTTGGGCTCAGGGAAAACGCTGACCATCCAGGTGAAGGAATTCGGCGACGCC
GGACAGTACACCTGCCATAAGGGAGGAGAGGTGCTGAGCCATTCCCTTCTTCTGCTGCACAAGAAAGAGGACGGCATCTGGTCTA
CCGACATCCTGAAAGACCAGAAGGAGCCCAAGAACAAAACCTTCCTGAGGTGCGAGGCCAAGAACTACTCCGGCAGGTTCACTTG
TTGGTGGCTGACCACCATCAGTACAGACCTGACTTTTAGTGTAAAAAGCTCCAGAGGCTCGTCCGATCCCCAAGGGGTGACCTGC
GGCGCAGCCACTCTGAGCGCTGAGCGCGTGCGCGGTGACAATAAAGAGTACGAGTACAGCGTTGAGTGTCAAGAAGACAGCGCTT
GCCCTGCCGCCGAGGAGAGCCTGCCTATCGAGGTGATGGTTGACGCAGTGCACAAGCTTAAGTACGAGAATTACACCAGCTCATT
CTTCATTAGAGATATAATCAAGCCTGACCCACCCAAGAACCTGCAGCTGAAGCCACTGAAAAACTCACGGCAGGTCGAAGTGAGC
TGGGAGTACCCCGACACCTGGAGCACTCCTCATTCCTATTTCTCTCTTACATTCTGCGTCCAGGTGCAGGGCAAGAGCAAGCGGG
AAAAGAAGGATCGAGTCTTCACCGACAAAACAAGCGCGACCGTGATTTGCAGGAAGAACGCCAGCATCTCCGTCAGAGCCCAGGA
TAGATACTATAGTAGCAGCTGGAGCGAGTGGGCAAGCGTGCCCTGTTCCGGCGGCGGGGGCGGGGGCAGCCGAAACTTGCCTGTC
GCTACCCCGGACCCTGGAATGTTTCCGTGTCTGCACCACAGCCAGAACCTGCTGAGAGCCGTGTCGAATATGCTCCAGAAGGCCC
GGCAGACCCTTGAGTTCTACCCCTGTACCAGCGAAGAGATCGATCATGAGGACATCACGAAAGACAAGACTTCCACCGTCGAGGC
TTGTCTCCCGCTGGAGCTGACCAAGAACGAGAGCTGTCTGAATAGCCGGGAGACATCTTTCATCACGAATGGTAGCTGTCTGGCC
AGCAGGAAAACTTCCTTCATGATGGCTCTCTGCCTGAGCTCTATCTATGAAGATCTGAAGATGTATCAGGTGGAGTTTAAGACTA
TGAACGCCAAACTCCTGATGGACCCAAAAAGGCAAATCTTTCTGGACCAGAATATGCTGGCCGTGATAGACGAGCTGATGCAGGC
ACTGAACTTCAACAGCGAGACAGTGCCACAGAAATCCAGCCTGGAGGAGCCTGACTTTTACAAAACTAAGATCAAGCTGTGTATC
CTGCTGCACGCCTTTAGAATCCGTGCCGTGACTATCGACAGGGTGATGTCATACCTCAACGCTTCA
>hIL15RαB_002 (SEQ ID NO: 815)
ATGTGCCACCAGCAGCTGGTGATCAGCTGGTTCAGCCTGGTGTTCCTGGCCAGCCCCCTGGTGGCCATCTGGGAGCTGAAGAAGG
ACGTGTACGTGGTGGAGCTGGACTGGTACCCCGACGCCCCCGGCGAGATGGTGGTGCTGACCTGCGACACCCCCGAGGAGGACGG
CATCACCTGGACCCTGGACCAGAGCAGCGAGGTGCTGGGCAGCGGCAAGACCCTGACCATCCAGGTGAAGGAGTTCGGCGACGCC
GGCCAGTACACCTGCCACAAGGGCGGCGAGGTGCTGAGCCACAGCCTGCTGCTGCTGCACAAGAAGGAGGACGGCATCTGGAGCA
CCGACATCCTGAAGGACCAGAAGGAGCCCAAGAACAAGACCTTCCTGAGATGCGAGGCCAAGAACTACAGCGGCAGATTCACCTG
CTGGTGGCTGACCACCATCAGCACCGACCTGACCTTCAGCGTGAAGAGCAGCAGAGGCAGCAGCGACCCCCAGGGCGTGACCTGC
GGCGCCGCCACCCTGAGCGCCGAGAGAGTGAGAGGCGACAACAAGGAGTACGAGTACAGCGTGGAGTGCCAGGAGGACAGCGCCT
GCCCCGCCGCCGAGGAGAGCCTGCCCATCGAGGTGATGGTGGACGCCGTGCACAAGCTGAAGTACGAGAACTACACCAGCAGCTT
CTTCATCAGAGACATCATCAAGCCCGACCCCCCCAAGAACCTGCAGCTGAAGCCCCTGAAGAACAGCAGACAGGTGGAGGTGAGC
TGGGAGTACCCCGACACCTGGAGCACCCCCCACAGCTACTTCAGCCTGACCTTCTGCGTGCAGGTGCAGGGCAAGAGCAAGAGAG
AGAAGAAGGACAGAGTGTTCACCGACAAGACCAGCGCCACCGTGATCTGCAGAAAGAACGCCAGCATCAGCGTGAGAGCCCAGGA
CAGATACTACAGCAGCAGCTGGAGCGAGTGGGCCAGCGTGCCCTGCAGCGGCGGCGGCGGCGGCGGCAGCAGAAACCTGCCCGTG
GCCACCCCCGACCCCGGCATGTTCCCCTGCCTGCACCACAGCCAGAACCTGCTGAGAGCCGTGAGCAACATGCTGCAGAAGGCCA
GACAGACCCTGGAGTTCTACCCCTGCACCAGCGAGGAGATCGACCACGAGGACATCACCAAGGACAAGACCAGCACCGTGGAGGC
CTGCCTGCCCCTGGAGCTGACCAAGAACGAGAGCTGCCTGAACAGCAGAGAGACCAGCTTCATCACCAACGGCAGCTGCCTGGCC
AGCAGAAAGACCAGCTTCATGATGGCCCTGTGCCTGAGCAGCATCTACGAGGACCTGAAGATGTACCAGGTGGAGTTCAAGACCA
TGAACGCCAAGCTGCTGATGGACCCCAAGAGACAGATCTTCCTGGACCAGAACATGCTGGCCGTGATCGACGAGCTGATGCAGGC
CCTGAACTTCAACAGCGAGACCGTGCCCCAGAAGAGCAGCCTGGAGGAGCCCGACTTCTACAAGACCAAGATCAAGCTGTGCATC
CTGCTGCACGCCTTCAGAATCAGAGCCGTGACCATCGACAGAGTGATGAGCTACCTGAACGCCAGC
>hIL15RαB_003 (SEQ ID NO: 816)
ATGTGTCACCAGCAGTTGGTCATCTCTTGGTTTTCCCTGGTTTTTCTGGCATCTCCCCTCGTGGCCATATGGGAACTGAAGAAAG
ATGTTTATGTCGTAGAATTGGATTGGTATCCGGATGCCCCTGGAGAAATGGTGGTCCTCACCTGTGACACCCCTGAAGAAGATGG
TATCACCTGGACCTTGGACCAGAGCAGTGAGGTCTTAGGCTCTGGCAAAACCCTGACCATCCAAGTCAAAGAGTTTGGAGATGCT
GGCCAGTACACCTGTCACAAAGGAGGCGAGGTTCTAAGCCATTCGCTCCTGCTGCTTCACAAAAAGGAAGATGGAATTTGGTCCA
CTGATATTTTAAAGGACCAGAAAGAACCCAAAAATAAGACCTTTCTAAGATGCGAGGCCAAGAATTATTCTGGACGTTTCACCTG
CTGGTGGCTGACGACAATCAGTACTGATTTGACATTCAGTGTCAAAAGCAGCAGAGGCTCTTCTGACCCCCAAGGGGTGACGTGC
GGAGCTGCTACACTCTCTGCAGAGAGAGTCAGAGGGGACAACAAGGAGTATGAGTACTCAGTGGAGTGCCAGGAGGACAGTGCCT
GCCCAGCTGCTGAGGAGAGTCTGCCCATTGAGGTCATGGTGGATGCCGTTCACAAGCTCAAGTATGAAAACTACACCAGCAGCTT
CTTCATCAGGGACATCATCAAACCTGACCCACCCAAGAACTTGCAGCTGAAGCCATTAAAGAATTCTCGGCAGGTGGAGGTCAGC
TGGGAGTACCCTGACACCTGGAGTACTCCACATTCCTACTTCTCCCTGACATTCTGCGTTCAGGTCCAGGGCAAGAGCAAGAGAG
AAAAGAAAGATAGAGTCTTCACGGACAAGACCTCAGCCACGGTCATCTGCCGCAAAAATGCCAGCATTAGCGTGCGGGCCCAGGA
CCGCTACTATAGCTCATCTTGGAGCGAATGGGCATCTGTGCCCTGCAGTGGCGGAGGGGGCGGAGGGAGCAGAAACCTCCCCGTG
GCCACTCCAGACCCAGGAATGTTCCCATGCCTTCACCACTCCCAAAACCTGCTGAGGGCCGTCAGCAACATGCTCCAGAAGGCCA
GACAAACTTTAGAATTTTACCCTTGCACTTCTGAAGAGATTGATCATGAAGATATCACAAAAGATAAAACCAGCACAGTGGAGGC
CTGTTTACCATTGGAATTAACCAAGAATGAGAGTTGCCTAAATTCCAGAGAGACCTCTTTCATAACTAATGGGAGTTGCCTGGCC
TCCAGAAAGACCTCTTTTATGATGGCCCTGTGCCTTAGTAGTATTTATGAAGACTTGAAGATGTACCAGGTGGAGTTCAAGACCA
TGAATGCAAAGCTTCTGATGGATCCTAAGAGGCAGATCTTTTTAGATCAAAACATGCTGGCAGTTATTGATGAGCTGATGCAGGC
CCTGAATTTCAACAGTGAGACTGTGCCACAAAAATCCTCCCTTGAAGAACCGGACTTCTACAAGACCAAGATCAAGCTCTGCATA
CTTCTTCATGCTTTCAGAATTCGGGCAGTGACTATTGATAGAGTGATGAGCTATCTGAATGCTTCC
>hIL15RαB_004 (SEQ ID NO: 817)
ATGGGCTGCCACCAGCAGCTGGTCATCAGCTGGTTCTCCCTGGTCTTCCTGGCCAGCCCCCTGGTGGCCATCTGGGAGCTGAAGA
AAGATGTCTATGTTGTAGAGCTGGACTGGTACCCAGATGCTCCTGGAGAAATGGTGGTTCTCACCTGTGACACGCCAGAAGAAGA
TGGCATCACCTGGACGCTGGACCAGAGCTCAGAAGTTCTTGGCAGTGGAAAAACGCTGACCATACAAGTAAAAGAATTTGGGGAT
GCTGGCCAGTACACCTGCCACAAAGGAGGAGAAGTTCTCAGCCACAGCCTGCTGCTGCTGCACAAGAAAGAAGATGGCATCTGGA
GCACAGACATTTTAAAAGACCAGAAGGAGCCCAAGAACAAAACCTTCCTTCGATGTGAGGCCAAGAACTACAGTGGCCGCTTCAC
CTGCTGGTGGCTCACCACCATCAGCACAGACCTCACCTTCTCGGTGAAGAGCAGCCGTGGCAGCTCAGACCCCCAAGGAGTCACC
TGTGGGGCGGCCACGCTGTCGGCAGAAAGAGTTCGAGGGGACAACAAGGAATATGAATACTCGGTGGAATGTCAAGAAGACTCGG
CCTGCCCGGCGGCAGAAGAAAGTCTTCCCATAGAAGTCATGGTGGATGCTGTTCACAAATTAAAATATGAAAACTACACCAGCAG
CTTCTTCATCAGAGACATCATCAAGCCAGACCCGCCCAAGAACCTGCAGCTGAAGCCCCTGAAGAACAGCAGACAAGTGGAAGTT
TCCTGGGAGTACCCAGACACGTGGAGCACGCCGCACAGCTACTTCAGCCTCACCTTCTGTGTACAAGTACAAGGCAAGAGCAAGA
GAGAGAAGAAAGATCGTGTCTTCACAGACAAAACCTCGGCGACGGTCATCTGCAGGAAGAATGCCTCCATCTCGGTTCGAGCCCA
GGACCGCTACTACAGCAGCAGCTGGAGTGAGTGGGCCTCGGTGCCCTGCAGTGGTGGCGGCGGCGGCGGCAGCAGAAACCTTCCT
GTGGCCACGCCGGACCCTGGCATGTTCCCGTGCCTGCACCACAGCCAAAATTTACTTCGAGCTGTTTCTAACATGCTGCAGAAAG
CAAGACAAACTTTAGAATTCTACCCCTGCACCTCAGAAGAAATAGACCATGAAGACATCACCAAAGATAAAACCAGCACTGTAGA
GGCCTGCCTGCCCCTGGAGCTCACCAAGAATGAATCCTGCCTCAACAGCAGAGAGACCAGCTTCATCACCAATGGCAGCTGCCTG
GCCAGCAGGAAAACCAGCTTCATGATGGCGCTCTGCCTGAGCAGCATCTATGAAGATTTGAAGATGTACCAAGTAGAATTTAAAA
CCATGAATGCCAAGCTGCTCATGGACCCCAAGAGACAAATATTTTTGGATCAAAACATGCTGGCTGTCATTGATGAGCTCATGCA
AGCATTAAACTTCAACTCAGAGACGGTGCCCCAGAAGAGCAGCCTGGAGGAGCCAGACTTCTACAAAACCAAGATCAAGCTCTGC
ATCTTATTACATGCCTTCCGCATCCGGGCGGTCACCATTGACCGTGTCATGTCCTACTTAAATGCCAGC
>hIL15RαB_005 (SEQ ID NO: 818)
ATGTGCCACCAGCAGCTGGTCATCAGCTGGTTCTCCCTGGTCTTCCTGGCCAGCCCCCTGGTGGCCATCTGGGAGCTGAAGAAAG
ATGTCTATGTTGTAGAGCTGGACTGGTACCCAGATGCTCCTGGAGAAATGGTGGTTCTCACCTGTGACACGCCAGAAGAAGATGG
CATCACCTGGACGCTGGACCAGAGCTCAGAAGTTCTTGGCAGTGGAAAAACGCTGACCATACAAGTAAAAGAATTTGGGGATGCT
GGCCAGTACACCTGCCACAAAGGAGGAGAAGTTCTCAGCCACAGCCTGCTGCTGCTGCACAAGAAAGAAGATGGCATCTGGAGCA
CAGACATTTTAAAAGACCAGAAGGAGCCCAAGAACAAAACCTTCCTTCGATGTGAGGCCAAGAACTACAGTGGCCGCTTCACCTG
CTGGTGGCTCACCACCATCAGCACAGACCTCACCTTCTCGGTGAAGAGCAGCCGTGGCAGCTCAGACCCCCAAGGAGTCACCTGT
GGGGCGGCCACGCTGTCGGCAGAAAGAGTTCGAGGGGACAACAAGGAATATGAATACTCGGTGGAATGTCAAGAAGACTCGGCCT
GCCCGGCGGCAGAAGAAAGTCTTCCCATAGAAGTCATGGTGGATGCTGTTCACAAATTAAAATATGAAAACTACACCAGCAGCTT
CTTCATCAGAGACATCATCAAGCCAGACCCGCCCAAGAACCTGCAGCTGAAGCCCCTGAAGAACAGCAGACAAGTGGAAGTTTCC
TGGGAGTACCCAGACACGTGGAGCACGCCGCACAGCTACTTCAGCCTCACCTTCTGTGTACAAGTACAAGGCAAGAGCAAGAGAG
AGAAGAAAGATCGTGTCTTCACAGACAAAACCTCGGCGACGGTCATCTGCAGGAAGAATGCCTCCATCTCGGTTCGAGCCCAGGA
CCGCTACTACAGCAGCAGCTGGAGTGAGTGGGCCTCGGTGCCCTGCAGTGGTGGCGGCGGCGGCGGCAGCAGAAACCTTCCTGTG
GCCACGCCGGACCCTGGCATGTTCCCGTGCCTGCACCACAGCCAAAATTTACTTCGAGCTGTTTCTAACATGCTGCAGAAAGCAA
GACAAACTTTAGAATTCTACCCCTGCACCTCAGAAGAAATAGACCATGAAGACATCACCAAAGATAAAACCAGCACTGTAGAGGC
CTGCCTGCCCCTGGAGCTCACCAAGAATGAATCCTGCCTCAACAGCAGAGAGACCAGCTTCATCACCAATGGCAGCTGCCTGGCC
AGCAGGAAAACCAGCTTCATGATGGCGCTCTGCCTGAGCAGCATCTATGAAGATTTGAAGATGTACCAAGTAGAATTTAAAACCA
TGAATGCCAAGCTGCTCATGGACCCCAAGAGACAAATATTTTTGGATCAAAACATGCTGGCTGTCATTGATGAGCTCATGCAAGC
ATTAAACTTCAACTCAGAGACGGTGCCCCAGAAGAGCAGCCTGGAGGAGCCAGACTTCTACAAAACCAAGATCAAGCTCTGCATC
TTATTACATGCCTTCCGCATCCGGGCGGTCACCATTGACCGTGTCATGTCCTACTTAAATGCCAGC
>hIL15RαB_006 (SEQ ID NO: 819)
ATGTGCCACCAGCAGCTGGTGATCAGCTGGTTCAGCCTGGTGTTCCTGGCCAGCCCCCTGGTGGCCATCTGGGAGCTGAAGAAGG
ACGTGTACGTGGTGGAGCTGGACTGGTACCCCGACGCCCCCGGCGAGATGGTGGTGCTGACCTGTGACACCCCCGAGGAGGACGG
CATCACCTGGACCCTGGACCAGAGCAGCGAGGTGCTGGGCAGCGGCAAGACCCTGACCATCCAGGTGAAGGAGTTCGGGGACGCC
GGCCAGTACACCTGCCACAAGGGCGGCGAGGTGCTGAGCCACAGCCTGCTGCTGCTGCACAAGAAGGAGGACGGCATCTGGAGCA
CAGATATCCTGAAGGACCAGAAGGAGCCCAAGAACAAGACCTTCCTGAGATGCGAGGCCAAGAACTACAGCGGCAGATTCACCTG
CTGGTGGCTGACCACCATCAGCACAGACTTGACCTTCAGCGTGAAGAGCAGCAGAGGCAGCAGCGACCCCCAGGGCGTGACCTGC
GGCGCCGCCACCCTGAGCGCCGAGAGAGTGAGAGGGGACAACAAGGAGTACGAGTACAGCGTGGAGTGCCAGGAGGACAGCGCCT
GCCCCGCCGCCGAGGAGAGCCTGCCCATCGAGGTGATGGTGGACGCCGTGCACAAGCTGAAGTACGAGAACTACACCAGCAGCTT
CTTCATCAGAGACATCATCAAGCCCGACCCGCCGAAGAACCTGCAGCTGAAGCCCCTGAAGAACAGCAGACAGGTGGAGGTGAGC
TGGGAGTACCCCGACACCTGGAGCACCCCCCACAGCTACTTCAGCCTGACCTTCTGCGTGCAGGTGCAGGGCAAGAGCAAGAGAG
AGAAGAAGGACAGAGTGTTCACAGATAAGACCAGCGCCACCGTGATCTGCAGAAAGAACGCCAGCATCAGCGTGAGAGCCCAGGA
CAGATACTACAGCAGCAGCTGGAGCGAGTGGGCCAGCGTGCCCTGCAGCGGCGGCGGCGGCGGCGGCAGCAGAAACCTGCCCGTG
GCCACCCCCGACCCCGGCATGTTCCCCTGCCTGCACCACAGCCAGAACCTGCTGAGAGCCGTGAGCAACATGCTGCAGAAGGCCA
GACAGACCCTGGAGTTCTACCCCTGCACCAGCGAGGAGATCGACCACGAGGACATCACCAAGGACAAGACCAGCACCGTGGAGGC
CTGCCTGCCCCTGGAGCTGACCAAGAATGAAAGCTGCCTGAACAGCAGAGAGACCAGCTTCATCACCAACGGCAGCTGCCTGGCC
AGCAGAAAGACCAGCTTCATGATGGCCCTGTGCCTGAGCAGCATCTACGAGGACCTGAAGATGTACCAGGTGGAGTTCAAGACCA
TGAACGCCAAGCTGCTGATGGACCCCAAGAGACAGATCTTCCTGGACCAGAACATGCTGGCCGTGATCGACGAGCTGATGCAGGC
CCTGAACTTCAACAGCGAGACCGTGCCCCAGAAGAGCAGCCTGGAGGAGCCCGACTTCTACAAGACCAAGATCAAGCTGTGCATC
CTGCTGCACGCCTTCAGAATCAGAGCCGTGACCATCGACAGAGTGATGAGCTACCTGAACGCCAGC
>hIL15RαB_007 (SEQ ID NO: 820)
ATGTGCCACCAGCAGCTTGTCATCTCCTGGTTCTCTCTTGTCTTCCTTGCTTCTCCTCTTGTGGCCATCTGGGAGCTGAAGAAGG
ATGTTTATGTTGTGGAGTTGGACTGGTACCCTGATGCTCCTGGAGAAATGGTGGTTCTCACCTGTGACACTCCTGAGGAGGATGG
CATCACCTGGACTTTGGACCAGTCTTCTGAGGTTCTTGGCAGTGGAAAAACTCTTACTATTCAGGTGAAGGAGTTTGGAGATGCT
GGCCAGTACACCTGCCACAAGGGTGGTGAAGTTCTCAGCCACAGTTTACTTCTTCTTCACAAGAAGGAGGATGGCATCTGGTCTA
CTGACATTTTAAAAGACCAGAAGGAGCCCAAGAACAAGACTTTCCTTCGTTGTGAAGCCAAGAACTACAGTGGTCGTTTCACCTG
CTGGTGGCTTACTACTATTTCTACTGACCTTACTTTCTCTGTGAAGTCTTCTCGTGGCTCTTCTGACCCTCAGGGTGTCACCTGT
GGGGCTGCTACTCTTTCTGCTGAGCGTGTGCGTGGGGACAACAAGGAGTATGAATACTCGGTGGAGTGCCAGGAGGACTCTGCCT
GCCCTGCTGCTGAGGAGTCTCTTCCTATTGAGGTGATGGTGGATGCTGTGCACAAGTTAAAATATGAAAACTACACTTCTTCTTT
CTTCATTCGTGACATTATAAAACCTGACCCTCCCAAGAACCTTCAGTTAAAACCTTTAAAAAACTCTCGTCAGGTGGAGGTGTCC
TGGGAGTACCCTGACACGTGGTCTACTCCTCACTCCTACTTCTCTCTTACTTTCTGTGTCCAGGTGCAGGGCAAGTCCAAGCGTG
AGAAGAAGGACCGTGTCTTCACTGACAAGACTTCTGCTACTGTCATCTGCAGGAAGAATGCATCCATCTCTGTGCGTGCTCAGGA
CCGTTACTACAGCTCTTCCTGGTCTGAGTGGGCTTCTGTGCCCTGCTCTGGCGGCGGCGGCGGCGGCAGCAGAAATCTTCCTGTG
GCTACTCCTGACCCTGGCATGTTCCCCTGCCTTCACCACTCGCAGAACCTTCTTCGTGCTGTGAGCAACATGCTTCAGAAGGCTC
GTCAGACTTTAGAATTCTACCCCTGCACTTCTGAGGAGATTGACCATGAAGACATCACCAAGGACAAGACTTCTACTGTGGAGGC
CTGCCTTCCTTTAGAGCTGACCAAGAATGAATCCTGCTTAAATTCTCGTGAGACTTCTTTCATCACCAATGGCAGCTGCCTTGCC
TCGCGCAAGACTTCTTTCATGATGGCTCTTTGCCTTTCTTCCATCTATGAAGACTTAAAAATGTACCAGGTGGAGTTCAAGACCA
TGAATGCAAAGCTTCTCATGGACCCCAAGCGTCAGATATTTTTGGACCAGAACATGCTTGCTGTCATTGATGAGCTCATGCAGGC
TTTAAACTTCAACTCTGAGACTGTGCCTCAGAAGTCTTCTTTAGAAGAGCCTGACTTCTACAAGACCAAGATAAAACTTTGCATT
CTTCTTCATGCTTTCCGCATCCGTGCTGTGACTATTGACCGTGTGATGTCCTACTTAAATGCTTCT
>hIL15RαB_008 (SEQ ID NO: 821)
ATGTGTCATCAACAACTCGTGATTAGCTGGTTCAGTCTCGTGTTCCTGGCCTCTCCGCTGGTGGCCATCTGGGAGCTTAAGAAGG
ACGTGTACGTGGTGGAGCTCGATTGGTACCCCGATGCTCCTGGCGAGATGGTGGTGCTAACCTGCGATACCCCCGAGGAGGACGG
GATCACTTGGACCCTGGATCAGAGTAGCGAAGTCCTGGGCTCTGGCAAGACACTCACAATCCAGGTGAAGGAATTCGGAGACGCT
GGTCAGTACACTTGCCACAAGGGGGGTGAAGTGCTGTCTCACAGCCTGCTGTTACTGCACAAGAAGGAGGATGGGATCTGGTCAA
CCGACATCCTGAAGGATCAGAAGGAGCCTAAGAACAAGACCTTTCTGAGGTGTGAAGCTAAGAACTATTCCGGAAGATTCACTTG
CTGGTGGTTGACCACAATCAGCACTGACCTGACCTTTTCCGTGAAGTCCAGCAGAGGAAGCAGCGATCCTCAGGGCGTAACGTGC
GGCGCGGCTACCCTGTCAGCTGAGCGGGTTAGAGGCGACAACAAAGAGTATGAGTACTCCGTGGAGTGTCAGGAGGACAGCGCCT
GCCCCGCAGCCGAGGAGAGTCTGCCCATCGAGGTGATGGTGGACGCTGTCCATAAGTTAAAATACGAAAATTACACAAGTTCCTT
TTTCATCCGCGATATTATCAAACCCGATCCCCCCAAGAACCTGCAGCTGAAGCCCCTGAAGAATAGCCGACAGGTGGAAGTCTCT
TGGGAGTATCCTGACACCTGGTCCACGCCTCACAGCTACTTTAGTCTGACTTTCTGTGTCCAGGTCCAGGGCAAGAGCAAGAGAG
AGAAAAAGGATAGAGTGTTTACTGACAAGACATCTGCTACAGTCATCTGCAGAAAGAACGCCAGTATCTCAGTGAGGGCGCAGGA
CAGATACTACAGTAGTAGCTGGAGCGAATGGGCTAGCGTGCCCTGTTCAGGGGGCGGCGGAGGGGGCTCCAGGAATCTGCCCGTG
GCCACCCCCGACCCTGGGATGTTCCCTTGCCTCCATCACTCACAGAACCTGCTCAGAGCAGTGAGCAACATGCTCCAAAAGGCCC
GCCAGACCCTGGAGTTTTACCCTTGTACTTCAGAAGAGATCGATCACGAAGACATAACAAAGGATAAAACCAGCACCGTGGAGGC
CTGTCTGCCTCTAGAACTCACAAAGAATGAAAGCTGTCTGAATTCCAGGGAAACCTCCTTCATTACTAACGGAAGCTGTCTCGCA
TCTCGCAAAACATCATTCATGATGGCCCTCTGCCTGTCTTCTATCTATGAAGATCTCAAGATGTATCAGGTGGAGTTCAAAACAA
TGAACGCCAAGCTGCTGATGGACCCCAAGAGACAGATCTTCCTGGACCAGAACATGCTGGCAGTGATCGATGAGCTGATGCAAGC
CTTGAACTTCAACTCAGAGACAGTGCCGCAAAAGTCCTCGTTGGAGGAACCAGATTTTTACAAAACCAAAATCAAGCTGTGTATC
CTTCTTCACGCCTTTCGGATCAGAGCCGTGACTATCGACCGGGTGATGTCATACCTGAATGCTTCC
>hIL15RαB_009 (SEQ ID NO: 822)
ATGTGCCACCAGCAGCTGGTCATCAGCTGGTTTAGCCTGGTCTTCCTGGCCAGCCCCCTGGTGGCCATCTGGGAGCTGAAGAAAG
ATGTCTATGTTGTAGAGCTGGACTGGTACCCAGATGCTCCTGGAGAAATGGTGGTTCTCACCTGCGACACGCCAGAAGAAGATGG
CATCACCTGGACGCTGGACCAGAGCAGCGAAGTACTGGGCAGTGGAAAAACGCTGACCATACAAGTAAAAGAATTTGGCGATGCT
GGCCAGTACACCTGCCACAAAGGAGGAGAAGTACTGAGCCACAGCCTGCTGCTGCTGCACAAGAAAGAAGATGGCATCTGGAGCA
CCGACATTTTAAAAGACCAGAAGGAGCCCAAGAACAAAACCTTCCTTCGATGTGAGGCGAAGAACTACAGTGGCCGCTTCACCTG
CTGGTGGCTCACCACCATCAGCACCGACCTCACCTTCTCGGTGAAGAGCAGCCGTGGTAGCTCAGACCCCCAAGGAGTCACCTGT
GGGGCGGCCACGCTGTCGGCAGAAAGAGTTCGAGGCGACAACAAGGAATATGAATACTCGGTGGAATGTCAAGAAGACTCGGCCT
GCCCGGCGGCAGAAGAAAGTCTGCCCATAGAAGTCATGGTGGATGCTGTTCACAAATTAAAATATGAAAACTACACCAGCAGCTT
CTTCATCAGAGACATCATCAAGCCAGACCCCCCCAAGAACCTGCAGCTGAAGCCCCTGAAGAACAGCAGACAAGTGGAAGTTTCC
TGGGAGTACCCAGACACGTGGAGCACGCCGCACAGCTACTTCAGCCTCACCTTCTGTGTACAAGTACAAGGCAAGAGCAAGAGAG
AGAAGAAAGATCGTGTCTTCACCGACAAAACCTCGGCGACGGTCATCTGCAGGAAGAATGCAAGCATCTCGGTTCGAGCCCAGGA
CCGCTACTACAGCAGCAGCTGGAGTGAGTGGGCCTCGGTGCCCTGCAGTGGTGGCGGCGGCGGCGGCAGCAGAAACCTTCCTGTG
GCCACGCCGGACCCTGGCATGTTTCCGTGCCTGCACCACAGCCAAAATTTATTACGAGCTGTTAGCAACATGCTGCAGAAAGCAA
GACAAACTTTAGAATTCTACCCCTGCACCTCAGAAGAAATAGACCATGAAGACATCACCAAAGATAAAACCAGCACTGTAGAGGC
CTGCCTGCCCCTGGAGCTCACCAAGAACGAGAGCTGCCTCAATAGCAGAGAGACCAGCTTCATCACCAATGGCAGCTGCCTGGCC
AGCAGGAAAACCAGCTTCATGATGGCGCTCTGCCTGAGCAGCATCTATGAAGATCTGAAGATGTACCAAGTAGAATTTAAAACCA
TGAATGCCAAGCTGCTCATGGACCCCAAGAGACAAATATTCCTCGACCAAAACATGCTGGCTGTCATTGATGAGCTCATGCAAGC
ATTAAACTTCAACTCAGAGACGGTGCCCCAGAAGAGCAGCCTGGAGGAGCCAGACTTCTACAAAACCAAGATCAAGCTCTGCATC
TTATTACATGCCTTCCGCATCCGGGCGGTCACCATTGACCGTGTCATGTCCTACTTAAATGCCAGC
>hIL15RαB_010 (SEQ ID NO: 823)
ATGTGCCACCAGCAGCTTGTCATCTCCTGGTTTTCTCTTGTCTTCCTCGCTTCTCCTCTTGTGGCCATCTGGGAGCTGAAGAAAG
ATGTCTATGTTGTAGAGCTGGACTGGTACCCGGACGCTCCTGGAGAAATGGTGGTTCTCACCTGCGACACTCCTGAAGAAGATGG
CATCACCTGGACGCTGGACCAAAGCAGCGAAGTTTTAGGCTCTGGAAAAACGCTGACCATACAAGTAAAAGAATTTGGCGACGCT
GGCCAGTACACGTGCCACAAAGGAGGAGAAGTTTTAAGCCACAGTTTACTTCTTCTTCACAAGAAAGAAGATGGCATCTGGAGTA
CGGACATTTTAAAAGACCAGAAGGAGCCTAAGAACAAAACCTTCCTCCGCTGTGAAGCTAAGAACTACAGTGGTCGTTTCACCTG
CTGGTGGCTCACCACCATCTCCACTGACCTCACCTTCTCTGTAAAATCAAGCCGTGGTTCTTCTGACCCCCAAGGAGTCACCTGT
GGGGCTGCCACGCTCAGCGCTGAAAGAGTTCGAGGCGACAACAAGGAATATGAATATTCTGTGGAATGTCAAGAAGATTCTGCCT
GCCCGGCGGCAGAAGAAAGTCTTCCCATAGAAGTCATGGTGGACGCTGTTCACAAATTAAAATATGAAAACTACACCAGCAGCTT
CTTCATTCGTGACATCATCAAACCAGACCCTCCTAAGAACCTTCAGTTAAAACCGCTGAAGAACAGCAGACAAGTGGAAGTTTCC
TGGGAGTACCCGGACACGTGGAGTACGCCGCACTCCTACTTCAGTTTAACCTTCTGTGTACAAGTACAAGGAAAATCAAAAAGAG
AGAAGAAAGATCGTGTCTTCACTGACAAAACATCTGCCACGGTCATCTGCCGTAAGAACGCTTCCATCTCGGTTCGAGCCCAGGA
CCGCTACTACAGCAGCAGCTGGAGTGAGTGGGCATCTGTTCCCTGCAGTGGTGGCGGCGGCGGCGGCAGCCGCAACCTTCCTGTG
GCCACGCCGGACCCTGGCATGTTCCCGTGCCTTCACCACTCGCAAAATCTTCTTCGTGCTGTTTCTAACATGCTGCAGAAGGCGA
GACAAACTTTAGAATTCTACCCGTGCACTTCTGAAGAAATAGACCATGAAGACATCACCAAGGACAAAACCAGCACGGTGGAGGC
CTGCCTTCCTTTAGAACTTACTAAGAACGAAAGTTGCCTTAACAGCCGTGAGACCAGCTTCATCACCAATGGCAGCTGCCTTGCT
AGCAGGAAGACCAGCTTCATGATGGCGCTGTGCCTTTCTTCCATCTATGAAGATCTTAAGATGTACCAAGTAGAATTTAAAACCA
TGAATGCCAAATTATTAATGGACCCCAAGAGACAAATATTCCTCGACCAAAACATGCTGGCTGTCATTGATGAGCTCATGCAAGC
ATTAAACTTCAACTCAGAAACTGTTCCCCAGAAGTCATCTTTAGAAGAACCGGACTTCTACAAAACAAAAATAAAACTCTGCATT
CTTCTTCATGCCTTCCGCATCCGTGCTGTCACCATTGACCGTGTCATGTCCTACTTAAATGCTTCT
>hIL15RαB_011 (SEQ ID NO: 824)
ATGTGCCACCAGCAGCTGGTGATCAGCTGGTTCAGCCTGGTGTTCCTGGCCAGCCCCCTGGTGGCCATCTGGGAGCTGAAGAAGG
ACGTGTACGTGGTGGAGCTGGACTGGTACCCGGACGCGCCGGGGGAGATGGTGGTGCTGACGTGCGACACGCCGGAGGAGGACGG
GATCACGTGGACGCTGGACCAGAGCAGCGAGGTGCTGGGGAGCGGGAAGACGCTGACGATCCAGGTGAAGGAGTTCGGGGACGCG
GGGCAGTACACGTGCCACAAGGGGGGGGAGGTGCTGAGCCACAGCCTGCTGCTGCTGCACAAGAAGGAGGACGGGATCTGGAGCA
CGGACATCCTGAAGGACCAGAAGGAGCCGAAGAACAAGACGTTCCTGAGGTGCGAGGCGAAGAACTACAGCGGGAGGTTCACGTG
CTGGTGGCTGACGACGATCAGCACGGACCTGACGTTCAGCGTGAAGAGCAGCAGGGGGAGCAGCGACCCGCAGGGGGTGACGTGC
GGGGCGGCGACGCTGAGCGCGGAGAGGGTGAGGGGGGACAACAAGGAGTACGAGTACAGCGTGGAGTGCCAGGAGGACAGCGCGT
GCCCGGCGGCGGAGGAGAGCCTGCCGATCGAGGTGATGGTGGACGCGGTGCACAAGCTGAAGTACGAGAACTACACGAGCAGCTT
CTTCATCAGGGACATCATCAAGCCGGACCCGCCGAAGAACCTGCAGCTGAAGCCGCTGAAGAACAGCAGGCAGGTGGAGGTGAGC
TGGGAGTACCCGGACACGTGGAGCACGCCGCACAGCTACTTCAGCCTGACGTTCTGCGTGCAGGTGCAGGGGAAGAGCAAGAGGG
AGAAGAAGGACAGGGTGTTCACGGACAAGACGAGCGCGACGGTGATCTGCAGGAAGAACGCGAGCATCAGCGTGAGGGCGCAGGA
CAGGTACTACAGCAGCAGCTGGAGCGAGTGGGCGAGCGTGCCGTGCAGCGGGGGGGGGGGGGGGGGGAGCAGGAACCTGCCGGTG
GCGACGCCGGACCCGGGGATGTTCCCGTGCCTGCACCACAGCCAGAACCTGCTGAGGGCGGTGAGCAACATGCTGCAGAAGGCGA
GGCAGACGCTGGAGTTCTACCCGTGCACGAGCGAGGAGATCGACCACGAGGACATCACGAAGGACAAGACGAGCACGGTGGAGGC
GTGCCTGCCGCTGGAGCTGACGAAGAACGAGAGCTGCCTGAACAGCAGGGAGACGAGCTTCATCACGAACGGGAGCTGCCTGGCG
AGCAGGAAGACGAGCTTCATGATGGCGCTGTGCCTGAGCAGCATCTACGAGGACCTGAAGATGTACCAGGTGGAGTTCAAGACGA
TGAACGCGAAGCTGCTGATGGACCCGAAGAGGCAGATCTTCCTGGACCAGAACATGCTGGCGGTGATCGACGAGCTGATGCAGGC
GCTGAACTTCAACAGCGAGACGGTGCCGCAGAAGAGCAGCCTGGAGGAGCCGGACTTCTACAAGACGAAGATCAAGCTGTGCATC
CTGCTGCACGCGTTCAGGATCAGGGCGGTGACGATCGACAGGGTGATGAGCTACCTGAACGCGAGC
>hIL15RαB_012 (SEQ ID NO: 825)
ATGTGCCATCAGCAGCTGGTGATCAGCTGGTTCAGCCTCGTGTTTCTGGCCAGCCCCCTGGTGGCCATTTGGGAACTCAAGAAGG
ACGTGTATGTAGTGGAACTCGACTGGTACCCTGACGCCCCAGGCGAAATGGTGGTCTTAACCTGCGACACCCCTGAGGAGGACGG
AATCACCTGGACCTTGGACCAGAGCTCCGAGGTCCTCGGCAGTGGCAAGACCCTGACCATACAGGTGAAAGAATTTGGAGACGCA
GGGCAATACACATGTCACAAGGGCGGGGAGGTTCTTTCTCACTCCCTTCTGCTTCTACATAAAAAGGAAGACGGAATTTGGTCTA
CCGACATCCTCAAGGACCAAAAGGAGCCTAAGAATAAAACCTTCTTACGCTGTGAAGCTAAAAACTACAGCGGCAGATTCACTTG
CTGGTGGCTCACCACCATTTCTACCGACCTGACCTTCTCGGTGAAGTCTTCAAGGGGCTCTAGTGATCCACAGGGAGTGACATGC
GGGGCCGCCACACTGAGCGCTGAACGGGTGAGGGGCGATAACAAGGAGTATGAATACTCTGTCGAGTGTCAGGAGGATTCAGCTT
GTCCCGCAGCTGAAGAGTCACTCCCCATAGAGGTTATGGTCGATGCTGTGCATAAACTGAAGTACGAAAACTACACCAGCAGCTT
CTTCATTCGGGACATTATAAAACCTGACCCCCCCAAGAACCTGCAACTTAAACCCCTGAAAAACTCTCGGCAGGTCGAAGTTAGC
TGGGAGTACCCTGATACTTGGTCCACCCCCCACTCGTACTTCTCACTGACTTTCTGTGTGCAGGTGCAGGGCAAGAGCAAGAGAG
AGAAAAAAGATCGTGTATTCACAGACAAGACCTCTGCCACCGTGATCTGCAGAAAAAACGCTTCCATCAGTGTCAGAGCCCAAGA
CCGGTACTATAGTAGTAGCTGGAGCGAGTGGGCAAGTGTCCCCTGCTCTGGCGGCGGAGGGGGCGGCTCTCGAAACCTCCCCGTC
GCTACCCCTGATCCAGGAATGTTCCCTTGCCTGCATCACTCACAGAATCTGCTGAGAGCGGTCAGCAACATGCTGCAGAAAGCTA
GGCAAACACTGGAGTTTTATCCTTGTACCTCAGAGGAGATCGACCACGAGGATATTACCAAGGACAAGACCAGCACGGTGGAGGC
CTGCTTGCCCCTGGAACTGACAAAGAATGAATCCTGCCTTAATAGCCGTGAGACCTCTTTTATAACAAACGGATCCTGCCTGGCC
AGCAGGAAGACCTCCTTCATGATGGCCCTCTGCCTGTCCTCAATCTACGAAGACCTGAAGATGTACCAGGTGGAATTTAAAACTA
TGAACGCCAAGCTGTTGATGGACCCCAAGCGGCAGATCTTTCTGGATCAAAATATGCTGGCTGTGATCGACGAACTGATGCAGGC
CCTCAACTTTAACAGCGAGACCGTGCCACAAAAGAGCAGTCTTGAGGAGCCCGACTTCTACAAGACCAAGATCAAGCTGTGCATC
CTCCTTCATGCCTTCAGGATAAGAGCTGTCACCATCGACAGAGTCATGAGTTACCTGAATGCATCC
>hIL15RαB_013 (SEQ ID NO: 826)
ATGTGCCACCAGCAGCTGGTCATCTCCTGGTTCAGTCTTGTCTTCCTGGCCTCGCCGCTGGTGGCCATCTGGGAGCTGAAGAAAG
ATGTTTATGTTGTAGAGCTGGACTGGTACCCAGATGCTCCTGGAGAAATGGTGGTCCTCACCTGTGACACGCCAGAAGAAGATGG
CATCACCTGGACGCTGGACCAGAGCAGTGAAGTTCTTGGAAGTGGAAAAACGCTGACCATACAAGTAAAAGAATTTGGAGATGCT
GGCCAGTACACCTGCCACAAAGGAGGAGAAGTTCTCAGCCACAGTTTATTATTACTTCACAAGAAAGAAGATGGCATCTGGTCCA
CGGACATTTTAAAAGACCAGAAGGAGCCCAAAAATAAAACATTTCTTCGATGTGAGGCCAAGAACTACAGTGGTCGTTTCACCTG
CTGGTGGCTGACCACCATCTCCACAGACCTCACCTTCAGTGTAAAAAGCAGCCGTGGTTCTTCTGACCCCCAAGGAGTCACCTGT
GGGGCTGCCACGCTCTCTGCAGAAAGAGTTCGAGGGGACAACAAAGAATATGAGTACTCGGTGGAATGTCAAGAAGACTCGGCCT
GCCCAGCTGCTGAGGAGAGTCTTCCCATAGAAGTCATGGTGGATGCTGTTCACAAATTAAAATATGAAAACTACACCAGCAGCTT
CTTCATCAGAGACATCATCAAACCTGACCCGCCCAAGAACTTACAGCTGAAGCCGCTGAAAAACAGCAGACAAGTAGAAGTTTCC
TGGGAGTACCCGGACACCTGGTCCACGCCGCACTCCTACTTCTCCCTCACCTTCTGTGTACAAGTACAAGGCAAGAGCAAGAGAG
AGAAGAAAGATCGTGTCTTCACGGACAAAACATCAGCCACGGTCATCTGCAGGAAAAATGCCAGCATCTCGGTGCGGGCCCAGGA
CCGCTACTACAGCAGCAGCTGGAGTGAGTGGGCATCTGTGCCCTGCAGTGGTGGTGGGGGTGGTGGCAGCAGAAACCTTCCTGTG
GCCACTCCAGACCCTGGCATGTTCCCGTGCCTTCACCACTCCCAAAATTTACTTCGAGCTGTTTCTAACATGCTGCAGAAAGCAA
GACAAACTTTAGAATTCTACCCGTGCACTTCTGAAGAAATTGACCATGAAGACATCACAAAAGATAAAACCAGCACAGTGGAGGC
CTGTCTTCCTTTAGAGCTGACCAAAAATGAATCCTGCCTCAACAGCAGAGAGACCAGCTTCATCACCAATGGCAGCTGCCTGGCC
TCCAGGAAAACCAGCTTCATGATGGCGCTCTGCCTCAGCTCCATCTATGAAGATTTGAAGATGTACCAAGTAGAATTTAAAACCA
TGAATGCCAAATTATTAATGGACCCCAAGAGGCAGATATTTTTAGATCAAAACATGCTGGCAGTTATTGATGAGCTCATGCAAGC
ATTAAACTTCAACAGTGAGACTGTACCTCAAAAAAGCAGCCTTGAAGAGCCGGACTTCTACAAAACCAAGATCAAACTCTGCATT
TTACTTCATGCCTTCCGCATCCGGGCGGTCACCATTGACCGTGTCATGTCCTACTTAAATGCCTCG
>hIL15RαB_014 (SEQ ID NO: 827)
ATGTGCCACCAGCAGCTTGTGATTTCTTGGTTCTCTCTTGTGTTCCTTGCTTCTCCTCTTGTGGCTATTTGGGAGTTAAAAAAGG
ACGTGTACGTGGTGGAGCTTGACTGGTACCCTGATGCTCCTGGCGAGATGGTGGTGCTTACTTGTGACACTCCTGAGGAGGACGG
CATTACTTGGACTCTTGACCAGTCTTCTGAGGTGCTTGGCTCTGGCAAGACTCTTACTATTCAGGTGAAGGAGTTCGGGGATGCT
GGCCAGTACACTTGCCACAAGGGCGGCGAGGTGCTTTCTCACTCTCTTCTTCTTCTTCACAAGAAGGAGGACGGCATTTGGTCTA
CTGACATTTTAAAAGACCAGAAGGAGCCCAAGAACAAGACTTTCCTTCGTTGCGAGGCCAAGAACTACTCTGGCCGTTTCACTTG
CTGGTGGCTTACTACTATTTCTACTGACCTTACTTTCTCTGTGAAGTCTTCTCGTGGCTCTTCTGACCCTCAGGGCGTGACTTGT
GGGGCTGCTACTCTTTCTGCTGAGCGTGTGCGTGGGGACAACAAGGAGTACGAGTACTCTGTGGAGTGCCAGGAGGACTCTGCTT
GCCCTGCTGCTGAGGAGTCTCTTCCTATTGAGGTGATGGTGGATGCTGTGCACAAGTTAAAATACGAGAACTACACTTCTTCTTT
CTTCATTCGTGACATTATTAAGCCTGACCCTCCCAAGAACCTTCAGTTAAAACCTTTAAAAAACTCTCGTCAGGTGGAGGTGTCT
TGGGAGTACCCTGACACTTGGTCTACTCCTCACTCTTACTTCTCTCTTACTTTCTGCGTGCAGGTGCAGGGCAAGTCTAAGCGTG
AGAAGAAGGACCGTGTGTTCACTGACAAGACTTCTGCTACTGTGATTTGCAGGAAGAATGCATCTATTTCTGTGCGTGCTCAGGA
CCGTTACTACTCTTCTTCTTGGTCTGAGTGGGCTTCTGTGCCTTGCTCTGGCGGCGGCGGCGGCGGCTCTAGAAATCTTCCTGTG
GCTACTCCTGACCCTGGCATGTTCCCTTGCCTTCACCACTCTCAGAACCTTCTTCGTGCTGTGAGCAACATGCTTCAGAAGGCTC
GTCAGACTCTTGAGTTCTACCCTTGCACTTCTGAGGAGATTGACCACGAGGACATCACCAAGGACAAGACTTCTACTGTGGAGGC
TTGCCTTCCTCTTGAGCTTACCAAGAATGAATCTTGCTTAAATTCTCGTGAGACTTCTTTCATCACCAACGGCTCTTGCCTTGCC
TCGCGCAAGACTTCTTTCATGATGGCTCTTTGCCTTTCTTCTATTTACGAGGACTTAAAAATGTACCAGGTGGAGTTCAAGACTA
TGAATGCAAAGCTTCTTATGGACCCCAAGCGTCAGATTTTCCTTGACCAGAACATGCTTGCTGTGATTGACGAGCTTATGCAGGC
TTTAAATTTCAACTCTGAGACTGTGCCTCAGAAGTCTTCTCTTGAGGAGCCTGACTTCTACAAGACCAAGATTAAGCTTTGCATT
CTTCTTCATGCTTTCCGTATTCGTGCTGTGACTATTGACCGTGTGATGTCTTACTTAAATGCTTCT
>hIL15RαB_015 (SEQ ID NO: 828)
ATGTGTCACCAGCAGCTGGTGATCAGCTGGTTTAGCCTGGTGTTTCTGGCCAGCCCCCTGGTGGCCATATGGGAACTGAAGAAAG
ATGTGTATGTGGTAGAACTGGATTGGTATCCGGATGCCCCCGGCGAAATGGTGGTGCTGACCTGTGACACCCCCGAAGAAGATGG
TATCACCTGGACCCTGGACCAGAGCAGCGAGGTGCTGGGCAGCGGCAAAACCCTGACCATCCAAGTGAAAGAGTTTGGCGATGCC
GGCCAGTACACCTGTCACAAAGGCGGCGAGGTGCTAAGCCATTCGCTGCTGCTGCTGCACAAAAAGGAAGATGGCATCTGGAGCA
CCGATATCCTGAAGGACCAGAAAGAACCCAAAAATAAGACCTTTCTAAGATGCGAGGCCAAGAATTATAGCGGCCGTTTCACCTG
CTGGTGGCTGACGACCATCAGCACCGATCTGACCTTCAGCGTGAAAAGCAGCAGAGGCAGCAGCGACCCCCAAGGCGTGACGTGC
GGCGCCGCCACCCTGAGCGCCGAGAGAGTGAGAGGCGACAACAAGGAGTATGAGTACAGCGTGGAGTGCCAGGAGGACAGCGCCT
GCCCCGCCGCCGAGGAGAGCCTGCCCATCGAGGTGATGGTGGATGCCGTGCACAAGCTGAAGTATGAAAACTACACCAGCAGCTT
CTTCATCAGAGACATCATCAAACCCGACCCCCCCAAGAACCTGCAGCTGAAGCCCCTGAAGAATAGCAGACAGGTGGAGGTGAGC
TGGGAGTACCCCGACACCTGGAGCACCCCCCATAGCTACTTCAGCCTGACCTTCTGCGTGCAGGTGCAGGGCAAGAGCAAGAGAG
AAAAGAAAGATAGAGTGTTCACGGACAAGACCAGCGCCACGGTGATCTGCAGAAAAAATGCCAGCATCAGCGTGAGAGCCCAGGA
CAGATACTATAGCAGCAGCTGGAGCGAATGGGCCAGCGTGCCCTGCAGCGGCGGCGGCGGCGGCGGCAGCAGAAACCTGCCCGTG
GCCACCCCCGACCCCGGCATGTTCCCCTGCCTGCACCACAGCCAAAACCTGCTGAGAGCCGTGAGCAACATGCTGCAGAAGGCCA
GACAAACCCTGGAATTTTACCCCTGCACCAGCGAAGAGATCGATCATGAAGATATCACCAAAGATAAAACCAGCACCGTGGAGGC
CTGTCTGCCCCTGGAACTGACCAAGAATGAGAGCTGCCTAAATAGCAGAGAGACCAGCTTCATAACCAATGGCAGCTGCCTGGCC
AGCAGAAAGACCAGCTTTATGATGGCCCTGTGCCTGAGCAGCATCTATGAAGACCTGAAGATGTACCAGGTGGAGTTCAAGACCA
TGAATGCCAAGCTGCTGATGGATCCCAAGAGACAGATCTTTCTGGATCAAAACATGCTGGCCGTGATCGATGAGCTGATGCAGGC
CCTGAATTTCAACAGCGAGACCGTGCCCCAAAAAAGCAGCCTGGAAGAACCGGATTTTTATAAAACCAAAATCAAGCTGTGCATA
CTGCTGCATGCCTTCAGAATCAGAGCCGTGACCATCGATAGAGTGATGAGCTATCTGAATGCCAGC
>hIL15RαB_016 (SEQ ID NO: 829)
ATGTGCCACCAGCAGCTGGTCATCAGCTGGTTCAGCCTGGTCTTCCTGGCCAGCCCCCTGGTGGCCATCTGGGAGCTGAAGAAGG
ATGTTTATGTTGTGGAGCTGGACTGGTACCCAGATGCCCCTGGGGAGATGGTGGTGCTGACCTGTGACACCCCAGAAGAGGATGG
CATCACCTGGACCCTGGACCAGAGCTCAGAAGTGCTGGGCAGTGGAAAAACCCTGACCATCCAGGTGAAGGAGTTTGGAGATGCT
GGCCAGTACACCTGCCACAAGGGTGGTGAAGTGCTGAGCCACAGCCTGCTGCTGCTGCACAAGAAGGAGGATGGCATCTGGAGCA
CAGACATCCTGAAGGACCAGAAGGAGCCCAAGAACAAGACCTTCCTTCGCTGTGAAGCCAAGAACTACAGTGGCCGCTTCACCTG
CTGGTGGCTGACCACCATCAGCACAGACCTCACCTTCTCGGTGAAGAGCAGCAGAGGCAGCTCAGACCCCCAGGGTGTCACCTGT
GGGGCGGCCACGCTGTCGGCGGAGAGAGTTCGAGGGGACAACAAGGAGTATGAATACTCGGTGGAGTGCCAGGAGGACTCGGCGT
GCCCGGCGGCAGAAGAGAGCCTGCCCATAGAAGTGATGGTGGATGCTGTGCACAAGCTGAAGTATGAAAACTACACCAGCAGCTT
CTTCATCAGAGACATCATCAAGCCAGACCCGCCCAAGAACCTGCAGCTGAAGCCCCTGAAGAACAGCAGACAAGTGGAGGTTTCC
TGGGAGTACCCAGACACGTGGAGCACCCCCCACAGCTACTTCAGCCTGACCTTCTGTGTCCAGGTGCAGGGCAAGAGCAAGAGAG
AGAAGAAGGACAGAGTCTTCACAGACAAGACCTCGGCCACGGTCATCTGCAGAAAGAATGCCTCCATCTCGGTTCGAGCCCAGGA
CAGATACTACAGCAGCAGCTGGTCAGAATGGGCCTCGGTGCCCTGCAGTGGTGGCGGCGGCGGCGGCAGCAGAAACCTGCCTGTT
GCCACCCCAGACCCTGGGATGTTCCCCTGCCTGCACCACAGCCAGAACTTATTACGAGCTGTTTCTAACATGCTGCAGAAGGCCA
GACAAACCCTGGAGTTCTACCCCTGCACCTCAGAAGAGATTGACCATGAAGACATCACCAAGGACAAGACCAGCACTGTAGAGGC
CTGCCTGCCCCTGGAGCTGACCAAGAATGAAAGCTGCCTGAACAGCAGAGAGACCAGCTTCATCACCAATGGAAGCTGCCTGGCC
AGCAGAAAGACCAGCTTCATGATGGCCCTGTGCCTGAGCAGCATCTATGAAGACCTGAAGATGTACCAGGTGGAGTTCAAGACCA
TGAATGCAAAGCTGCTGATGGACCCCAAGAGACAAATATTTTTGGACCAGAACATGCTGGCTGTCATTGATGAGCTGATGCAGGC
CCTGAACTTCAACTCAGAAACTGTACCCCAGAAGAGCAGCCTGGAGGAGCCAGACTTCTACAAGACCAAGATCAAGCTGTGCATC
CTGCTTCATGCTTTCAGAATCAGAGCTGTCACCATTGACCGCGTGATGAGCTACTTAAATGCCTCG
>hIL15RαB_017 (SEQ ID NO: 830)
ATGTGCCACCAGCAGCTGGTAATCAGCTGGTTTTCCCTCGTCTTTCTGGCATCACCCCTGGTGGCTATCTGGGAGCTGAAGAAGG
ACGTGTACGTGGTGGAGCTGGATTGGTACCCTGACGCCCCGGGGGAAATGGTGGTGTTAACATGCGACACGCCTGAGGAGGACGG
CATCACCTGGACACTGGACCAGAGCAGCGAGGTGCTTGGGTCTGGTAAAACTCTGACTATTCAGGTGAAAGAGTTCGGGGATGCC
GGCCAATATACTTGCCACAAGGGTGGCGAGGTGCTTTCTCATTCTCTGCTCCTGCTGCACAAGAAAGAAGATGGCATTTGGTCTA
CTGATATTCTGAAAGACCAGAAGGAGCCCAAGAACAAGACCTTTCTGAGATGCGAGGCTAAAAACTACAGCGGAAGATTTACCTG
CTGGTGGCTGACCACAATCTCAACCGACCTGACATTTTCAGTGAAGTCCAGCAGAGGGAGCTCCGACCCTCAGGGCGTGACCTGC
GGAGCCGCCACTCTGTCCGCAGAAAGAGTGAGAGGTGATAATAAGGAGTACGAGTATTCAGTCGAGTGCCAAGAGGACTCTGCCT
GCCCAGCCGCCGAGGAGAGCCTGCCAATCGAGGTGATGGTAGATGCGGTACACAAGCTGAAGTATGAGAACTACACATCCTCCTT
CTTCATAAGAGACATTATCAAGCCTGACCCACCTAAAAATCTGCAACTCAAGCCTTTGAAAAATTCAAGACAGGTGGAGGTGAGC
TGGGAGTACCCTGATACTTGGAGCACCCCCCATAGCTACTTTTCGCTGACATTCTGCGTCCAGGTGCAGGGCAAGTCAAAGAGAG
AGAAGAAGGATCGCGTGTTCACTGATAAGACAAGCGCCACAGTGATCTGCAGAAAAAACGCTAGCATTAGCGTCAGAGCACAGGA
CCGGTATTACTCCAGCTCCTGGAGCGAATGGGCATCTGTGCCCTGCAGCGGTGGGGGCGGAGGCGGATCTAGAAACCTCCCCGTT
GCCACACCTGATCCTGGAATGTTCCCCTGTCTGCACCACAGCCAGAACCTGCTGAGAGCAGTGTCTAACATGCTCCAGAAGGCCA
GGCAGACCCTGGAGTTTTACCCCTGCACCAGCGAGGAAATCGATCACGAGGACATCACCAAAGATAAAACCTCCACCGTGGAGGC
CTGCCTGCCCCTGGAACTGACCAAAAACGAGAGCTGCCTGAATAGCAGGGAGACCTCCTTCATCACCAACGGCTCATGCCTTGCC
AGCCGGAAAACTAGCTTCATGATGGCCCTGTGCCTGTCTTCGATCTATGAGGACCTGAAAATGTACCAGGTCGAATTTAAGACGA
TGAACGCAAAGCTGCTGATGGACCCCAAGCGGCAGATCTTTCTGGACCAGAACATGCTGGCAGTCATAGATGAGTTGATGCAGGC
ATTAAACTTCAACAGCGAGACCGTGCCTCAGAAGTCCAGCCTCGAGGAGCCAGATTTTTATAAGACCAAGATCAAACTATGCATC
CTGCTGCATGCTTTCAGGATTAGAGCCGTCACCATCGATCGAGTCATGTCTTACCTGAATGCTAGC
>hIL15RαB_018 (SEQ ID NO: 831)
ATGTGTCACCAACAGTTAGTAATCTCCTGGTTTTCTCTGGTGTTTCTGGCCAGCCCCCTCGTGGCCATCTGGGAGCTTAAAAAGG
ATGTGTACGTGGTGGAGCTGGACTGGTATCCCGATGCACCAGGCGAAATGGTCGTGCTGACCTGCGATACCCCTGAAGAAGATGG
CATCACCTGGACTCTGGACCAGTCTTCCGAGGTGCTTGGATCTGGCAAGACTCTGACAATACAAGTTAAGGAGTTCGGGGACGCA
GGACAGTACACCTGCCACAAAGGCGGCGAGGTCCTGAGTCACTCCCTGTTACTGCTCCACAAGAAAGAGGACGGCATTTGGTCCA
CCGACATTCTGAAGGACCAGAAGGAGCCTAAGAATAAAACTTTCCTGAGATGCGAGGCAAAAAACTATAGCGGCCGCTTTACTTG
CTGGTGGCTTACAACAATCTCTACCGATTTAACTTTCTCCGTGAAGTCTAGCAGAGGATCCTCTGACCCGCAAGGAGTGACTTGC
GGAGCCGCCACCTTGAGCGCCGAAAGAGTCCGTGGCGATAACAAAGAATACGAGTACTCCGTGGAGTGCCAGGAAGATTCCGCCT
GCCCAGCTGCCGAGGAGTCCCTGCCCATTGAAGTGATGGTGGATGCCGTCCACAAGCTGAAGTACGAAAACTATACCAGCAGCTT
CTTCATCCGGGATATCATTAAGCCCGACCCTCCTAAAAACCTGCAACTTAAGCCCCTAAAGAATAGTCGGCAGGTTGAGGTCAGC
TGGGAATATCCTGACACATGGAGCACCCCCCACTCTTATTTCTCCCTGACCTTCTGCGTGCAGGTGCAGGGCAAGAGTAAACGGG
AGAAAAAGGACAGGGTCTTTACCGATAAAACCAGCGCTACGGTTATCTGTCGGAAGAACGCTTCCATCTCCGTCCGCGCTCAGGA
TCGTTACTACTCGTCCTCATGGAGCGAGTGGGCCAGCGTGCCCTGCAGCGGCGGCGGTGGAGGCGGATCCAGAAATCTGCCTGTT
GCCACACCAGACCCTGGCATGTTCCCCTGTCTGCATCATAGCCAGAACCTGCTCAGAGCCGTGAGCAACATGCTCCAGAAGGCCA
GGCAGACATTGGAGTTCTACCCGTGTACATCTGAGGAAATCGATCACGAAGATATAACCAAGGACAAAACCTCTACAGTAGAGGC
TTGTTTGCCCCTGGAGTTGACCAAAAACGAGAGTTGCCTGAACAGTCGCGAGACAAGCTTCATTACTAACGGCAGCTGTCTCGCC
TCCAGAAAGACATCCTTCATGATGGCCCTGTGTCTTTCCAGCATATACGAAGACCTGAAAATGTACCAGGTCGAGTTCAAAACAA
TGAACGCCAAGCTGCTTATGGACCCCAAGAGACAGATCTTCCTCGACCAAAACATGCTCGCTGTGATCGATGAGCTGATGCAGGC
TCTCAACTTCAATTCCGAAACAGTGCCACAGAAGTCCAGTCTGGAAGAACCCGACTTCTACAAGACCAAGATTAAGCTGTGTATT
TTGCTGCATGCGTTTAGAATCAGAGCCGTGACCATTGATCGGGTGATGAGCTACCTGAACGCCTCG
>hIL15RαB_019 (SEQ ID NO: 832)
ATGTGCCACCAGCAGCTTGTCATCTCCTGGTTTTCTCTTGTCTTCCTGGCCTCGCCGCTGGTGGCCATCTGGGAGCTGAAGAAAG
ATGTCTATGTTGTAGAGCTGGACTGGTACCCAGATGCTCCTGGAGAAATGGTGGTTCTCACCTGTGACACTCCTGAAGAAGATGG
CATCACCTGGACGCTGGACCAAAGCTCAGAAGTTCTTGGCAGTGGAAAAACGCTGACCATACAAGTAAAAGAATTTGGGGATGCT
GGCCAGTACACGTGCCACAAAGGAGGAGAAGTTCTCAGCCACAGTTTACTTCTTCTTCACAAGAAAGAAGATGGCATCTGGTCCA
CGGACATTTTAAAAGACCAGAAGGAGCCCAAGAACAAAACCTTCCTCCGCTGTGAGGCCAAGAACTACAGTGGTCGTTTCACCTG
CTGGTGGCTCACCACCATCTCCACTGACCTCACCTTCTCTGTAAAAAGCAGCCGTGGTTCTTCTGACCCCCAAGGAGTCACCTGT
GGGGCTGCCACGCTCTCGGCAGAAAGAGTTCGAGGGGACAACAAGGAATATGAATATTCTGTGGAATGTCAAGAAGATTCTGCCT
GCCCGGCGGCAGAAGAAAGTCTTCCCATAGAAGTCATGGTGGATGCTGTTCACAAATTAAAATATGAAAACTACACCAGCAGCTT
CTTCATTCGTGACATCATCAAACCAGACCCGCCCAAGAACCTTCAGTTAAAACCTTTAAAAAACAGCAGACAAGTAGAAGTTTCC
TGGGAGTACCCGGACACGTGGTCCACGCCGCACTCCTACTTCAGTTTAACCTTCTGTGTACAAGTACAAGGAAAATCAAAAAGAG
AGAAGAAAGATCGTGTCTTCACTGACAAAACATCTGCCACGGTCATCTGCAGGAAGAATGCCTCCATCTCGGTTCGAGCCCAGGA
CCGCTACTACAGCAGCAGCTGGAGTGAGTGGGCATCTGTTCCCTGCAGTGGTGGCGGCGGCGGCGGCAGCCGCAACCTTCCTGTG
GCCACGCCGGACCCTGGCATGTTCCCGTGCCTTCACCACTCCCAAAATCTTCTTCGTGCTGTTTCTAACATGCTGCAGAAGGCGC
GCCAAACTTTAGAATTCTACCCGTGCACTTCTGAAGAAATAGACCATGAAGACATCACCAAAGATAAAACCAGCACGGTGGAGGC
CTGCCTTCCTTTAGAGCTGACCAAGAATGAATCCTGCCTCAACAGCAGAGAGACCAGCTTCATCACCAATGGCAGCTGCCTGGCC
TCGCGCAAGACCAGCTTCATGATGGCGCTGTGCCTTTCTTCCATCTATGAAGATTTAAAGATGTACCAAGTAGAATTTAAAACCA
TGAATGCCAAATTATTAATGGACCCCAAAAGACAAATATTTTTGGATCAAAACATGCTGGCTGTCATTGATGAGCTCATGCAAGC
ATTAAACTTCAACTCAGAAACTGTTCCCCAGAAGTCATCTTTAGAAGAGCCGGACTTCTACAAAACAAAAATAAAACTCTGCATT
CTTCTTCATGCCTTCCGCATCCGTGCTGTCACCATTGACCGTGTCATGTCCTACTTAAATGCTTCT
>hIL15RαB_020 (SEQ ID NO: 833)
ATGTGCCACCAGCAGCTGGTGATCAGCTGGTTCAGCCTGGTGTTCCTGGCTAGCCCTCTGGTGGCCATCTGGGAGCTGAAGAAGG
ACGTGTACGTGGTGGAGTTAGACTGGTACCCCGACGCTCCCGGCGAGATGGTGGTGCTGACCTGCGACACCCCCGAGGAGGACGG
GATCACCTGGACCCTGGATCAGTCAAGCGAGGTGCTGGGAAGCGGCAAGACCCTGACCATCCAGGTGAAGGAGTTCGGCGACGCC
GGCCAATACACTTGCCACAAGGGAGGCGAGGTGCTGTCCCACTCCCTCCTGCTGCTGCACAAAAAGGAAGACGGCATCTGGAGCA
CCGACATCCTGAAAGACCAGAAGGAGCCTAAGAACAAGACATTCCTCAGATGCGAGGCCAAGAATTACTCCGGGAGATTCACCTG
TTGGTGGCTGACCACCATCAGCACAGACCTGACCTTCAGCGTGAAGAGCAGCAGAGGCAGCAGCGACCCCCAGGGCGTGACCTGT
GGCGCCGCCACCCTGAGCGCCGAAAGAGTGCGCGGCGACAACAAGGAGTACGAGTACTCCGTGGAATGCCAGGAGGACAGCGCCT
GCCCCGCCGCCGAGGAGAGCCTGCCCATCGAGGTGATGGTGGACGCCGTCCACAAGCTGAAGTACGAGAACTACACCTCTAGCTT
CTTCATCCGGGACATCATCAAGCCCGATCCCCCCAAGAACCTGCAGCTGAAACCCCTGAAGAACAGCAGACAGGTGGAGGTGAGC
TGGGAGTATCCCGACACCTGGTCCACCCCCCACAGCTATTTTAGCCTGACCTTCTGCGTGCAAGTGCAGGGCAAGAGCAAGAGAG
AGAAGAAGGACCGCGTGTTCACCGACAAAACCAGCGCCACCGTGATCTGCAGAAAGAACGCCAGCATCAGCGTGAGGGCCCAGGA
TAGATACTACAGTTCCAGCTGGAGCGAGTGGGCCAGCGTGCCCTGCAGCGGCGGCGGCGGGGGAGGCTCTAGAAACCTGCCCGTG
GCTACCCCCGATCCCGGAATGTTCCCCTGCCTGCACCACAGCCAGAACCTGCTGAGGGCGGTGTCCAACATGCTTCAGAAGGCCC
GGCAGACCCTGGAGTTCTACCCCTGTACCTCTGAGGAGATCGATCATGAGGACATCACAAAGGACAAAACCAGCACCGTGGAGGC
CTGCCTGCCCCTGGAGCTGACCAAGAACGAGAGCTGCCTGAACTCCCGCGAGACCAGCTTCATCACGAACGGCAGCTGCCTGGCC
AGCAGGAAGACCTCCTTCATGATGGCCCTGTGCCTGAGCAGCATCTACGAGGACCTGAAAATGTACCAGGTGGAGTTTAAGACCA
TGAACGCCAAGCTGCTGATGGACCCCAAGCGGCAAATCTTCCTGGACCAGAACATGCTGGCAGTGATCGACGAGCTCATGCAGGC
CCTGAACTTCAATAGCGAGACAGTCCCCCAGAAGAGCAGCCTGGAGGAGCCCGACTTTTACAAGACCAAGATCAAGCTGTGCATC
CTGCTGCACGCCTTTAGAATCCGTGCCGTGACCATTGACAGAGTGATGAGCTACCTGAATGCCAGC
>hIL15RαB_021 (SEQ ID NO: 834)
ATGTGCCACCAGCAGCTGGTGATCAGCTGGTTCAGCCTGGTGTTCCTGGCCAGCCCTCTGGTTGCCATCTGGGAGCTGAAGAAAG
ACGTGTACGTCGTGGAACTGGACTGGTATCCGGACGCCCCGGGCGAGATGGTGGTGCTGACCTGTGACACCCCCGAGGAGGACGG
CATCACCTGGACGCTGGACCAATCCTCCGAGGTGCTGGGAAGCGGCAAGACCCTGACCATCCAGGTGAAGGAATTCGGGGACGCC
GGGCAGTACACCTGCCACAAGGGGGGCGAAGTGCTGTCCCACTCGCTGCTGCTCCTGCATAAGAAGGAGGATGGAATCTGGTCCA
CCGACATCCTCAAAGATCAGAAGGAGCCCAAGAACAAGACGTTCCTGCGCTGTGAAGCCAAGAATTATTCGGGGCGATTCACGTG
CTGGTGGCTGACAACCATCAGCACCGACCTGACGTTTAGCGTGAAGAGCAGCAGGGGGTCCAGCGACCCCCAGGGCGTGACGTGC
GGCGCCGCCACCCTCTCCGCCGAGAGGGTGCGGGGGGACAATAAGGAGTACGAGTACAGCGTGGAATGCCAGGAGGACAGCGCCT
GCCCCGCCGCGGAGGAAAGCCTCCCGATAGAGGTGATGGTGGACGCCGTGCACAAGCTCAAGTATGAGAATTACACCAGCAGCTT
TTTCATCCGGGACATTATCAAGCCCGACCCCCCGAAGAACCTCCAGCTGAAGCCCCTGAAGAACAGCCGGCAGGTGGAAGTCTCC
TGGGAGTATCCCGACACCTGGAGCACCCCGCACAGCTACTTCTCCCTGACCTTCTGTGTGCAGGTGCAGGGCAAGTCCAAGAGGG
AAAAGAAGGACAGGGTTTTCACCGACAAGACCAGCGCGACCGTGATCTGCCGGAAGAACGCCAGCATAAGCGTCCGCGCCCAAGA
TAGGTACTACAGCAGCTCCTGGAGCGAGTGGGCTAGCGTGCCCTGCAGCGGGGGCGGGGGTGGGGGCTCCAGGAACCTGCCAGTG
GCGACCCCCGACCCCGGCATGTTCCCCTGCCTCCATCACAGCCAGAACCTGCTGAGGGCCGTCAGCAATATGCTGCAGAAGGCCA
GGCAGACCCTGGAATTCTACCCCTGCACGTCGGAGGAGATCGATCACGAGGATATCACAAAAGACAAGACTTCCACCGTGGAGGC
CTGCCTGCCCCTGGAGCTCACCAAGAATGAGTCCTGTCTGAACTCCCGGGAAACCAGCTTCATCACCAACGGGTCCTGCCTGGCC
AGCAGGAAGACCAGCTTTATGATGGCCCTGTGCCTGTCGAGCATCTACGAGGACCTGAAGATGTACCAGGTCGAGTTCAAGACAA
TGAACGCCAAGCTGCTGATGGACCCCAAGAGGCAAATCTTCCTGGACCAGAATATGCTTGCCGTCATCGACGAGCTCATGCAGGC
CCTGAACTTCAACTCCGAGACCGTGCCCCAGAAGAGCAGCCTGGAGGAGCCCGACTTCTACAAGACCAAGATCAAGCTGTGCATC
CTGCTGCACGCGTTCAGGATCCGGGCAGTCACCATCGACCGTGTGATGTCCTACCTGAACGCCAGC
>hIL15RαB_022 (SEQ ID NO: 835)
ATGTGCCATCAGCAGCTGGTGATCAGCTGGTTCAGCCTGGTGTTCCTCGCCTCTCCCCTGGTGGCCATCTGGGAGCTCAAAAAGG
ACGTGTACGTGGTGGAGCTCGACTGGTACCCAGACGCCCCCGGGGAGATGGTGGTGCTGACCTGCGACACCCCCGAAGAAGACGG
CATCACGTGGACCCTCGACCAGTCCAGCGAGGTGCTGGGGAGCGGGAAGACTCTGACCATCCAGGTCAAGGAGTTCGGGGACGCC
GGGCAGTACACGTGCCACAAGGGCGGCGAAGTCTTAAGCCACAGCCTGCTCCTGCTGCACAAGAAGGAGGACGGGATCTGGTCCA
CAGACATACTGAAGGACCAGAAGGAGCCGAAGAATAAAACCTTTCTGAGGTGCGAGGCCAAGAACTATTCCGGCAGGTTCACGTG
CTGGTGGCTTACAACAATCAGCACAGACCTGACGTTCAGCGTGAAGTCCAGCCGCGGCAGCAGCGACCCCCAGGGGGTGACCTGC
GGCGCCGCCACCCTGAGCGCCGAGCGGGTGCGCGGGGACAACAAGGAGTACGAGTACTCCGTGGAGTGCCAGGAAGACAGCGCCT
GTCCCGCCGCCGAAGAGAGCCTGCCTATCGAGGTCATGGTAGATGCAGTGCATAAGCTGAAGTACGAGAACTATACGAGCAGCTT
TTTCATACGCGACATCATCAAGCCCGACCCCCCCAAGAACCTGCAGCTTAAGCCCCTGAAGAATAGCCGGCAGGTGGAGGTCTCC
TGGGAGTACCCCGACACCTGGTCAACGCCCCACAGCTACTTCTCCCTGACCTTTTGTGTCCAAGTCCAGGGAAAGAGCAAGAGGG
AGAAGAAAGATCGGGTGTTCACCGACAAGACCTCCGCCACGGTGATCTGCAGGAAGAACGCCAGCATCTCCGTGAGGGCGCAAGA
CAGGTACTACTCCAGCAGCTGGTCCGAATGGGCCAGCGTGCCCTGCTCCGGCGGCGGGGGCGGCGGCAGCCGAAACCTACCCGTG
GCCACGCCGGATCCCGGCATGTTTCCCTGCCTGCACCACAGCCAGAACCTCCTGAGGGCCGTGTCCAACATGCTGCAGAAGGCCA
GGCAGACTCTGGAGTTCTACCCCTGCACGAGCGAGGAGATCGATCACGAGGACATCACCAAGGATAAGACCAGCACTGTGGAGGC
CTGCCTTCCCCTGGAGCTGACCAAGAACGAGAGCTGTCTGAACTCCAGGGAGACCTCATTCATCACCAACGGCTCCTGCCTGGCC
AGCAGGAAAACCAGCTTCATGATGGCCTTGTGTCTCAGCTCCATCTACGAGGACCTGAAGATGTATCAGGTCGAGTTCAAGACAA
TGAACGCCAAGCTGCTGATGGACCCCAAAAGGCAGATCTTCCTGGACCAGAACATGCTGGCCGTCATCGACGAGCTGATGCAGGC
CCTGAACTTCAACAGCGAGACGGTGCCCCAGAAAAGCTCCCTGGAGGAGCCCGACTTCTACAAGACCAAGATCAAGCTGTGCATC
CTGCTGCACGCCTTCAGGATCAGGGCAGTGACCATCGACCGGGTGATGTCATACCTTAACGCCAGC
>hIL15RαB_023 (SEQ ID NO: 836)
ATGTGCCATCAGCAGCTGGTGATCTCCTGGTTCAGCCTGGTGTTTCTGGCCTCGCCCCTGGTCGCCATCTGGGAGCTGAAGAAAG
ACGTGTACGTCGTCGAACTGGACTGGTACCCCGACGCCCCCGGGGAGATGGTGGTGCTGACCTGCGACACGCCGGAGGAGGACGG
CATCACCTGGACCCTGGATCAAAGCAGCGAGGTGCTGGGCAGCGGCAAGACCCTGACCATCCAAGTGAAGGAATTCGGCGATGCC
GGCCAGTACACCTGTCACAAAGGGGGCGAGGTGCTCAGCCACAGCCTGCTGCTGCTGCACAAGAAGGAGGATGGCATCTGGAGCA
CCGATATCCTGAAGGACCAGAAAGAGCCCAAGAACAAGACGTTCCTGAGGTGCGAGGCCAAGAACTACAGCGGTAGGTTCACGTG
TTGGTGGCTGACCACCATCAGCACCGACCTGACGTTCAGCGTGAAGAGCTCCAGGGGCAGCTCCGACCCACAGGGGGTGACGTGC
GGGGCCGCAACCCTCAGCGCCGAAAGGGTGCGGGGGGACAACAAGGAGTACGAATACTCCGTGGAGTGCCAGGAAGATTCGGCCT
GCCCCGCCGCGGAGGAGAGCCTCCCCATCGAGGTAATGGTGGACGCCGTGCATAAGCTGAAGTACGAGAACTACACCAGCTCGTT
CTTCATCCGAGACATCATCAAACCCGACCCGCCCAAAAATCTGCAGCTCAAGCCCCTGAAGAACTCCAGGCAGGTGGAGGTGAGC
TGGGAGTACCCCGACACCTGGTCCACCCCGCACAGCTACTTCTCCCTGACATTCTGCGTGCAGGTGCAGGGCAAGAGCAAGCGGG
AGAAGAAGGACAGGGTGTTCACCGACAAGACGAGCGCCACCGTGATCTGCCGAAAGAACGCCAGCATCTCGGTGCGCGCCCAGGA
TAGGTACTATTCCAGCTCCTGGAGCGAGTGGGCCTCGGTACCCTGCAGCGGCGGCGGGGGCGGCGGCAGTAGGAATCTGCCCGTG
GCTACCCCGGACCCGGGCATGTTCCCCTGCCTCCACCACAGCCAGAACCTGCTGAGGGCCGTGAGCAACATGCTGCAGAAGGCCA
GACAGACGCTGGAGTTCTACCCCTGCACGAGCGAGGAGATCGACCACGAGGACATCACCAAGGATAAAACTTCCACCGTCGAGGC
CTGCCTGCCCTTGGAGCTGACCAAGAATGAATCCTGTCTGAACAGCAGGGAGACCTCGTTTATCACCAATGGCAGCTGCCTCGCC
TCCAGGAAGACCAGCTTCATGATGGCCCTCTGTCTGAGCTCCATCTATGAGGACCTGAAGATGTACCAGGTGGAGTTCAAGACCA
TGAACGCGAAGCTGCTGATGGACCCCAAGAGGCAGATCTTCCTGGATCAGAATATGCTGGCGGTGATCGACGAGCTCATGCAGGC
CCTCAATTTCAATAGCGAGACAGTGCCCCAGAAGTCCTCCCTGGAGGAGCCCGACTTCTACAAGACCAAGATCAAGCTGTGTATC
CTGCTGCACGCCTTCCGGATCCGGGCCGTCACCATCGACCGGGTCATGAGCTACCTCAATGCCAGC
>hIL15RαB_024 (SEQ ID NO: 837)
ATGTGCCACCAGCAGCTGGTGATCTCCTGGTTCTCCCTGGTGTTCCTGGCCTCGCCCCTGGTGGCCATCTGGGAGCTGAAGAAGG
ACGTGTACGTCGTGGAGCTCGACTGGTACCCCGACGCCCCTGGCGAGATGGTGGTGCTGACCTGCGACACCCCAGAGGAGGATGG
CATCACCTGGACCCTGGATCAGTCCTCCGAGGTGCTGGGCTCCGGCAAGACGCTGACCATCCAAGTGAAGGAGTTCGGTGACGCC
GGACAGTATACCTGCCATAAGGGCGGCGAGGTCCTGTCCCACAGCCTCCTCCTCCTGCATAAGAAGGAGGACGGCATCTGGAGCA
CCGACATCCTGAAGGACCAGAAGGAGCCCAAGAACAAGACCTTTCTGAGGTGCGAGGCCAAGAACTACAGCGGCCGATTCACCTG
CTGGTGGCTCACCACCATATCCACCGACCTGACTTTCTCCGTCAAGTCCTCCCGGGGGTCCAGCGACCCCCAGGGAGTGACCTGC
GGCGCCGCCACCCTCAGCGCCGAGCGGGTGCGGGGGGACAACAAGGAGTACGAATACTCCGTCGAGTGCCAGGAGGACTCCGCCT
GCCCGGCCGCCGAGGAGAGCCTGCCCATCGAGGTGATGGTCGACGCGGTGCACAAGCTGAAGTACGAGAACTACACCAGCAGTTT
CTTCATCAGGGATATCATCAAGCCAGATCCCCCGAAGAATCTGCAACTGAAGCCGCTGAAAAACTCACGACAGGTGGAGGTGAGC
TGGGAGTACCCCGACACGTGGAGCACCCCACATTCCTACTTCAGCCTGACCTTCTGCGTGCAGGTCCAGGGCAAGAGCAAGCGGG
AGAAGAAGGACAGGGTGTTCACGGATAAGACCAGTGCCACCGTGATCTGCAGGAAGAACGCCTCTATTAGCGTGAGGGCCCAGGA
TCGGTATTACTCCTCGAGCTGGAGCGAATGGGCCTCCGTGCCCTGCAGTGGGGGGGGTGGAGGCGGGAGCAGGAACCTGCCCGTA
GCAACCCCCGACCCCGGGATGTTCCCCTGTCTGCACCACTCGCAGAACCTGCTGCGCGCGGTGAGCAACATGCTCCAAAAAGCCC
GTCAGACCTTAGAGTTCTACCCCTGCACCAGCGAAGAAATCGACCACGAAGACATCACCAAGGACAAAACCAGCACCGTGGAGGC
GTGCCTGCCGCTGGAGCTGACCAAGAACGAGAGCTGCCTCAACTCCAGGGAGACCAGCTTTATCACCAACGGCTCGTGCCTAGCC
AGCCGGAAAACCAGCTTCATGATGGCCCTGTGCCTGAGCTCCATTTACGAGGACCTGAAGATGTATCAGGTGGAGTTCAAGACCA
TGAATGCCAAACTCCTGATGGACCCCAAGAGGCAGATCTTCCTGGACCAGAACATGCTCGCGGTGATCGATGAGCTGATGCAGGC
CCTGAACTTTAATAGCGAGACCGTGCCCCAGAAAAGCAGCCTGGAGGAGCCGGACTTCTACAAGACCAAAATCAAGCTGTGCATC
CTGCTCCACGCCTTCCGCATCCGGGCCGTGACCATCGACAGGGTGATGAGCTACCTGAACGCCAGC
>hIL15RαB_025 (SEQ ID NO: 838)
ATGTGCCATCAGCAGCTGGTGATTTCCTGGTTCTCCCTGGTGTTCCTGGCCAGCCCCCTCGTGGCGATCTGGGAGCTAAAGAAGG
ACGTGTACGTGGTGGAGCTGGACTGGTACCCGGACGCACCCGGCGAGATGGTCGTTCTGACCTGCGATACGCCAGAGGAGGACGG
CATCACCTGGACCCTCGATCAGAGCAGCGAGGTCCTGGGGAGCGGAAAGACCCTGACCATCCAGGTCAAGGAGTTCGGCGACGCC
GGCCAGTACACCTGCCACAAAGGTGGCGAGGTCCTGAGCCACTCGCTGCTGCTCCTGCATAAGAAGGAGGACGGAATCTGGAGCA
CAGACATCCTGAAAGACCAGAAGGAGCCCAAGAACAAGACCTTCCTGAGGTGCGAGGCCAAGAACTACAGCGGGCGCTTCACGTG
CTGGTGGCTGACCACCATCAGCACGGACCTCACCTTCTCCGTGAAGAGCAGCCGGGGATCCAGCGATCCCCAAGGCGTCACCTGC
GGCGCGGCCACCCTGAGCGCGGAGAGGGTCAGGGGCGATAATAAGGAGTATGAGTACAGCGTGGAGTGCCAGGAGGACAGCGCCT
GCCCGGCCGCCGAGGAGTCCCTGCCAATCGAAGTGATGGTCGACGCCGTGCACAAGCTGAAGTACGAGAACTACACCAGCAGCTT
CTTCATCCGGGATATCATCAAGCCCGATCCCCCGAAGAACCTGCAGCTGAAGCCCCTCAAGAACAGCCGGCAGGTGGAGGTGAGT
TGGGAGTACCCCGACACCTGGTCAACGCCCCACAGCTACTTCTCCCTGACCTTCTGTGTGCAGGTGCAGGGAAAGAGCAAGAGGG
AGAAGAAAGACCGGGTCTTCACCGACAAGACCAGCGCCACGGTGATCTGCAGGAAGAACGCAAGCATCTCCGTGAGGGCCCAGGA
CAGGTACTACAGCTCCAGCTGGTCCGAATGGGCCAGCGTGCCCTGTAGCGGCGGCGGGGGCGGTGGCAGCCGCAACCTCCCAGTG
GCCACCCCCGACCCCGGCATGTTCCCCTGCCTGCACCACAGCCAGAATCTGCTGAGGGCCGTGAGTAACATGCTGCAGAAGGCAA
GGCAAACCCTCGAATTCTATCCCTGCACCTCCGAGGAGATCGACCACGAGGATATCACCAAGGACAAGACCAGCACCGTCGAGGC
CTGTCTCCCCCTGGAGCTGACCAAGAATGAGAGCTGCCTGAACAGCCGGGAGACCAGCTTCATCACCAACGGGAGCTGCCTGGCC
TCCAGGAAGACCTCGTTCATGATGGCGCTGTGCCTCTCAAGCATATACGAGGATCTGAAGATGTACCAGGTGGAGTTTAAGACGA
TGAACGCCAAGCTGCTGATGGACCCGAAGAGGCAGATCTTCCTGGACCAGAACATGCTGGCCGTGATAGACGAGCTCATGCAGGC
CCTGAACTTCAACTCCGAGACCGTGCCGCAGAAGTCATCCCTCGAGGAGCCCGACTTCTATAAGACCAAGATCAAGCTGTGCATC
CTGCTCCACGCCTTCCGGATAAGGGCCGTGACGATCGACAGGGTGATGAGCTACCTTAACGCCAGC
>hIL15RαB_026 (SEQ ID NO: 839)
ATGTGCCACCAGCAGCTCGTGATCAGCTGGTTCTCCCTGGTGTTTCTCGCCAGCCCCCTGGTGGCCATCTGGGAGCTGAAGAAGG
ACGTGTACGTGGTGGAGCTGGACTGGTACCCTGACGCCCCGGGGGAGATGGTCGTGCTGACCTGCGACACCCCCGAAGAGGACGG
TATCACCTGGACCCTGGACCAGTCCAGCGAGGTGCTGGGCAGCGGCAAGACCCTGACTATTCAAGTCAAGGAGTTCGGAGACGCC
GGCCAGTACACCTGCCACAAGGGTGGAGAGGTGTTATCACACAGCCTGCTGCTGCTGCACAAGAAGGAAGACGGGATCTGGAGCA
CCGACATCCTGAAGGACCAGAAGGAGCCCAAAAACAAGACCTTCCTGCGGTGCGAGGCCAAGAACTATTCGGGCCGCTTTACGTG
CTGGTGGCTGACCACCATCAGCACTGATCTCACCTTCAGCGTGAAGTCCTCCCGGGGGTCGTCCGACCCCCAGGGGGTGACCTGC
GGGGCCGCCACCCTGTCCGCCGAGAGAGTGAGGGGCGATAATAAGGAGTACGAGTACAGCGTTGAGTGCCAGGAAGATAGCGCCT
GTCCCGCCGCCGAGGAGAGCCTGCCCATCGAGGTGATGGTGGACGCCGTCCACAAGCTGAAGTATGAGAACTACACCTCAAGCTT
CTTCATCAGGGACATCATCAAACCCGATCCGCCCAAGAATCTGCAGCTGAAGCCCCTGAAAAATAGCAGGCAGGTGGAGGTGAGC
TGGGAGTACCCCGACACCTGGTCCACCCCCCATAGCTATTTCTCCCTGACGTTCTGCGTGCAGGTGCAAGGGAAGAGCAAGCGGG
AGAAGAAGGACCGGGTGTTCACCGACAAGACCTCCGCCACCGTGATCTGTAGGAAGAACGCGTCGATCTCGGTCAGGGCCCAGGA
CAGGTATTACAGCAGCAGCTGGAGCGAGTGGGCGAGCGTGCCCTGCTCGGGCGGCGGCGGCGGCGGGAGCAGAAATCTGCCCGTG
GCCACCCCAGACCCCGGAATGTTCCCCTGCCTGCACCATTCGCAGAACCTCCTGAGGGCCGTGAGCAACATGCTGCAGAAGGCCC
GCCAGACGCTGGAGTTCTACCCCTGCACGAGCGAGGAGATCGACCACGAAGACATCACCAAGGACAAAACCAGCACCGTGGAGGC
CTGCCTGCCCCTGGAGCTGACCAAAAACGAATCCTGCCTCAACAGCCGGGAGACCAGCTTCATCACCAACGGCAGCTGCCTGGCC
AGCCGAAAGACCTCCTTCATGATGGCCCTCTGCCTGAGCAGCATCTATGAGGATCTGAAGATGTATCAGGTGGAGTTCAAGACCA
TGAATGCCAAGCTGCTGATGGACCCCAAGAGGCAGATATTCCTGGACCAGAATATGCTGGCCGTGATCGACGAGCTGATGCAGGC
CCTGAACTTCAACAGCGAGACCGTCCCCCAGAAGTCCAGCCTGGAGGAGCCGGACTTTTACAAAACGAAGATCAAGCTGTGCATA
CTGCTGCACGCCTTCAGGATCCGGGCCGTGACAATCGACAGGGTGATGTCCTACCTGAACGCCAGC
>hIL15RαB_027 (SEQ ID NO: 840)
ATGTGTCACCAGCAGCTGGTGATCAGCTGGTTCTCCCTGGTGTTCCTGGCCAGCCCCCTGGTGGCCATCTGGGAGCTCAAGAAGG
ACGTCTACGTCGTGGAGCTGGATTGGTACCCCGACGCTCCCGGGGAGATGGTGGTGCTGACCTGCGACACCCCCGAGGAGGACGG
CATCACCTGGACGCTGGACCAGAGCTCAGAGGTGCTGGGAAGCGGAAAGACACTGACCATCCAGGTGAAGGAGTTCGGGGATGCC
GGGCAGTATACCTGCCACAAGGGCGGCGAAGTGCTGAGCCATTCCCTGCTGCTGCTGCACAAGAAGGAGGACGGCATATGGTCCA
CCGACATCCTGAAGGATCAGAAGGAGCCGAAGAATAAAACCTTCCTGAGGTGCGAGGCCAAGAATTACAGCGGCCGATTCACCTG
CTGGTGGCTGACCACCATCAGCACCGACCTGACCTTCAGTGTGAAGTCCTCACGGGGCAGCTCAGATCCCCAGGGCGTGACCTGC
GGGGCCGCGACACTCAGCGCCGAGCGGGTGAGGGGTGATAACAAGGAGTACGAGTATTCTGTGGAGTGCCAGGAAGACTCCGCCT
GTCCCGCCGCCGAGGAGTCCCTGCCCATCGAGGTGATGGTGGACGCCGTGCATAAACTGAAGTACGAGAACTACACCTCCAGCTT
CTTCATCCGGGATATAATCAAGCCCGACCCTCCGAAAAACCTGCAGCTGAAGCCCCTTAAAAACAGCCGGCAGGTGGAGGTGAGC
TGGGAGTACCCCGACACCTGGAGCACCCCCCATAGCTATTTCAGCCTGACCTTCTGCGTGCAGGTGCAGGGGAAGTCCAAGCGCG
AGAAAAAGGACCGGGTGTTCACCGACAAGACGAGCGCCACCGTGATCTGCCGGAAGAACGCCAGTATAAGCGTAAGGGCCCAGGA
TAGGTACTACAGCTCCAGCTGGTCGGAGTGGGCCTCCGTGCCCTGTTCCGGCGGCGGGGGGGGTGGCAGCAGGAACCTCCCCGTG
GCCACGCCGGACCCCGGCATGTTCCCGTGCCTGCACCACTCCCAAAACCTCCTGCGGGCCGTCAGCAACATGCTGCAAAAGGCGC
GGCAGACCCTGGAGTTTTACCCCTGTACCTCCGAAGAGATCGACCACGAGGATATCACCAAGGATAAGACCTCCACCGTGGAGGC
CTGTCTCCCCCTGGAGCTGACCAAGAACGAGAGCTGTCTTAACAGCAGAGAGACCTCGTTCATAACGAACGGCTCCTGCCTCGCT
TCCAGGAAGACGTCGTTCATGATGGCGCTGTGCCTGTCCAGCATCTACGAGGACCTGAAGATGTATCAGGTCGAGTTCAAAACCA
TGAACGCCAAGCTGCTGATGGACCCCAAGAGGCAGATCTTCCTGGACCAGAACATGCTCGCCGTGATCGACGAGCTGATGCAGGC
CCTGAACTTCAACAGCGAAACCGTGCCCCAGAAGTCAAGCCTGGAGGAGCCGGACTTCTATAAGACCAAGATCAAGCTGTGTATC
CTGCTACACGCTTTTCGTATCCGGGCCGTGACCATCGACAGGGTTATGTCGTACTTGAACGCCAGC
>hIL15RαB_028 (SEQ ID NO: 841)
ATGTGCCACCAACAGCTCGTGATCAGCTGGTTCAGCCTGGTGTTCCTGGCCAGCCCGCTGGTGGCCATCTGGGAGCTGAAGAAGG
ACGTGTACGTGGTGGAGCTGGACTGGTACCCCGACGCCCCCGGCGAGATGGTGGTCCTGACCTGCGACACGCCGGAAGAGGACGG
CATCACCTGGACCCTGGATCAGTCCAGCGAGGTGCTGGGCTCCGGCAAGACCCTGACCATTCAGGTGAAGGAGTTCGGCGACGCC
GGTCAGTACACCTGCCACAAGGGCGGCGAGGTGCTGAGCCACAGCCTACTGCTCCTGCACAAAAAGGAGGATGGAATCTGGTCCA
CCGACATCCTCAAGGACCAGAAGGAGCCGAAGAACAAGACGTTCCTCCGGTGCGAGGCCAAGAACTACAGCGGCAGGTTTACCTG
CTGGTGGCTGACCACCATCAGCACCGACCTGACATTTTCCGTGAAGAGCAGCCGCGGCAGCAGCGATCCCCAGGGCGTGACCTGC
GGGGCGGCCACCCTGTCCGCCGAGCGTGTGAGGGGCGACAACAAGGAGTACGAGTACAGCGTGGAATGCCAGGAGGACAGCGCCT
GTCCCGCCGCCGAGGAGAGCCTGCCAATCGAGGTCATGGTGGACGCCGTGCACAAGCTGAAGTACGAGAACTACACGAGCAGCTT
CTTCATCAGGGACATCATCAAACCGGACCCGCCCAAGAACCTGCAGCTGAAACCCTTGAAAAACAGCAGGCAGGTGGAAGTGTCT
TGGGAGTACCCCGACACCTGGTCCACCCCCCACAGCTACTTTAGCCTGACCTTCTGTGTGCAGGTCCAGGGCAAGTCCAAGAGGG
AGAAGAAGGACAGGGTGTTCACCGACAAAACCAGCGCCACCGTGATCTGCAGGAAGAACGCCTCCATCAGCGTGCGGGCCCAGGA
CAGGTATTACAGCTCGTCGTGGAGCGAGTGGGCCAGCGTGCCCTGCTCCGGGGGAGGCGGCGGCGGAAGCCGGAATCTGCCCGTG
GCCACCCCCGATCCCGGCATGTTCCCGTGTCTGCACCACAGCCAGAACCTGCTGCGGGCCGTGAGCAACATGCTGCAGAAGGCCC
GCCAAACCCTGGAGTTCTACCCCTGTACAAGCGAGGAGATCGACCATGAGGACATTACCAAGGACAAGACCAGCACCGTGGAGGC
CTGCCTGCCCCTCGAGCTCACAAAGAACGAATCCTGCCTGAATAGCCGCGAGACCAGCTTTATCACGAACGGGTCCTGCCTCGCC
AGCCGGAAGACAAGCTTCATGATGGCCCTGTGCCTGAGCAGCATCTACGAGGACCTGAAAATGTACCAAGTGGAGTTCAAAACGA
TGAACGCCAAGCTGCTGATGGACCCCAAGCGCCAGATCTTCCTGGACCAGAACATGCTGGCCGTCATCGACGAGCTCATGCAGGC
CCTGAACTTCAACAGCGAGACCGTGCCCCAGAAGAGCAGCCTGGAGGAGCCCGACTTCTACAAGACGAAGATCAAGCTCTGCATC
CTGCTGCACGCTTTCCGCATCCGCGCGGTGACCATCGACCGGGTGATGAGCTACCTCAACGCCAGT
>hIL15RαB_029 (SEQ ID NO: 842)
ATGTGCCACCAACAGCTGGTGATCAGCTGGTTCAGCCTGGTGTTTCTGGCCTCCCCTCTGGTGGCCATCTGGGAGCTGAAGAAGG
ACGTGTACGTGGTGGAGCTGGACTGGTACCCTGACGCCCCCGGCGAAATGGTGGTGCTGACGTGCGACACCCCCGAGGAGGATGG
CATCACCTGGACCCTGGACCAAAGCAGCGAGGTCCTCGGAAGCGGCAAGACCCTCACTATCCAAGTGAAGGAGTTCGGGGATGCG
GGCCAGTACACCTGCCACAAGGGCGGCGAGGTGCTGTCTCATAGCCTGCTGCTCCTGCATAAGAAGGAAGACGGCATCTGGAGCA
CCGACATACTGAAGGATCAGAAGGAGCCCAAGAACAAGACCTTCCTGAGGTGCGAGGCCAAGAACTACTCCGGGCGCTTCACCTG
TTGGTGGCTGACCACCATCTCCACCGACCTGACCTTCAGCGTGAAGAGCAGCAGGGGGAGCAGCGACCCCCAGGGGGTGACCTGC
GGAGCCGCGACCTTGTCGGCCGAGCGGGTGAGGGGCGACAATAAGGAGTACGAGTACTCGGTCGAATGCCAGGAGGACTCCGCCT
GCCCCGCCGCCGAGGAGTCCCTCCCCATCGAAGTGATGGTGGACGCCGTCCACAAGCTGAAGTACGAGAACTACACCAGCAGCTT
CTTCATACGGGATATCATCAAGCCCGACCCCCCGAAGAACCTGCAGCTGAAACCCTTGAAGAACTCCAGGCAGGTGGAGGTGAGC
TGGGAGTACCCCGACACCTGGTCCACCCCGCACTCATACTTCAGCCTGACCTTCTGTGTACAGGTCCAGGGCAAGAGCAAGAGGG
AAAAGAAGGATAGGGTGTTCACCGACAAGACCTCCGCCACGGTGATCTGTCGGAAAAACGCCAGCATCTCCGTGCGGGCCCAGGA
CAGGTACTATTCCAGCAGCTGGAGCGAGTGGGCCTCCGTCCCCTGCTCCGGCGGCGGTGGCGGGGGCAGCAGGAACCTCCCCGTG
GCCACCCCCGATCCCGGGATGTTCCCATGCCTGCACCACAGCCAAAACCTGCTGAGGGCCGTCTCCAATATGCTGCAGAAGGCGA
GGCAGACCCTGGAGTTCTACCCCTGTACCTCCGAGGAGATCGACCACGAGGATATCACCAAGGACAAGACCTCCACGGTCGAGGC
GTGCCTGCCCCTGGAGCTCACGAAGAACGAGAGCTGCCTTAACTCCAGGGAAACCTCGTTTATCACGAACGGCAGCTGCCTGGCG
TCACGGAAGACCTCCTTTATGATGGCCCTATGTCTGTCCTCGATCTACGAGGACCTGAAGATGTACCAGGTGGAGTTCAAGACCA
TGAACGCCAAGCTGCTGATGGATCCCAAGAGGCAGATTTTCCTGGACCAGAACATGCTGGCCGTGATTGACGAGCTGATGCAGGC
GCTGAACTTCAACAGCGAGACAGTGCCGCAGAAGAGCTCCCTGGAGGAGCCGGACTTTTACAAGACCAAGATAAAGCTGTGCATC
CTGCTCCACGCCTTCAGAATACGGGCCGTCACCATCGATAGGGTGATGTCTTACCTGAACGCCTCC
>hIL15RαB_030 (SEQ ID NO: 843)
ATGTGCCACCAGCAGCTGGTGATTAGCTGGTTTAGCCTGGTGTTCCTGGCAAGCCCCCTGGTGGCCATCTGGGAACTGAAAAAGG
ACGTGTACGTGGTCGAGCTGGATTGGTACCCCGACGCCCCCGGCGAAATGGTGGTGCTGACGTGTGATACCCCCGAGGAGGACGG
GATCACCTGGACCCTGGATCAGAGCAGCGAGGTGCTGGGGAGCGGGAAGACCCTGACGATCCAGGTCAAGGAGTTCGGCGACGCT
GGGCAGTACACCTGTCACAAGGGCGGGGAGGTGCTGTCCCACTCCCTGCTGCTCCTGCATAAGAAAGAGGACGGCATCTGGTCCA
CCGACATCCTCAAGGACCAGAAGGAGCCCAAGAACAAGACCTTCCTGCGGTGTGAGGCGAAGAACTACAGCGGCCGTTTCACCTG
CTGGTGGCTGACGACAATCAGCACCGACTTGACGTTCTCCGTGAAGTCCTCCAGAGGCAGCTCCGACCCCCAAGGGGTGACGTGC
GGCGCGGCCACCCTGAGCGCCGAGCGGGTGCGGGGGGACAACAAGGAGTACGAGTACTCCGTGGAGTGCCAGGAGGACAGCGCCT
GTCCCGCAGCCGAGGAGTCCCTGCCCATCGAAGTCATGGTGGACGCCGTCCACAAGCTGAAGTACGAGAACTACACCAGCAGCTT
CTTCATCCGCGATATCATCAAGCCCGATCCCCCCAAAAACCTGCAACTGAAGCCGCTGAAGAATAGCAGGCAGGTGGAGGTGTCC
TGGGAGTACCCGGACACCTGGAGCACGCCCCACAGCTATTTCAGCCTGACCTTTTGCGTGCAGGTCCAGGGGAAGAGCAAGCGGG
AGAAGAAGGACCGCGTGTTTACGGACAAAACCAGCGCCACCGTGATCTGCAGGAAGAACGCCAGCATCAGCGTGAGGGCCCAGGA
CAGGTACTACAGCAGCTCCTGGAGCGAGTGGGCCTCCGTGCCCTGTTCCGGAGGCGGCGGGGGCGGTTCCCGGAACCTCCCGGTG
GCCACCCCCGACCCGGGCATGTTCCCGTGCCTGCACCACTCACAGAATCTGCTGAGGGCCGTGAGCAATATGCTGCAGAAGGCAA
GGCAGACCCTGGAGTTTTATCCCTGCACCAGCGAGGAGATCGACCACGAAGACATCACCAAGGACAAGACCAGCACAGTGGAGGC
CTGCCTGCCCCTGGAACTGACCAAGAACGAGTCCTGTCTGAACTCCCGGGAAACCAGCTTCATAACCAACGGCTCCTGTCTCGCC
AGCAGGAAGACCAGCTTCATGATGGCCCTGTGCCTCAGCTCCATCTACGAGGACCTCAAGATGTACCAGGTTGAGTTCAAGACCA
TGAACGCCAAGCTCCTGATGGACCCCAAGAGGCAGATCTTCCTGGACCAGAATATGCTGGCCGTGATCGATGAGTTAATGCAGGC
GCTGAACTTCAACAGCGAGACGGTGCCCCAAAAGTCCTCGCTGGAGGAGCCCGACTTCTACAAGACCAAGATCAAGCTGTGCATC
CTCCTGCACGCCTTCCGAATCCGGGCCGTAACCATCGACAGGGTGATGAGCTATCTCAACGCCTCC
>hIL15RαB_031 (SEQ ID NO: 844)
ATGTGCCACCAGCAGCTCGTGATCAGCTGGTTCTCGCTTGTGTTCCTGGCCTCCCCCCTCGTCGCCATCTGGGAGCTGAAGAAAG
ACGTGTACGTGGTGGAGCTGGACTGGTATCCCGACGCCCCGGGGGAGATGGTGGTGCTGACCTGCGACACCCCGGAAGAGGACGG
CATCACCTGGACGCTCGACCAGTCGTCCGAAGTGCTGGGGTCGGGCAAGACCCTCACCATCCAGGTGAAGGAGTTCGGAGACGCC
GGCCAGTACACCTGTCATAAGGGGGGGGAGGTGCTGAGCCACAGCCTCCTGCTCCTGCACAAAAAGGAGGACGGCATCTGGAGCA
CCGATATCCTCAAGGACCAGAAGGAGCCCAAGAACAAGACGTTCCTGAGGTGTGAGGCCAAGAACTACAGCGGGCGGTTCACGTG
TTGGTGGCTCACCACCATCTCCACCGACCTCACCTTCTCCGTGAAGTCAAGCAGGGGCAGCTCCGACCCCCAAGGCGTCACCTGC
GGCGCCGCCACCCTGAGCGCCGAGAGGGTCAGGGGGGATAACAAGGAATACGAGTACAGTGTGGAGTGCCAAGAGGATAGCGCCT
GTCCCGCCGCCGAAGAGAGCCTGCCCATCGAAGTGATGGTGGACGCCGTGCACAAGCTGAAGTACGAGAACTACACCTCCAGCTT
CTTCATCAGGGATATCATCAAGCCCGATCCCCCCAAGAACCTGCAGCTGAAGCCCCTGAAGAACAGCAGGCAGGTGGAGGTGAGC
TGGGAGTATCCCGACACGTGGAGCACCCCGCACAGCTACTTCTCGCTGACCTTCTGCGTGCAGGTGCAAGGGAAGTCCAAGAGGG
AGAAGAAGGATAGGGTGTTCACCGACAAAACGAGCGCCACCGTGATCTGCCGGAAGAATGCCAGCATCTCTGTGAGGGCCCAGGA
CAGGTACTATTCCAGCTCCTGGTCGGAGTGGGCCAGCGTGCCCTGTAGCGGCGGGGGCGGGGGCGGCAGCAGGAACCTCCCGGTT
GCCACCCCCGACCCCGGCATGTTTCCGTGCCTGCACCACTCGCAAAACCTGCTGCGCGCGGTCTCCAACATGCTGCAAAAAGCGC
GCCAGACGCTGGAGTTCTACCCCTGCACCAGCGAGGAGATCGATCATGAAGATATCACCAAAGACAAGACCTCGACCGTGGAGGC
CTGCCTGCCCCTGGAGCTCACCAAGAACGAAAGCTGCCTGAACAGCAGGGAGACAAGCTTCATCACCAACGGCAGCTGCCTGGCC
TCCCGGAAGACCAGCTTCATGATGGCCCTGTGCCTGTCCAGCATCTACGAGGATCTGAAGATGTACCAAGTGGAGTTTAAGACCA
TGAACGCCAAGCTGTTAATGGACCCCAAAAGGCAGATCTTCCTGGATCAGAACATGCTGGCCGTCATCGACGAGCTGATGCAAGC
CCTGAACTTCAACAGCGAGACGGTGCCCCAGAAGAGCAGCCTCGAGGAGCCCGACTTCTATAAGACCAAGATAAAGCTGTGCATT
CTGCTGCACGCCTTCAGAATCAGGGCCGTGACCATCGATAGGGTGATGAGCTACCTGAACGCCAGC
>hIL15RαB_032 (SEQ ID NO: 845)
ATGTGTCACCAGCAGCTGGTGATTTCCTGGTTCAGTCTGGTGTTTCTTGCCAGCCCCCTGGTGGCCATCTGGGAGCTGAAGAAAG
ACGTATACGTCGTGGAGCTGGACTGGTATCCCGACGCTCCCGGCGAGATGGTGGTCCTCACCTGCGACACCCCAGAGGAGGACGG
CATCACCTGGACCCTGGACCAGAGCTCCGAGGTCCTGGGCAGCGGTAAGACCCTCACCATCCAGGTGAAGGAGTTTGGTGATGCC
GGGCAGTATACCTGCCACAAGGGCGGCGAGGTGCTGTCCCACAGCCTCCTGTTACTGCATAAGAAGGAGGATGGCATCTGGAGCA
CCGACATCCTCAAGGACCAGAAAGAGCCCAAGAACAAGACCTTTCTGCGGTGCGAGGCGAAAAATTACTCCGGCCGGTTCACCTG
CTGGTGGCTGACCACCATCAGCACGGACCTGACGTTCTCCGTGAAGTCGAGCAGGGGGAGCTCCGATCCCCAGGGCGTGACCTGC
GGCGCGGCCACCCTGAGCGCCGAGCGCGTCCGCGGGGACAATAAGGAATACGAATATAGCGTGGAGTGCCAGGAGGACAGCGCCT
GCCCCGCGGCCGAGGAGAGCCTCCCGATCGAGGTGATGGTGGATGCCGTCCACAAGCTCAAATACGAAAACTACACCAGCAGCTT
CTTCATTAGGGACATCATCAAGCCCGACCCCCCCAAAAACCTGCAGCTGAAGCCCCTGAAGAACAGCCGCCAGGTCGAGGTGTCA
TGGGAGTACCCAGACACCTGGAGCACCCCCCACTCCTACTTCAGCCTGACCTTCTGCGTCCAGGTGCAGGGAAAGTCCAAACGGG
AGAAGAAGGATAGGGTCTTTACCGATAAGACGTCGGCCACCGTCATCTGCAGGAAGAACGCCAGCATAAGCGTGCGGGCGCAGGA
TCGGTACTACAGCTCGAGCTGGTCCGAATGGGCCTCCGTGCCCTGTAGCGGAGGGGGTGGCGGGGGCAGCAGGAACCTGCCCGTG
GCCACCCCGGACCCGGGCATGTTTCCCTGCCTGCATCACAGTCAGAACCTGCTGAGGGCCGTGAGCAACATGCTCCAGAAGGCCC
GCCAGACCCTGGAGTTTTACCCCTGCACCAGCGAAGAGATCGATCACGAAGACATCACCAAAGACAAGACCTCCACCGTGGAGGC
CTGTCTGCCCCTGGAGCTGACCAAGAACGAGAGCTGTCTGAACAGCAGGGAGACCTCCTTCATCACCAACGGCTCCTGCCTGGCA
TCCCGGAAGACCAGCTTCATGATGGCCCTGTGTCTGAGCTCTATCTACGAGGACCTGAAGATGTACCAGGTCGAGTTCAAGACCA
TGAACGCCAAGCTGCTGATGGACCCCAAGCGACAGATATTCCTGGACCAGAACATGCTCGCCGTGATCGATGAACTGATGCAAGC
CCTGAACTTCAATAGCGAGACCGTGCCCCAGAAAAGCAGCCTGGAGGAGCCCGACTTCTACAAGACCAAGATCAAACTGTGCATA
CTGCTGCACGCGTTCAGGATCCGGGCCGTCACCATCGACCGGGTGATGTCCTATCTGAATGCCAGC
>hIL15RαB_033 (SEQ ID NO: 846)
ATGTGCCACCAGCAGCTCGTGATTAGCTGGTTTTCGCTGGTGTTCCTGGCCAGCCCTCTCGTGGCCATCTGGGAGCTGAAAAAAG
ACGTGTACGTGGTGGAGCTGGACTGGTACCCGGACGCCCCCGGCGAGATGGTGGTGCTGACGTGCGACACCCCGGAAGAGGACGG
CATCACCTGGACCCTGGACCAGTCATCCGAGGTCCTGGGCAGCGGCAAGACGCTCACCATCCAGGTGAAGGAGTTCGGCGACGCC
GGCCAGTACACATGCCATAAGGGCGGGGAGGTGCTGAGCCACAGCCTGCTCCTCCTGCACAAGAAGGAGGATGGCATCTGGTCTA
CAGACATCCTGAAGGACCAGAAAGAGCCCAAGAACAAGACCTTCCTCCGGTGCGAGGCCAAGAACTACTCCGGGCGGTTTACTTG
TTGGTGGCTGACCACCATCAGCACCGACCTCACCTTCAGCGTGAAGAGCTCCCGAGGGAGCTCCGACCCCCAGGGGGTCACCTGC
GGCGCCGCCACCCTGAGCGCCGAGCGGGTGAGGGGCGACAACAAGGAGTATGAATACAGCGTGGAATGCCAAGAGGACAGCGCCT
GTCCCGCGGCCGAGGAAAGCCTGCCCATCGAGGTGATGGTGGACGCCGTCCACAAACTCAAGTACGAGAACTACACCAGCAGTTT
CTTCATTCGCGACATCATCAAGCCGGACCCCCCCAAAAACCTGCAGCTCAAACCCCTGAAGAACAGCAGGCAGGTGGAGGTCAGC
TGGGAGTACCCGGACACCTGGAGCACCCCCCATAGCTACTTCAGCCTGACCTTCTGCGTGCAGGTGCAGGGCAAGAGCAAACGCG
AGAAGAAGGACCGGGTGTTTACCGACAAGACCAGCGCCACGGTGATCTGCCGAAAGAATGCAAGCATCTCCGTGAGGGCGCAGGA
CCGCTACTACTCTAGCAGCTGGAGCGAGTGGGCCAGCGTGCCCTGCAGCGGTGGCGGCGGAGGCGGCAGCCGTAACCTCCCCGTG
GCCACCCCCGACCCCGGCATGTTCCCGTGTCTGCACCACTCCCAGAACCTGCTGAGGGCCGTCAGCAATATGCTGCAGAAGGCCC
GGCAGACGCTGGAGTTCTACCCCTGCACCTCCGAGGAGATCGACCATGAGGACATTACCAAGGACAAGACGAGCACTGTGGAGGC
CTGCCTGCCCCTGGAGCTCACCAAAAACGAGAGCTGCCTGAATAGCAGGGAGACGTCCTTCATCACCAACGGCAGCTGTCTGGCC
AGCAGGAAGACCAGCTTCATGATGGCCCTGTGCCTCTCCTCCATATATGAGGATCTGAAGATGTACCAGGTGGAGTTCAAGACCA
TGAACGCCAAGCTGCTGATGGATCCCAAGAGGCAGATCTTCCTGGACCAGAATATGCTGGCCGTGATTGACGAGCTGATGCAGGC
CCTGAACTTTAATAGCGAGACCGTCCCCCAGAAGAGCAGCCTGGAGGAGCCCGACTTCTATAAGACCAAGATCAAGCTGTGCATA
CTGCTGCACGCGTTTAGGATAAGGGCCGTCACCATCGACAGGGTGATGAGCTACCTGAATGCCAGC
>hIL15RαB_034 (SEQ ID NO: 847)
ATGTGCCACCAACAGCTGGTGATCTCCTGGTTCAGCCTGGTGTTCCTCGCCAGCCCCCTGGTGGCCATCTGGGAGCTGAAGAAAG
ACGTGTACGTGGTGGAGCTGGACTGGTATCCCGACGCCCCCGGCGAGATGGTCGTGCTGACCTGCGACACCCCGGAGGAGGACGG
CATCACCTGGACCCTGGATCAGTCCTCCGAGGTGCTGGGCAGCGGGAAGACCCTGACCATCCAGGTGAAAGAGTTCGGAGATGCC
GGCCAGTATACCTGTCACAAGGGGGGTGAGGTGCTGAGCCATAGCCTCTTGCTTCTGCACAAGAAGGAGGACGGCATCTGGTCCA
CCGACATCCTCAAGGACCAAAAGGAGCCGAAGAATAAAACGTTCCTGAGGTGCGAAGCCAAGAACTATTCCGGACGGTTCACCTG
CTGGTGGCTGACCACCATCAGCACCGACCTCACCTTCTCCGTAAAGTCAAGCAGGGGCAGCTCCGACCCCCAGGGCGTGACCTGC
GGAGCCGCCACCCTGAGCGCAGAGAGGGTGAGGGGCGACAACAAGGAGTACGAATACTCCGTCGAGTGCCAGGAGGACAGCGCCT
GCCCCGCCGCCGAGGAAAGTCTGCCCATCGAGGTGATGGTGGACGCCGTGCACAAGCTCAAATACGAGAACTACACCAGCAGCTT
CTTCATCCGGGATATCATCAAGCCCGACCCTCCAAAGAATCTGCAGCTGAAACCCCTTAAGAACAGCAGGCAGGTGGAGGTCAGC
TGGGAGTACCCCGACACCTGGAGCACGCCCCACTCCTACTTTAGCCTGACCTTTTGCGTGCAGGTGCAGGGGAAAAGCAAGCGGG
AGAAGAAGGACAGGGTGTTCACCGATAAGACCTCCGCTACCGTGATCTGCAGGAAGAACGCCTCAATCAGCGTGAGGGCCCAGGA
TCGGTACTACTCCAGCTCCTGGAGCGAGTGGGCCAGCGTGCCCTGCTCTGGCGGTGGCGGCGGGGGCAGCCGGAACCTGCCGGTG
GCCACTCCCGACCCGGGCATGTTCCCGTGCCTCCACCATTCCCAGAACCTGCTGCGGGCCGTGTCCAATATGCTCCAGAAGGCAA
GGCAGACCCTGGAGTTCTACCCCTGCACCAGCGAGGAGATCGATCACGAGGACATCACCAAAGACAAAACCAGCACGGTCGAGGC
CTGCCTGCCCCTGGAACTCACCAAGAACGAAAGCTGTCTCAACAGCCGCGAGACCAGCTTCATAACCAACGGTTCCTGTCTGGCC
TCCCGCAAGACCAGCTTTATGATGGCCCTCTGTCTGAGCTCCATCTATGAAGACCTGAAAATGTACCAGGTGGAGTTCAAAACCA
TGAACGCCAAGCTTCTGATGGACCCCAAGAGGCAGATCTTCCTGGATCAGAACATGCTGGCCGTGATCGACGAGCTGATGCAGGC
CCTGAACTTTAACTCCGAGACCGTGCCCCAGAAAAGCAGCCTGGAAGAGCCCGATTTCTACAAAACGAAGATCAAGCTGTGCATC
CTGCTGCACGCCTTCCGGATCCGTGCGGTGACCATCGATAGGGTGATGAGCTACCTGAACGCCAGC
>hIL15RαB_035 (SEQ ID NO: 848)
ATGTGCCACCAACAGCTGGTAATCAGCTGGTTCAGCCTGGTTTTCCTCGCGTCGCCCCTGGTGGCCATCTGGGAGTTAAAGAAGG
ACGTGTACGTGGTGGAGCTGGATTGGTACCCCGACGCCCCGGGCGAGATGGTCGTGCTCACCTGCGATACCCCCGAGGAGGACGG
GATCACCTGGACCCTGGACCAATCCAGCGAGGTGCTGGGCAGCGGCAAGACCCTGACCATACAGGTGAAGGAATTTGGGGACGCC
GGGCAGTACACCTGCCACAAGGGCGGGGAAGTGCTGTCCCACTCCCTCCTGCTGCTGCATAAGAAGGAGGACGGCATCTGGAGCA
CCGACATCCTGAAGGACCAAAAGGAGCCCAAGAACAAGACCTTCCTGAGGTGCGAGGCCAAAAACTATTCCGGCCGCTTTACCTG
TTGGTGGCTGACCACCATCTCCACCGATCTGACCTTCAGCGTGAAGTCGTCTAGGGGCTCCTCCGACCCCCAGGGCGTAACCTGC
GGCGCCGCGACCCTGAGCGCCGAGAGGGTGCGGGGCGATAACAAAGAGTACGAGTACTCGGTGGAGTGCCAGGAGGACAGCGCCT
GTCCGGCGGCCGAGGAGAGCCTGCCCATCGAGGTGATGGTGGACGCCGTCCACAAGCTGAAGTACGAGAACTACACCAGTTCGTT
CTTCATCAGGGACATCATCAAGCCGGACCCCCCCAAGAACCTCCAGCTGAAGCCCCTGAAGAACAGCAGGCAGGTGGAAGTGTCC
TGGGAGTATCCCGACACCTGGAGCACCCCCCACAGCTACTTCAGCCTGACCTTTTGCGTGCAGGTGCAGGGCAAAAGCAAGAGGG
AAAAGAAGGACCGGGTGTTCACCGATAAGACGAGCGCCACCGTTATCTGCAGGAAGAACGCCTCCATAAGCGTGAGGGCGCAGGA
CCGTTACTACAGCAGCAGCTGGAGTGAGTGGGCAAGCGTGCCCTGTAGCGGCGGGGGCGGGGGCGGGTCCCGCAACCTCCCCGTC
GCCACCCCCGACCCAGGCATGTTTCCGTGCCTGCACCACAGCCAGAACCTGCTGCGGGCCGTTAGCAACATGCTGCAGAAGGCCA
GGCAGACCCTCGAGTTCTATCCCTGCACATCTGAGGAGATCGACCACGAAGACATCACTAAGGATAAGACCTCCACCGTGGAGGC
CTGTCTGCCCCTCGAGCTGACCAAGAATGAATCCTGCCTGAACAGCCGAGAGACCAGCTTTATCACCAACGGCTCCTGCCTGGCC
AGCAGGAAGACCTCCTTCATGATGGCCCTGTGCCTCTCCAGCATCTACGAGGATCTGAAGATGTACCAGGTAGAGTTCAAGACGA
TGAACGCCAAGCTCCTGATGGACCCCAAGAGGCAGATATTCCTGGACCAGAACATGCTGGCGGTGATCGACGAGCTGATGCAGGC
CCTGAATTTCAACAGCGAGACGGTGCCACAGAAGTCCAGCCTGGAGGAGCCAGACTTCTACAAGACCAAGATCAAACTGTGCATC
CTCCTGCACGCGTTCAGGATCCGCGCCGTCACCATAGACAGGGTGATGAGTTATCTGAACGCCAGC
>hIL15RαB_036 (SEQ ID NO: 849)
ATGTGCCATCAGCAGCTGGTAATCAGCTGGTTTAGCCTGGTGTTCCTGGCCAGCCCACTGGTGGCCATCTGGGAGCTGAAGAAGG
ACGTGTACGTGGTGGAACTGGACTGGTACCCCGACGCCCCTGGCGAGATGGTGGTACTGACCTGTGACACCCCGGAGGAAGACGG
TATCACCTGGACCCTGGATCAGAGCTCCGAGGTGCTGGGCTCCGGCAAGACACTGACCATCCAAGTTAAGGAATTTGGGGACGCC
GGCCAGTACACCTGCCACAAGGGGGGCGAGGTGCTGTCCCACTCCCTGCTGCTTCTGCATAAGAAGGAGGATGGCATCTGGTCCA
CCGACATACTGAAGGACCAGAAGGAGCCCAAGAATAAGACCTTCCTGAGATGCGAGGCCAAGAACTACTCGGGAAGGTTCACCTG
CTGGTGGCTGACCACCATCAGCACCGACCTGACCTTCTCCGTGAAGAGCTCCCGGGGCAGCTCCGACCCCCAGGGCGTAACCTGT
GGGGCCGCTACCCTGTCCGCCGAGAGGGTCCGGGGCGACAACAAGGAATACGAGTACAGCGTGGAGTGCCAGGAGGACTCCGCCT
GCCCCGCCGCCGAGGAGTCGCTGCCCATAGAGGTGATGGTGGACGCCGTGCACAAGCTCAAGTACGAGAATTACACCAGCAGCTT
CTTTATCAGGGACATAATTAAGCCGGACCCCCCAAAGAATCTGCAGCTGAAGCCCCTGAAGAATAGCCGGCAGGTGGAAGTGTCC
TGGGAGTACCCCGACACCTGGAGCACCCCCCACTCCTATTTCTCACTGACATTCTGCGTGCAGGTGCAAGGGAAAAGCAAGAGGG
AGAAGAAGGATAGGGTGTTCACCGACAAGACAAGCGCCACCGTGATCTGCCGAAAAAATGCCAGCATCAGCGTGAGGGCCCAGGA
TCGGTATTACAGCAGCTCCTGGAGCGAGTGGGCCAGCGTGCCCTGTTCCGGCGGGGGAGGGGGCGGCTCCCGGAACCTGCCGGTG
GCCACCCCCGACCCTGGCATGTTCCCCTGCCTGCATCACAGCCAGAACCTGCTCCGGGCCGTGTCGAACATGCTGCAGAAGGCCC
GGCAGACCCTCGAGTTTTACCCCTGCACCAGCGAAGAGATCGACCACGAAGACATAACCAAGGACAAGACCAGCACGGTGGAGGC
CTGCCTGCCCCTGGAGCTTACCAAAAACGAGTCCTGCCTGAACAGCCGGGAAACCAGCTTCATAACGAACGGGAGCTGCCTGGCC
TCCAGGAAGACCAGCTTCATGATGGCGCTGTGTCTGTCCAGCATATACGAGGATCTGAAGATGTATCAGGTGGAATTCAAAACTA
TGAATGCCAAGCTCCTGATGGACCCCAAGAGGCAGATCTTCCTGGACCAGAACATGCTAGCCGTGATCGACGAGCTGATGCAGGC
CCTCAACTTCAACTCGGAGACGGTGCCCCAGAAGTCCAGCCTCGAGGAGCCCGACTTCTACAAGACCAAGATCAAGCTGTGCATA
CTGCTGCATGCCTTCAGGATAAGGGCGGTGACTATCGACAGGGTCATGTCCTACCTGAACGCCAGC
>hIL15RαB_037 (SEQ ID NO: 850)
ATGTGCCACCAACAACTGGTGATCAGCTGGTTCTCCCTGGTGTTCCTGGCCAGCCCCCTGGTGGCCATCTGGGAGCTCAAAAAAG
ACGTGTACGTGGTGGAGCTCGATTGGTACCCAGACGCGCCGGGGGAAATGGTGGTGCTGACCTGCGACACCCCAGAGGAGGATGG
CATCACGTGGACGCTGGATCAGTCCAGCGAGGTGCTGGGGAGCGGCAAGACGCTCACCATCCAGGTGAAGGAATTTGGCGACGCG
GGCCAGTATACCTGTCACAAGGGCGGCGAGGTGCTGAGCCACTCCCTGCTGCTGCTGCACAAGAAGGAGGATGGGATCTGGTCAA
CCGATATCCTGAAAGACCAGAAGGAGCCCAAGAACAAGACCTTCCTGCGCTGCGAGGCCAAGAACTATAGCGGCAGGTTCACCTG
CTGGTGGCTGACCACCATCAGCACCGACCTGACCTTCAGCGTGAAATCCTCCAGGGGCAGCAGCGACCCCCAGGGCGTGACCTGC
GGTGCCGCCACGCTCTCCGCCGAGCGAGTGAGGGGTGACAACAAGGAGTACGAGTACAGCGTGGAATGTCAGGAGGACAGCGCCT
GTCCCGCCGCCGAGGAGTCGCTGCCCATCGAGGTGATGGTCGACGCGGTGCACAAGCTCAAATACGAGAATTACACCAGCAGCTT
CTTCATCAGGGACATCATCAAGCCCGACCCCCCCAAGAACCTGCAGCTGAAGCCCTTGAAGAACAGCAGGCAGGTGGAGGTGAGC
TGGGAGTACCCGGACACCTGGAGCACCCCCCACTCCTACTTCAGCCTGACGTTCTGTGTGCAGGTGCAGGGGAAGTCCAAGAGGG
AGAAGAAGGACCGGGTGTTCACCGACAAGACCAGCGCCACCGTGATATGCCGCAAGAACGCGTCCATCAGCGTTCGCGCCCAGGA
CCGCTACTACAGCAGCTCCTGGTCCGAATGGGCCAGCGTGCCCTGCAGCGGTGGAGGGGGCGGGGGCTCCAGGAATCTGCCGGTG
GCCACCCCCGACCCCGGGATGTTCCCGTGTCTGCATCACTCCCAGAACCTGCTGCGGGCCGTGAGCAATATGCTGCAGAAGGCCA
GGCAGACGCTCGAGTTCTACCCCTGCACCTCCGAAGAGATCGACCATGAGGACATCACCAAGGACAAGACCAGCACCGTGGAGGC
CTGCCTCCCCCTGGAGCTGACCAAAAACGAGAGCTGCCTGAACTCCAGGGAGACCAGCTTTATAACCAACGGCAGCTGCCTCGCC
TCCAGGAAGACCTCGTTTATGATGGCCCTCTGCCTGTCCAGCATCTACGAGGACCTGAAGATGTACCAGGTGGAGTTCAAGACCA
TGAACGCGAAGTTGCTCATGGACCCCAAGAGGCAGATCTTCCTGGACCAGAACATGCTCGCGGTGATCGACGAGCTGATGCAAGC
CCTGAACTTCAACAGCGAGACCGTGCCCCAGAAGAGCAGCCTGGAAGAGCCCGACTTCTACAAGACCAAGATCAAGCTGTGCATC
CTGCTGCACGCCTTCCGGATCCGGGCCGTGACCATCGACAGGGTGATGAGCTACCTCAACGCCTCC
>hIL15RαB_038 (SEQ ID NO: 851)
ATGTGCCACCAGCAGCTCGTGATCAGCTGGTTCTCCCTCGTCTTCCTGGCCTCCCCGCTGGTGGCCATCTGGGAGCTGAAGAAGG
ACGTGTACGTGGTGGAGCTGGACTGGTATCCCGACGCCCCCGGCGAGATGGTGGTGCTGACGTGCGACACACCAGAAGAGGACGG
GATCACATGGACCCTGGATCAGTCGTCCGAGGTGCTGGGGAGCGGCAAGACCCTCACCATCCAAGTGAAGGAGTTCGGGGACGCC
GGCCAGTACACCTGCCACAAGGGCGGGGAGGTGCTCTCCCATAGCCTGCTCCTCCTGCACAAAAAGGAGGATGGCATCTGGAGCA
CCGACATCCTGAAGGACCAGAAGGAGCCCAAGAACAAGACATTTCTCAGGTGTGAGGCCAAGAACTATTCGGGCAGGTTTACCTG
TTGGTGGCTCACCACCATCTCTACCGACCTGACGTTCTCCGTCAAGTCAAGCAGGGGGAGCTCGGACCCCCAGGGGGTGACATGT
GGGGCCGCCACCCTGAGCGCGGAGCGTGTCCGCGGCGACAACAAGGAGTACGAGTATTCCGTGGAGTGCCAGGAGGACAGCGCCT
GCCCCGCCGCCGAGGAGTCCCTGCCCATAGAGGTGATGGTGGACGCCGTCCACAAGTTGAAGTACGAAAATTATACCTCCTCGTT
CTTCATTAGGGACATCATCAAGCCTGACCCCCCGAAGAACCTACAACTCAAGCCCCTCAAGAACTCCCGCCAGGTGGAGGTGTCC
TGGGAGTACCCCGACACCTGGTCCACCCCGCACAGCTACTTCAGCCTGACCTTCTGCGTGCAGGTCCAGGGGAAGAGCAAGCGTG
AAAAGAAAGACAGGGTGTTCACCGACAAGACGAGCGCCACCGTGATCTGCAGGAAAAACGCCTCCATCTCCGTGCGCGCCCAGGA
CAGGTACTACAGTAGCTCCTGGAGCGAATGGGCCAGCGTGCCGTGCAGCGGCGGGGGAGGAGGCGGCAGTCGCAACCTGCCCGTG
GCCACCCCCGACCCCGGCATGTTCCCATGCCTGCACCACAGCCAGAACCTGCTGAGGGCAGTCAGCAATATGCTGCAGAAGGCCA
GGCAGACCCTGGAGTTTTATCCCTGCACCAGCGAGGAGATCGACCACGAGGACATCACCAAGGACAAGACCTCCACCGTCGAGGC
CTGCCTGCCACTGGAGCTGACCAAAAACGAGAGCTGCCTGAACTCCAGGGAGACCTCCTTCATCACCAACGGGAGCTGCCTGGCC
AGCCGGAAGACCAGCTTCATGATGGCGCTGTGCCTCAGCAGCATCTACGAGGATCTCAAGATGTACCAGGTGGAGTTCAAGACCA
TGAACGCGAAGCTGCTGATGGACCCCAAGCGGCAGATCTTCCTGGACCAGAACATGCTGGCCGTGATTGACGAGCTCATGCAGGC
CCTGAACTTCAATAGCGAGACCGTCCCCCAAAAGAGCAGCCTGGAGGAACCCGACTTCTACAAAACGAAGATCAAGCTCTGCATC
CTGCTGCACGCCTTCCGGATCCGGGCCGTGACCATCGATCGTGTGATGAGCTACCTGAACGCCTCG
>hIL15RαB_039 (SEQ ID NO: 852)
ATGTGCCACCAGCAGCTCGTCATCTCCTGGTTTAGCCTGGTGTTTCTGGCCTCCCCCCTGGTCGCCATCTGGGAGCTGAAGAAAG
ACGTGTACGTGGTGGAGCTGGACTGGTACCCGGACGCTCCCGGGGAGATGGTGGTGCTGACCTGCGACACCCCCGAGGAGGACGG
CATCACCTGGACCCTGGACCAGAGCTCCGAGGTGCTGGGGAGCGGCAAGACCCTGACCATTCAGGTGAAAGAGTTCGGCGACGCC
GGCCAATATACCTGCCACAAGGGGGGGGAGGTCCTGTCGCATTCCCTGCTGCTGCTTCACAAAAAGGAGGATGGCATCTGGAGCA
CCGACATCCTGAAGGACCAGAAAGAACCCAAGAACAAGACGTTCCTGCGCTGCGAGGCCAAGAACTACAGCGGCCGGTTCACCTG
TTGGTGGCTGACCACCATCTCCACCGACCTGACTTTCTCGGTGAAGAGCAGCCGCGGGAGCAGCGACCCCCAGGGAGTGACCTGC
GGCGCCGCCACCCTGAGCGCCGAAAGGGTGAGGGGCGACAATAAAGAGTACGAGTATTCCGTGGAGTGCCAGGAGGACAGCGCCT
GTCCCGCCGCCGAGGAGTCCCTGCCTATCGAGGTGATGGTCGACGCGGTGCACAAGCTCAAGTACGAAAACTACACCAGCAGCTT
TTTCATCAGGGATATCATCAAACCAGACCCCCCCAAGAACCTGCAGCTGAAGCCCCTGAAAAACAGCAGGCAGGTGGAAGTGAGC
TGGGAATACCCCGATACCTGGTCCACCCCCCACAGCTACTTCAGCCTGACCTTCTGCGTGCAGGTGCAGGGGAAGTCCAAGCGGG
AGAAGAAAGATCGGGTGTTCACGGACAAGACCAGCGCCACCGTGATTTGCAGGAAAAACGCCAGCATCTCCGTGAGGGCTCAGGA
CAGGTACTACAGCTCCAGCTGGAGCGAGTGGGCCTCCGTGCCTTGCAGCGGGGGAGGAGGCGGCGGCAGCAGGAATCTGCCCGTC
GCAACCCCCGACCCCGGCATGTTCCCCTGCCTGCACCACAGCCAGAATCTGCTGCGAGCCGTGAGCAACATGCTCCAGAAGGCCC
GGCAGACGCTGGAGTTCTACCCCTGCACCTCCGAGGAGATCGACCACGAGGACATCACCAAGGATAAGACGAGCACCGTCGAGGC
CTGTCTCCCCCTGGAGCTCACCAAGAACGAGTCCTGCCTGAATAGCAGGGAGACGTCCTTCATAACCAACGGCAGCTGTCTGGCG
TCCAGGAAGACCAGCTTCATGATGGCCCTCTGCCTGAGCTCCATCTACGAGGACCTCAAGATGTACCAGGTCGAGTTCAAGACCA
TGAACGCAAAACTGCTCATGGATCCAAAGAGGCAGATCTTTCTGGACCAGAACATGCTGGCCGTGATCGATGAACTCATGCAGGC
CCTGAATTTCAATTCCGAGACCGTGCCCCAGAAGAGCTCCCTGGAGGAACCCGACTTCTACAAAACAAAGATCAAGCTGTGTATC
CTCCTGCACGCCTTCCGGATCAGGGCCGTCACCATTGACCGGGTGATGTCCTACCTGAACGCCAGC
>hIL15RαB_040 (SEQ ID NO: 853)
ATGTGCCATCAGCAGCTGGTGATCAGCTGGTTCAGCCTCGTGTTCCTCGCCAGCCCCCTCGTGGCCATCTGGGAGCTGAAAAAGG
ACGTGTACGTGGTGGAGCTGGACTGGTATCCCGACGCCCCGGGCGAGATGGTGGTGCTGACCTGCGACACCCCCGAGGAGGACGG
CATTACCTGGACACTGGACCAGAGCAGCGAGGTCCTGGGCAGCGGGAAGACCCTGACAATTCAGGTGAAGGAGTTCGGCGACGCC
GGACAGTACACGTGCCACAAGGGGGGGGAGGTGCTGTCCCACAGCCTCCTCCTGCTGCACAAGAAGGAGGATGGCATCTGGAGCA
CCGACATCCTGAAGGATCAGAAGGAGCCCAAGAACAAGACCTTTCTGAGATGCGAGGCCAAGAATTACAGCGGCCGTTTCACCTG
CTGGTGGCTCACCACCATCAGCACCGACCTGACCTTCAGCGTGAAATCCTCCAGGGGCTCCTCCGACCCGCAGGGAGTGACCTGC
GGCGCCGCCACACTGAGCGCCGAGCGGGTCAGAGGGGACAACAAGGAGTACGAGTACAGCGTTGAGTGCCAGGAGGACAGCGCCT
GTCCCGCGGCCGAGGAATCCCTGCCCATCGAGGTGATGGTGGACGCAGTGCACAAGCTGAAGTACGAGAACTATACCTCGAGCTT
CTTCATCCGGGATATCATTAAGCCCGATCCCCCGAAGAACCTGCAGCTCAAACCCCTGAAGAACAGCAGGCAGGTGGAGGTCTCC
TGGGAGTACCCCGACACATGGTCCACCCCCCATTCCTATTTCTCCCTGACCTTTTGCGTGCAGGTGCAGGGCAAGAGCAAGAGGG
AGAAAAAGGACAGGGTGTTCACCGACAAGACCTCCGCCACCGTGATCTGCCGTAAGAACGCTAGCATCAGCGTCAGGGCCCAGGA
CAGGTACTATAGCAGCTCCTGGTCCGAGTGGGCCAGCGTCCCGTGCAGCGGCGGGGGCGGTGGAGGCTCCCGGAACCTCCCCGTG
GCCACCCCGGACCCCGGGATGTTTCCCTGCCTGCATCACAGCCAGAACCTGCTGAGGGCCGTGTCCAACATGCTGCAGAAGGCCA
GGCAGACACTCGAGTTTTACCCCTGCACCAGCGAGGAGATCGACCACGAAGACATCACCAAGGACAAGACCTCCACCGTGGAGGC
ATGCCTGCCCCTGGAGCTGACCAAAAACGAAAGCTGTCTGAACTCCAGGGAGACCTCCTTTATCACGAACGGCTCATGCCTGGCC
TCCAGAAAGACCAGCTTCATGATGGCCCTGTGCCTGAGCTCCATCTACGAGGACTTGAAAATGTACCAGGTCGAGTTCAAGACCA
TGAACGCCAAGCTGCTCATGGACCCCAAAAGGCAGATCTTTCTGGACCAGAATATGCTGGCCGTGATCGACGAGCTCATGCAAGC
CCTGAATTTCAACAGCGAGACCGTGCCCCAGAAGTCCTCCCTGGAGGAGCCCGACTTCTACAAGACCAAGATCAAGCTGTGCATA
CTCCTGCACGCGTTTAGGATCAGGGCGGTGACCATCGATAGGGTGATGAGCTACCTGAATGCCTCC

TABLE 11
Additional sequence optimized nucleic acid encoding IL15 polypeptides

| SEQ | | |
|---|---|---|
| ID | | |
| NO | Name | Sequence |
| 854 | IL15opt-tPa6- | ATGGACGCCATGAAGCGCGGGCTCTGCTGCGTCCTCCTCCTCTGCGGGGCCGTTTTCGTTAG |
| | CO01 | CCCCAGCCAGGAGATCCACGCCCGGTTCAGGAGGGGGGCCAGGAATTGGGTCAACGTCATAT |
| | | CCGACCTGAAGAAGATCGAGGACCTCATACAGTCCATGCACATCGACGCCACCCTATACACC |
| | | GAGAGCGACGTACACCCCAGCTGCAAGGTCACCGCGATGAAGTGCTTCCTCCTCGAGCTCCA |
| | | GGTAATCAGCCTTGAGAGCGGCGACGCCAGTATCCACGACACCGTCGAGAATCTGATAATAC |
| | | TGGCGAATAACTCGCTGAGCAGCAATGGGAACGTGACCGAGAGCGGGTGTAAGGAGTGCGAG |
| | | GAGCTGGAGGAGAAGAACATCAAGGAGTTCCTGCAGAGCTTCGTGCACATCGTGCAGATGTT |
| | | CATCAACACCAGC |
| 855 | IL15opt-tPa6- | ATGGACGCCATGAAGAGGGGCCTCTGCTGCGTCCTCCTCCTCTGCGGCGCGGTCTTCGTCTC |
| | CO02 | CCCCTCCCAGGAGATCCACGCCAGGTTCAGGAGGGGCGCCAGGAACTGGGTCAACGTCATCT |
| | | CCGATTTGAAAAAGATCGAGGACTTGATCCAAAGCATGCACATAGACGCCACGCTCTACACC |
| | | GAGTCCGACGTTCACCCCAGCTGCAAGGTCACGGCCATGAAGTGCTTTCTCCTCGAACTCCA |
| | | GGTCATCAGCTTGGAGTCCGGGGACGCCAGCATACACGACACCGTCGAGAACCTCATCATCC |
| | | TGGCCAACAATTCCCTGTCTTCGAACGGGAATGTGACCGAGTCCGGTTGCAAGGAGTGCGAG |
| | | GAGCTGGAGGAGAAGAACATCAAGGAGTTCCTGCAGTCATTCGTGCACATCGTCCAGATGTT |
| | | CATCAATACGAGC |
| 856 | IL15opt-tPa6- | ATGGACGCCATGAAGAGGGGGCTCTGCTGCGTCCTGCTCTTGTGCGGGGCCGTCTTCGTCAG |
| | CO03 | CCCGAGCCAGGAGATCCACGCCAGGTTCCGGCGGGGCGCCAGGAACTGGGTCAACGTCATCT |
| | | CCGACCTAAAGAAGATCGAGGACCTAATCCAGTCCATGCATATCGACGCCACCCTCTACACC |
| | | GAGAGCGACGTTCACCCCTCCTGCAAGGTCACCGCCATGAAGTGCTTCCTCCTCGAGCTCCA |
| | | GGTCATCTCTCTTGAGAGCGGGGACGCCTCCATCCACGACACCGTCGAGAACCTGATCATCC |
| | | TGGCCAACAACAGCCTGAGCAGCAACGGCAATGTGACGGAAAGCGGGTGCAAGGAATGCGAG |
| | | GAGCTGGAGGAGAAGAATATCAAGGAGTTCCTTCAGTCCTTCGTGCACATCGTGCAGATGTT |
| | | CATCAACACTTCC |
| 857 | IL15opt-tPa6- | ATGGACGCCATGAAGCGCGGCCTCTGCTGCGTCCTCCTCCTCTGTGGCGCCGTCTTCGTCAG |
| | CO04 | CCCCTCCCAGGAGATCCACGCCCGCTTCAGGCGGGGAGCCCGGAACTGGGTCAACGTCATCA |
| | | GCGATCTAAAGAAGATCGAGGATCTCATCCAGAGCATGCACATCGACGCCACCCTCTACACC |
| | | GAGAGCGACGTCCACCCCTCCTGCAAGGTAACCGCCATGAAGTGCTTCCTTTTGGAGCTCCA |
| | | GGTAATTAGCCTCGAGTCAGGCGACGCCAGCATCCACGACACGGTCGAGAACCTGATCATCC |
| | | TGGCCAACAATAGCCTGAGCTCCAACGGGAACGTGACCGAGTCCGGATGCAAGGAATGCGAG |
| | | GAGCTGGAGGAGAAGAACATCAAGGAGTTCCTGCAGAGCTTCGTGCACATCGTGCAGATGTT |
| | | CATCAACACCAGC |
| 858 | IL15opt-tPa6- | ATGGACGCCATGAAGAGGGGGTTGTGCTGCGTCCTCCTCCTCTGCGGAGCCGTCTTCGTGTC |
| | CO05 | CCCCAGCCAGGAGATCCACGCCCGGTTCCGCAGAGGAGCCCGCAACTGGGTAAACGTTATAA |
| | | GCGATCTTAAAAAGATCGAGGACCTCATCCAGAGCATGCACATCGACGCGACCCTTTACACC |
| | | GAGTCCGACGTGCATCCGAGCTGCAAGGTCACCGCGATGAAGTGCTTCCTACTCGAGCTCCA |
| | | GGTCATCTCCCTCGAGAGCGGCGACGCCAGCATCCACGACACCGTCGAGAACCTGATCATAC |
| | | TGGCCAATAACAGCCTGTCCTCCAACGGGAACGTGACCGAGAGCGGCTGTAAGGAGTGCGAG |
| | | GAACTGGAGGAGAAGAACATCAAGGAATTCCTCCAGAGCTTCGTGCACATCGTCCAGATGTT |
| | | CATCAACACCTCC |
| 859 | IL15opt-tPa6- | ATGGACGCCATGAAGAGGGGGCTTTGTTGTGTCCTCCTCCTCTGCGGCGCCGTCTTCGTCAG |
| | CO06 | CCCCTCGCAGGAGATCCACGCCCGGTTCAGGCGGGGCGCCAGGAACTGGGTTAACGTCATCT |
| | | CGGACCTCAAGAAAATCGAGGACCTAATCCAGAGCATGCATATCGACGCCACCCTCTACACC |
| | | GAGAGCGACGTCCACCCCTCCTGCAAGGTCACCGCCATGAAGTGCTTCCTCCTAGAGCTCCA |
| | | GGTCATCAGCCTCGAGTCCGGGGACGCCTCAATCCACGACACCGTCGAGAACCTGATTATCT |
| | | TGGCCAACAACAGCCTGTCCAGCAATGGCAACGTGACCGAGAGCGGGTGCAAGGAGTGCGAG |
| | | GAGCTGGAAGAGAAGAACATCAAGGAATTCCTGCAGTCCTTCGTGCACATAGTGCAAATGTT |
| | | CATCAACACCAGC |
| 860 | IL15opt-tPa6- | ATGGACGCGATGAAGAGGGGCCTCTGCTGCGTCCTTCTCCTCTGCGGCGCCGTCTTCGTTAG |
| | CO07 | CCCCTCCCAGGAGATCCACGCCAGGTTCAGGAGGGGCGCCCGGAACTGGGTCAACGTCATAA |
| | | GCGATCTCAAAAAGATCGAGGACCTCATCCAGAGCATGCACATCGACGCCACGCTCTACACC |
| | | GAGTCCGACGTGCACCCCTCCTGCAAGGTCACCGCCATGAAGTGCTTCCTCCTCGAGCTCCA |
| | | GGTCATCTCCTTGGAGTCCGGCGACGCCTCGATCCACGATACCGTCGAAAACCTGATCATCC |
| | | TGGCCAACAACAGCCTGAGCAGCAATGGCAACGTGACCGAATCCGGCTGCAAGGAGTGCGAG |
| | | GAGCTGGAGGAAAAGAACATCAAGGAGTTCCTGCAGTCATTTGTGCACATCGTGCAGATGTT |
| | | TATCAACACCTCC |
| 861 | IL15opt-tPa6- | ATGGACGCCATGAAGCGCGGCCTCTGCTGCGTCCTACTCCTTTGCGGGGCCGTCTTCGTTTC |
| | CO08 | GCCCAGCCAGGAGATCCACGCCCGATTTCGGAGGGGCGCCAGGAACTGGGTCAACGTTATAT |
| | | CCGACCTCAAGAAGATCGAGGACTTGATCCAGTCGATGCACATCGACGCCACTCTCTATACA |
| | | GAAAGCGACGTTCACCCGTCCTGTAAGGTCACCGCCATGAAGTGCTTCCTCCTCGAGCTCCA |
| | | GGTCATAAGCCTGGAGTCGGGCGACGCCTCCATCCACGATACGGTCGAGAACCTGATCATCC |
| | | TGGCCAACAACAGCCTGTCGTCCAACGGAAACGTCACCGAGTCGGGCTGTAAGGAGTGCGAG |
| | | GAGCTGGAGGAGAAGAACATCAAGGAGTTCCTGCAGAGCTTCGTGCACATCGTCCAGATGTT |
| | | TATCAACACCAGC |
| 862 | IL15opt-tPa6- | ATGGACGCCATGAAACGCGGGCTCTGCTGCGTTCTACTCCTCTGCGGCGCCGTCTTCGTAAG |
| | CO09 | CCCGAGCCAGGAGATTCACGCCCGGTTCAGGCGCGGCGCCAGGAACTGGGTTAACGTAATCT |
| | | CGGATCTCAAGAAGATCGAGGACTTGATCCAGAGCATGCACATCGACGCCACCCTCTATACC |
| | | GAGAGCGACGTTCACCCCTCCTGCAAGGTCACCGCGATGAAGTGCTTCCTCCTCGAGCTCCA |
| | | GGTAATCAGCTTGGAGTCCGGGGACGCGTCCATACACGATACCGTCGAGAACCTGATCATCT |
| | | TGGCAAACAACAGCCTGAGCTCCAACGGCAATGTGACGGAAAGCGGGTGCAAGGAGTGCGAG |
| | | GAGCTGGAGGAGAAGAATATCAAAGAGTTCCTGCAAAGCTTCGTGCACATCGTGCAGATGTT |
| | | CATCAACACCAGC |
| 863 | IL15opt-tPa6- | ATGGACGCCATGAAGCGCGGCCTCTGCTGCGTCCTCTTACTCTGCGGCGCCGTATTCGTTAG |
| | CO10 | CCCCAGCCAGGAGATCCACGCCAGGTTCAGGCGGGGCGCCAGGAACTGGGTCAACGTTATCA |
| | | GCGATCTCAAAAAGATCGAGGACCTCATCCAGTCCATGCACATCGACGCGACCCTCTACACC |
| | | GAGTCAGACGTACACCCCTCCTGCAAGGTCACCGCCATGAAGTGCTTCCTCCTCGAGCTCCA |
| | | GGTCATCAGCCTAGAGAGCGGAGACGCCAGCATCCACGACACCGTCGAGAATCTGATCATCC |
| | | TGGCCAACAACAGCCTGAGCAGCAACGGGAACGTGACCGAGAGCGGGTGCAAGGAGTGCGAG |
| | | GAGCTGGAGGAAAAGAACATCAAGGAGTTCCTGCAGAGCTTCGTGCACATCGTGCAGATGTT |
| | | CATCAACACCAGC |
| 864 | IL15opt-tPa6- | ATGGACGCCATGAAGAGGGGCCTCTGCTGCGTACTTCTCCTCTGCGGCGCCGTCTTCGTCAG |
| | CO11 | CCCGAGTCAAGAGATCCACGCGAGGTTCCGGCGGGGCGCCCGCAACTGGGTTAACGTCATAA |
| | | GCGATCTAAAGAAGATCGAGGATCTCATACAGAGCATGCACATCGACGCCACCCTATACACC |
| | | GAGTCCGACGTGCACCCCAGCTGTAAGGTAACCGCCATGAAGTGCTTCCTCCTCGAGCTCCA |
| | | GGTAATTAGCCTGGAGAGCGGGGACGCGAGCATTCACGATACCGTCGAGAACCTTATCATCC |
| | | TGGCGAATAACAGCCTCTCCAGCAACGGCAACGTCACCGAGTCCGGGTGCAAGGAGTGCGAG |
| | | GAGCTGGAGGAGAAGAACATAAAGGAGTTCCTCCAGAGCTTCGTGCACATCGTGCAAATGTT |
| | | CATCAACACCAGC |
| 865 | IL15opt-tPa6- | ATGGACGCCATGAAACGGGGCCTCTGCTGCGTCCTCCTCCTCTGTGGGGCCGTCTTCGTGTC |
| | CO12 | CCCCAGCCAGGAGATCCACGCCCGGTTCCGCAGGGGCGCCCGGAATTGGGTAAACGTCATCA |
| | | GCGATCTCAAAAAGATCGAGGACCTCATCCAGAGCATGCACATCGACGCAACGCTCTACACG |
| | | GAGAGCGACGTTCACCCCAGCTGCAAGGTCACCGCCATGAAGTGCTTCCTTCTCGAACTCCA |
| | | GGTAATCAGCCTCGAGTCAGGCGACGCCAGCATCCACGACACCGTCGAGAACCTGATCATCC |
| | | TGGCCAACAACAGCCTGAGCAGTAATGGCAACGTTACCGAGAGCGGATGCAAGGAGTGTGAG |
| | | GAACTGGAGGAGAAGAACATCAAGGAGTTCCTGCAGAGCTTCGTGCACATCGTGCAGATGTT |
| | | CATCAACACCAGC |
| 866 | IL15opt-tPa6- | ATGGACGCCATGAAGAGGGGACTCTGCTGCGTCCTCCTCCTCTGCGGCGCCGTCTTCGTCAG |
| | CO13 | CCCCAGCCAAGAGATCCACGCCAGGTTCAGGAGGGGGGCCAGGAACTGGGTCAACGTCATTT |
| | | CCGACCTCAAGAAGATCGAGGACCTCATCCAGAGCATGCACATCGACGCCACCCTCTACACG |
| | | GAGTCCGACGTCCACCCCAGCTGCAAGGTCACCGCGATGAAGTGCTTCCTCCTCGAGCTCCA |
| | | GGTAATCAGCCTCGAGTCAGGCGACGCCAGCATCCACGACACCGTGGAGAACCTCATCATCC |
| | | TGGCCAACAACAGCCTGTCCAGCAACGGCAACGTGACCGAGAGTGGCTGCAAGGAATGCGAG |
| | | GAGCTGGAGGAGAAAAATATCAAGGAGTTCCTCCAGAGCTTCGTCCACATCGTGCAGATGTT |
| | | CATCAACACCAGC |
| 867 | IL15opt-tPa6- | ATGGACGCCATGAAGAGGGGGCTCTGCTGCGTCCTCCTCTTGTGCGGCGCCGTCTTCGTCTC |
| | CO14 | CCCCAGCCAGGAGATCCACGCCAGATTCAGGAGGGGCGCCAGGAACTGGGTCAACGTCATCA |
| | | GCGACCTCAAGAAGATCGAGGACCTCATCCAGAGCATGCACATCGACGCCACGCTCTACACC |
| | | GAGAGCGACGTACACCCCTCCTGCAAGGTCACCGCCATGAAGTGCTTTCTCCTCGAGCTCCA |
| | | GGTTATCAGCCTCGAGTCCGGGGACGCCAGCATCCACGACACCGTGGAGAACCTGATCATCC |
| | | TGGCCAACAACAGCCTCAGCTCCAACGGCAATGTGACCGAGAGCGGGTGTAAGGAGTGTGAG |
| | | GAGCTGGAAGAGAAGAACATTAAGGAGTTTCTACAGTCCTTCGTGCACATCGTGCAAATGTT |
| | | CATCAACACATCC |
| 868 | IL15opt-tPa6- | ATGGACGCCATGAAGAGGGGCCTCTGCTGCGTCCTACTCCTCTGCGGGGCGGTCTTCGTTAG |
| | CO15 | CCCGTCCCAGGAGATCCACGCCAGGTTCAGGAGGGGGGCCCGGAACTGGGTCAACGTGATCA |
| | | GCGATCTAAAGAAGATCGAGGACCTTATCCAGTCGATGCACATCGACGCGACCCTCTACACC |
| | | GAGAGCGACGTCCACCCCTCCTGCAAAGTCACCGCCATGAAGTGCTTCCTCCTAGAGCTCCA |
| | | GGTCATCTCCCTCGAGAGCGGCGACGCCAGCATCCACGACACCGTCGAGAACCTGATCATCC |
| | | TGGCCAACAACAGCCTGAGCAGCAATGGCAATGTGACCGAAAGCGGGTGCAAGGAGTGCGAG |
| | | GAGCTGGAGGAGAAAAACATCAAGGAGTTTCTGCAGAGCTTCGTGCACATCGTCCAGATGTT |
| | | TATCAACACCTCC |
| 869 | IL15opt-tPa6- | ATGGACGCGATGAAGAGGGGCCTCTGCTGTGTCCTCCTCCTCTGCGGGGCCGTTTTCGTCTC |
| | CO16 | CCCCAGCCAGGAGATCCACGCGAGGTTCCGGCGCGGCGCCCGCAACTGGGTTAACGTCATCA |
| | | GCGACCTCAAGAAGATCGAGGACCTCATACAGAGCATGCATATAGACGCCACCCTCTACACC |
| | | GAGAGCGACGTCCACCCCAGCTGCAAGGTTACAGCCATGAAGTGCTTCCTCCTCGAGCTCCA |
| | | GGTCATCAGCTTGGAATCCGGCGACGCCTCGATCCACGACACCGTCGAGAACCTGATCATCC |
| | | TGGCCAACAACTCCCTGAGCAGCAATGGTAACGTGACCGAGTCCGGCTGCAAGGAGTGCGAG |
| | | GAGCTCGAGGAGAAGAACATCAAGGAGTTCCTGCAGAGCTTCGTGCACATCGTGCAGATGTT |
| | | TATCAACACCTCC |
| 870 | IL15opt-tPa6- | ATGGACGCCATGAAAAGGGGCTTATGCTGCGTCCTCCTCCTCTGCGGGGCCGTCTTCGTCAG |
| | CO17 | CCCCAGCCAGGAGATACACGCCCGGTTCCGGAGGGGGGCGCGCAACTGGGTTAACGTCATCA |
| | | GCGACCTCAAGAAGATCGAGGACCTAATCCAGAGCATGCACATAGACGCCACCCTCTACACC |
| | | GAAAGCGACGTGCACCCCAGCTGTAAGGTAACCGCCATGAAGTGCTTCCTCCTCGAGCTCCA |
| | | GGTCATCAGCCTCGAGAGCGGCGACGCCAGCATCCACGATACGGTCGAGAACCTCATCATCC |
| | | TGGCCAACAACAGCCTGAGCTCCAACGGGAATGTGACCGAGAGCGGCTGCAAGGAGTGCGAG |
| | | GAGCTGGAGGAGAAGAACATCAAGGAGTTCCTCCAGAGTTTCGTGCACATCGTGCAGATGTT |
| | | CATTAACACTAGC |
| 871 | IL15opt-tPa6- | ATGGACGCCATGAAAAGGGGGCTCTGCTGCGTACTCCTCCTTTGCGGGGCCGTCTTCGTATC |
| | CO18 | CCCGAGCCAGGAGATTCACGCCCGGTTCAGGAGGGGCGCCAGGAACTGGGTAAACGTCATCA |
| | | GCGACCTCAAGAAGATCGAGGACCTCATCCAATCAATGCACATCGACGCCACGCTCTACACC |
| | | GAGAGCGACGTCCACCCCAGCTGCAAGGTCACCGCCATGAAGTGCTTCCTCCTCGAGTTACA |
| | | GGTCATCTCCCTCGAGTCCGGGGACGCCAGCATCCACGACACGGTGGAGAACCTGATCATCC |
| | | TCGCCAATAACTCCCTGAGCAGCAATGGCAACGTCACGGAGAGCGGATGCAAAGAGTGCGAG |
| | | GAGCTCGAGGAGAAGAACATCAAAGAATTCCTGCAGAGCTTTGTGCATATCGTGCAGATGTT |
| | | CATCAACACCAGC |
| 872 | IL15opt-tPa6- | ATGGACGCCATGAAGCGGGGCCTCTGCTGCGTCCTCCTCCTCTGCGGGGCCGTCTTCGTTTC |
| | CO19 | CCCCAGCCAGGAAATCCACGCCAGGTTTAGGAGGGGCGCCCGCAACTGGGTCAACGTCATCT |
| | | CCGATCTTAAGAAGATCGAGGACCTCATCCAGAGCATGCATATCGACGCCACCCTCTACACC |
| | | GAATCCGACGTGCACCCCTCCTGCAAGGTCACAGCCATGAAGTGCTTCTTGCTCGAGCTCCA |
| | | GGTCATCTCCCTCGAGAGCGGGGACGCCAGCATCCACGATACCGTCGAGAATCTGATCATCC |
| | | TGGCCAATAATAGCTTGAGCAGCAACGGCAACGTGACCGAGAGCGGCTGTAAGGAGTGCGAG |
| | | GAGCTGGAGGAGAAGAACATCAAGGAGTTCCTGCAGAGCTTCGTGCACATCGTGCAGATGTT |
| | | CATCAACACGAGC |
| 873 | IL15opt-tPa6- | ATGGACGCCATGAAGCGCGGCCTCTGCTGCGTCCTCCTCCTCTGCGGCGCCGTCTTCGTCTC |
| | CO20 | CCCCAGCCAGGAGATACACGCGAGGTTCCGGAGGGGGGCCAGGAACTGGGTCAACGTTATAA |
| | | GCGACCTTAAGAAGATCGAGGACCTCATACAGTCCATGCACATCGACGCCACGCTCTACACC |
| | | GAGAGCGACGTACACCCATCCTGCAAGGTTACGGCCATGAAGTGCTTCCTCCTTGAACTCCA |
| | | GGTCATATCCCTCGAGTCGGGGGACGCCTCAATCCACGACACGGTGGAGAACCTCATCATCC |
| | | TCGCCAACAATAGCCTGAGTAGCAACGGCAACGTGACCGAGTCCGGCTGCAAGGAATGTGAG |
| | | GAGCTGGAGGAGAAGAACATCAAGGAGTTCCTGCAGAGCTTCGTGCACATCGTGCAGATGTT |
| | | CATCAATACCTCC |
| 874 | IL15opt-tPa6- | ATGGACGCCATGAAGCGGGGGCTATGCTGCGTCCTCCTCCTTTGCGGCGCCGTCTTCGTCTC |
| | CO21 | GCCCAGCCAGGAGATTCACGCCAGGTTTAGGAGGGGCGCCAGGAACTGGGTCAACGTCATCT |
| | | CGGACCTCAAGAAGATCGAGGACCTCATCCAGAGCATGCATATCGACGCCACCCTCTATACC |
| | | GAGTCGGACGTCCACCCCAGCTGCAAGGTCACCGCAATGAAGTGCTTCCTCCTCGAGCTCCA |
| | | GGTCATCAGCCTCGAGAGCGGCGACGCCTCGATCCACGATACCGTCGAGAATCTCATCATCC |
| | | TGGCCAATAATTCGCTGAGCAGCAACGGCAACGTGACCGAATCAGGATGTAAGGAGTGCGAG |
| | | GAGCTCGAGGAGAAGAACATTAAGGAATTCCTGCAGTCCTTCGTGCACATCGTGCAGATGTT |
| | | CATCAACACCAGC |
| 875 | IL15opt-tPa6- | ATGGACGCCATGAAGCGGGGCCTCTGTTGCGTCCTCTTGCTTTGTGGCGCCGTCTTCGTGTC |
| | CO22 | CCCCAGCCAGGAGATCCACGCTCGGTTCAGGCGCGGGGCCAGGAACTGGGTCAACGTGATCT |
| | | CCGACCTCAAGAAGATCGAGGACCTCATCCAGAGCATGCACATCGACGCCACCTTATACACC |
| | | GAGTCCGACGTCCATCCCTCGTGCAAAGTCACCGCCATGAAGTGCTTCCTCTTAGAGCTCCA |
| | | GGTCATCAGCCTCGAGTCCGGCGACGCCTCGATCCACGATACCGTCGAGAACCTGATCATCC |
| | | TGGCCAACAACAGCCTGAGCAGCAACGGGAACGTGACCGAATCGGGGTGCAAGGAGTGCGAG |
| | | GAGCTGGAGGAGAAGAACATCAAGGAGTTCCTGCAGAGCTTCGTGCACATAGTGCAGATGTT |
| | | CATCAACACCAGC |
| 876 | IL15opt-tPa6- | ATGGACGCCATGAAGAGGGGCCTCTGCTGTGTCCTCCTCCTCTGCGGAGCCGTCTTCGTGAG |
| | CO23 | CCCCTCCCAGGAGATCCACGCCCGGTTTCGGCGCGGGGCCCGCAACTGGGTCAACGTCATCT |
| | | CCGACCTTAAGAAGATAGAGGATCTTATCCAGAGCATGCACATCGACGCCACCCTCTACACG |
| | | GAGAGCGACGTCCACCCCAGCTGTAAGGTTACCGCGATGAAGTGCTTTCTCCTCGAGCTCCA |
| | | GGTCATCTCCCTGGAATCGGGGGACGCCAGCATCCACGACACGGTCGAAAACCTGATCATAC |
| | | TGGCCAACAACAGCCTGTCGAGCAACGGCAACGTGACCGAGTCAGGGTGTAAGGAGTGCGAG |
| | | GAGCTGGAGGAGAAGAACATAAAGGAATTCCTGCAGTCGTTCGTGCACATCGTGCAGATGTT |
| | | TATCAACACCAGC |
| 877 | IL15opt-tPa6- | ATGGACGCCATGAAGCGCGGCCTCTGCTGCGTCCTTCTCCTCTGCGGCGCCGTCTTCGTCAG |
| | CO24 | CCCCAGCCAGGAGATCCACGCACGGTTCAGGAGGGGCGCCCGGAACTGGGTTAACGTAATCT |
| | | CGGACCTCAAGAAGATCGAGGACCTCATCCAGTCCATGCACATCGACGCCACCCTCTACACC |
| | | GAGAGCGACGTCCACCCGTCCTGCAAGGTCACCGCCATGAAGTGCTTTCTCCTCGAGCTCCA |
| | | GGTTATCAGCTTGGAGAGCGGCGACGCCAGCATCCACGACACAGTCGAGAATCTGATCATAC |
| | | TGGCCAATAACTCCCTGTCCAGCAACGGCAACGTGACCGAGAGCGGCTGCAAGGAGTGCGAG |
| | | GAGCTGGAGGAGAAGAACATCAAGGAGTTCCTCCAGAGCTTCGTGCACATCGTGCAGATGTT |
| | | CATCAACACCAGC |
| 878 | IL15opt-tPa6- | ATGGACGCCATGAAGAGGGGGCTTTGCTGCGTACTCCTCCTCTGCGGGGCCGTCTTCGTCAG |
| | CO25 | CCCCAGCCAGGAGATCCACGCCCGCTTTAGGAGGGGGGCCCGAAATTGGGTCAACGTCATCA |
| | | GCGACCTCAAAAAGATCGAGGACTTGATCCAGAGCATGCACATCGACGCCACCCTTTATACC |
| | | GAGTCCGACGTCCACCCCTCCTGCAAGGTCACCGCCATGAAGTGTTTTCTCCTCGAGCTCCA |
| | | GGTCATCAGCCTCGAGAGCGGCGACGCTTCCATCCACGACACCGTCGAGAACCTGATCATCC |
| | | TGGCCAACAACAGCCTGAGCAGCAACGGCAACGTGACCGAGAGCGGCTGCAAGGAGTGCGAG |
| | | GAGCTCGAGGAGAAGAACATCAAGGAGTTCCTCCAGAGCTTTGTGCACATCGTGCAAATGTT |
| | | CATCAATACCTCG |
| 879 | IL15_RLI-CO01 | ATGGAGACTGACACCCTACTCCTCTGGGTATTGCTTCTCTGGGTACCCGGGAGCACCGGCGA |
| | | CTACAAAGACGACGACGACAAGATCACCTGTCCCCCGCCCATGAGCGTCGAGCACGCCGACA |
| | | TCTGGGTCAAAAGCTATAGCCTATACAGCAGGGAGAGGTACATCTGCAATAGCGGCTTCAAG |
| | | AGGAAGGCCGGCACCAGCAGCCTCACCGAGTGTGTACTCAATAAGGCCACCAACGTTGCCCA |
| | | TTGGACAACCCCCAGCTTGAAGTGCATTAGGGACCCCGCCCTCGTCCATCAGAGGCCCGCCC |
| | | CACCTAGCGGCGGGAGCGGCGGGGGAGGCTCCGGGGGCGGCAGTGGCGGCGGCGGATCCCTG |
| | | CAGAACTGGGTCAATGTGATCTCCGACCTAAAAAAGATCGAAGACCTGATACAGAGCATGCA |
| | | CATCGACGCTACCCTGTATACCGAGAGCGATGTGCATCCCAGCTGTAAGGTCACAGCCATGA |
| | | AATGTTTTCTCCTGGAGCTGCAGGTGATCAGTCTGGAGTCAGGCGACGCCAGCATCCACGAC |
| | | ACTGTAGAGAATCTGATCATCCTGGCCAACAATAGCCTCAGCAGCAACGGCAACGTCACCGA |
| | | GAGCGGCTGCAAGGAATGCGAAGAACTCGAGGAGAAGAACATAAAGGAGTTCCTGCAGTCCT |
| | | TTGTGCACATCGTGCAGATGTTTATCAACACCAGC |
| 880 | IL15_RLI-CO02 | ATGGAGACGGATACCTTACTTCTCTGGGTACTTCTATTGTGGGTCCCCGGGAGCACCGGGGA |
| | | CTACAAGGACGACGACGACAAGATAACCTGCCCGCCCCCCATGAGCGTAGAACACGCCGACA |
| | | TCTGGGTCAAGTCCTACAGCCTCTACAGCAGGGAGAGGTACATCTGCAATAGCGGCTTTAAG |
| | | CGTAAGGCCGGAACGTCAAGCCTTACCGAGTGCGTCCTTAACAAGGCCACCAACGTCGCCCA |
| | | TTGGACCACCCCCAGCCTCAAGTGTATCAGGGATCCCGCCCTCGTACACCAAAGGCCGGCCC |
| | | CTCCATCCGGGGGCAGCGGCGGGGGTGGTAGCGGAGGTGGCAGCGGCGGCGGTGGCTCGCTC |
| | | CAAAACTGGGTGAACGTCATCAGCGACCTCAAGAAGATTGAGGATCTGATCCAGTCGATGCA |
| | | CATCGACGCCACCCTGTATACCGAAAGCGACGTCCATCCCAGCTGCAAAGTCACCGCCATGA |
| | | AGTGCTTCCTCCTGGAGCTTCAGGTGATCTCCCTGGAGAGCGGGGATGCCTCCATCCACGAC |
| | | ACCGTGGAGAACCTGATAATCCTTGCCAACAACTCCCTGAGCTCGAATGGCAACGTGACCGA |
| | | ATCCGGATGCAAAGAGTGCGAGGAGCTCGAGGAAAAGAATATCAAGGAGTTCCTCCAGTCTT |
| | | TCGTGCACATAGTGCAGATGTTCATAAATACGAGC |
| 881 | IL15_RLI-CO03 | ATGGAAACCGACACCCTACTCCTTTGGGTACTACTCCTTTGGGTCCCCGGGTCCACCGGCGA |
| | | CTACAAAGACGACGACGACAAGATCACCTGCCCGCCCCCGATGAGCGTCGAACACGCCGACA |
| | | TCTGGGTCAAATCGTACAGCCTCTATTCCAGGGAAAGGTACATTTGCAACAGCGGATTCAAG |
| | | CGCAAGGCCGGCACCTCGAGCCTCACGGAGTGCGTACTCAACAAGGCCACCAACGTTGCCCA |
| | | CTGGACCACCCCCAGCCTCAAGTGCATCAGGGACCCAGCACTCGTCCATCAGCGGCCAGCCC |
| | | CTCCCAGCGGCGGCTCCGGGGGCGGCGGGTCAGGAGGCGGCAGCGGAGGCGGCGGAAGCCTT |
| | | CAGAATTGGGTGAACGTGATAAGTGATCTGAAGAAGATTGAAGATCTGATCCAATCCATGCA |
| | | CATCGACGCCACCCTGTACACCGAGTCGGATGTCCACCCGTCCTGCAAGGTCACAGCCATGA |
| | | AGTGCTTCCTGCTCGAACTGCAGGTCATCTCCTTGGAGTCAGGGGACGCCAGCATACACGAT |
| | | ACTGTGGAGAACCTTATTATACTGGCCAACAACAGCCTGTCCTCCAACGGTAACGTGACAGA |
| | | GTCCGGCTGCAAGGAGTGCGAGGAGCTCGAAGAGAAAAACATAAAGGAGTTCCTCCAGAGCT |
| | | TTGTCCATATAGTGCAGATGTTCATCAACACCTCC |
| 882 | IL15_RLI-CO04 | ATGGAAACCGATACCCTCCTCCTCTGGGTTCTTCTCCTATGGGTCCCAGGCAGCACCGGCGA |
| | | CTACAAGGACGACGACGACAAGATCACCTGTCCCCCGCCCATGTCCGTAGAGCACGCGGACA |
| | | TCTGGGTCAAGTCATATTCACTCTATAGCAGAGAGAGGTACATCTGCAACTCCGGATTCAAG |
| | | AGGAAGGCCGGAACCAGCTCCCTTACCGAGTGCGTCCTCAACAAAGCCACCAACGTAGCCCA |
| | | TTGGACAACACCCTCCCTCAAGTGCATACGAGATCCCGCCCTCGTACACCAAAGGCCCGCCC |
| | | CGCCCAGCGGGGGCAGCGGCGGCGGAGGCAGCGGAGGCGGCTCCGGAGGCGGGGGAAGCCTG |
| | | CAGAACTGGGTCAACGTGATAAGCGACCTGAAGAAAATCGAAGATCTTATCCAGAGCATGCA |
| | | CATAGACGCCACACTGTACACGGAAAGCGACGTGCACCCTTCCTGTAAGGTGACCGCCATGA |
| | | AGTGCTTCCTGCTGGAGCTGCAGGTGATAAGCCTCGAGTCCGGGGATGCCTCGATCCACGAC |
| | | ACCGTCGAGAATCTGATCATCCTGGCCAATAACTCCCTGAGCAGCAACGGGAACGTCACCGA |
| | | GAGCGGCTGCAAGGAATGCGAGGAACTTGAGGAGAAGAACATTAAGGAGTTCCTGCAATCGT |
| | | TTGTACACATCGTGCAGATGTTCATCAACACCAGC |
| 883 | IL15_RLI-CO05 | ATGGAGACAGACACCCTCCTCCTCTGGGTACTCCTCCTCTGGGTACCCGGGAGCACCGGCGA |
| | | CTACAAGGACGACGACGACAAGATCACCTGCCCCCCACCCATGTCCGTTGAACACGCCGATA |
| | | TCTGGGTCAAGTCCTACAGCCTCTACTCCCGAGAGAGGTATATCTGCAACTCCGGATTTAAA |
| | | CGGAAAGCCGGCACCTCGAGCCTCACAGAGTGCGTCCTCAATAAAGCCACCAACGTAGCTCA |
| | | CTGGACCACCCCCTCCCTTAAGTGTATTCGGGATCCAGCCCTCGTCCATCAAAGGCCGGCGC |
| | | CGCCCAGCGGAGGTAGCGGCGGGGGCGGCAGCGGGGGAGGCAGCGGCGGCGGTGGAAGCCTA |
| | | CAGAACTGGGTCAACGTCATCTCCGACCTGAAGAAGATCGAGGACCTCATCCAGAGCATGCA |
| | | CATAGATGCCACCCTGTACACCGAGAGCGACGTCCACCCCTCCTGCAAGGTGACCGCGATGA |
| | | AGTGCTTTCTCCTCGAACTGCAAGTGATTAGCCTGGAGAGCGGCGATGCCTCCATCCACGAT |
| | | ACCGTGGAAAATCTCATCATCCTGGCCAATAACAGCCTGAGCTCAAATGGAAACGTGACCGA |
| | | GTCCGGCTGCAAGGAGTGCGAAGAACTGGAGGAGAAAAACATCAAGGAATTCCTGCAGTCCT |
| | | TTGTGCATATCGTGCAGATGTTCATAAACACCTCC |
| 884 | IL15_RLI-CO06 | ATGGAGACGGACACCCTCCTCCTCTGGGTTCTCCTCCTTTGGGTCCCCGGCAGCACCGGCGA |
| | | TTACAAGGACGACGACGACAAGATCACCTGCCCGCCCCCCATGTCCGTAGAGCACGCCGACA |
| | | TCTGGGTCAAGAGCTACAGCCTCTATTCCAGGGAAAGGTACATTTGCAACTCAGGCTTCAAA |
| | | CGCAAGGCAGGCACCTCCAGCTTGACCGAGTGCGTCCTCAACAAGGCCACCAACGTCGCCCA |
| | | CTGGACCACCCCAAGCTTAAAGTGCATAAGGGATCCCGCCCTAGTCCACCAACGCCCAGCCC |
| | | CGCCCAGCGGTGGCAGCGGAGGCGGCGGCTCCGGAGGCGGATCTGGGGGCGGAGGGAGCCTG |
| | | CAGAACTGGGTGAACGTGATTAGCGATCTGAAGAAGATCGAAGACCTGATCCAGTCCATGCA |
| | | CATCGATGCCACCCTCTATACCGAGTCAGATGTGCACCCTAGCTGCAAAGTGACCGCAATGA |
| | | AATGCTTCCTGCTGGAGCTGCAAGTGATCAGCCTGGAGAGCGGCGATGCCAGCATCCACGAT |
| | | ACCGTGGAAAACCTGATCATCCTCGCCAACAACTCACTCTCCTCCAACGGCAACGTGACCGA |
| | | AAGCGGCTGTAAGGAGTGCGAGGAATTAGAAGAGAAGAACATCAAGGAATTCCTGCAAAGCT |
| | | TCGTACACATCGTGCAGATGTTCATCAACACCAGC |
| 885 | IL15_RLI-CO07 | ATGGAGACAGACACTCTCCTCCTCTGGGTACTCCTCCTCTGGGTACCCGGCAGCACCGGGGA |
| | | CTACAAAGACGACGACGATAAGATTACTTGTCCCCCGCCCATGTCCGTCGAGCACGCCGACA |
| | | TCTGGGTCAAGTCCTACAGCCTCTATTCCAGGGAAAGGTATATCTGCAACAGCGGTTTCAAG |
| | | AGAAAGGCCGGGACGAGTTCGCTCACCGAGTGCGTCTTGAATAAAGCCACCAACGTCGCCCA |
| | | CTGGACGACCCCGAGCCTAAAGTGCATCAGAGATCCCGCCTTGGTTCACCAAAGGCCAGCCC |
| | | CACCGTCCGGAGGCTCAGGGGGAGGCGGCTCGGGCGGCGGCTCCGGCGGGGGCGGCAGCCTC |
| | | CAGAACTGGGTCAACGTGATCTCCGACCTAAAGAAGATCGAAGACCTCATCCAGAGCATGCA |
| | | TATCGATGCCACACTGTATACCGAATCCGACGTACACCCCAGCTGCAAGGTGACCGCTATGA |
| | | AGTGCTTTCTGCTGGAGCTCCAGGTCATCAGCCTGGAGAGCGGCGATGCCTCCATTCACGAT |
| | | ACCGTCGAGAACCTGATCATCCTGGCCAACAATAGCCTGTCCAGCAATGGGAATGTGACCGA |
| | | GTCCGGCTGTAAGGAGTGCGAGGAGCTGGAAGAGAAGAACATCAAGGAGTTCCTGCAGTCCT |
| | | TCGTGCATATCGTGCAGATGTTCATCAACACCTCC |
| 886 | IL15_RLI-CO08 | ATGGAGACGGATACCTTACTCCTCTGGGTACTTCTCCTCTGGGTTCCCGGCAGCACCGGCGA |
| | | TTACAAGGACGACGACGACAAAATCACGTGTCCGCCCCCCATGTCCGTAGAGCACGCCGATA |
| | | TCTGGGTCAAGTCCTATAGCCTCTACAGCCGGGAGCGGTACATTTGTAACAGCGGCTTCAAG |
| | | CGGAAAGCCGGCACCTCCTCCTTAACCGAGTGCGTTCTCAATAAAGCCACCAACGTTGCACA |
| | | CTGGACGACCCCCTCTTTGAAGTGTATTAGGGACCCCGCCCTTGTCCATCAGCGTCCCGCCC |
| | | CACCCAGCGGCGGGAGCGGCGGCGGCGGCTCCGGCGGAGGAAGCGGCGGCGGCGGCAGCCTC |
| | | CAGAACTGGGTGAATGTGATCAGTGACCTCAAGAAGATCGAGGACCTGATCCAGAGCATGCA |
| | | CATCGATGCAACACTGTACACCGAATCCGACGTACATCCCAGCTGCAAGGTGACCGCAATGA |
| | | AGTGTTTCCTGCTGGAGCTGCAGGTGATCTCGCTGGAGAGCGGGGACGCCTCTATCCACGAC |
| | | ACGGTGGAGAACCTCATCATCCTGGCCAATAACTCGCTCTCCTCGAATGGCAACGTCACCGA |
| | | GAGCGGCTGCAAGGAATGCGAAGAACTCGAGGAGAAGAACATCAAAGAATTTCTGCAGTCCT |
| | | TCGTGCACATCGTGCAAATGTTCATCAACACCTCG |
| 887 | IL15_RLI-CO09 | ATGGAAACAGACACCCTTCTCCTCTGGGTCCTACTACTCTGGGTACCCGGCAGCACCGGGGA |
| | | CTATAAGGACGACGACGACAAAATCACCTGCCCACCCCCCATGAGCGTTGAGCACGCCGACA |
| | | TCTGGGTAAAGAGCTACAGTCTCTATTCCAGGGAGCGCTATATCTGCAACAGCGGTTTCAAG |
| | | AGGAAAGCCGGCACCAGCAGCCTCACCGAGTGCGTCCTCAACAAGGCGACGAACGTCGCCCA |
| | | CTGGACCACGCCCAGCCTCAAGTGCATAAGAGATCCGGCTTTAGTCCACCAGCGGCCCGCCC |
| | | CGCCCTCCGGGGGTAGCGGCGGAGGAGGAAGTGGGGGTGGGAGCGGCGGCGGGGGCAGCCTC |
| | | CAGAACTGGGTGAACGTGATCAGCGACCTGAAGAAAATCGAGGACCTGATCCAATCCATGCA |
| | | TATCGACGCCACCCTGTACACCGAGTCAGACGTGCACCCCAGCTGCAAGGTGACTGCCATGA |
| | | AGTGCTTTCTGTTAGAGCTCCAGGTGATCAGCCTTGAGAGCGGCGACGCCAGCATCCACGAT |
| | | ACTGTGGAGAATCTGATCATACTGGCCAACAACTCACTGTCCAGCAACGGGAATGTGACCGA |
| | | GTCCGGTTGCAAGGAGTGCGAAGAACTTGAGGAGAAGAACATAAAGGAGTTCCTGCAGAGCT |
| | | TCGTGCACATAGTGCAAATGTTCATCAACACCTCC |
| 888 | IL15_RLI-CO10 | ATGGAGACGGACACCCTTCTCCTCTGGGTCCTCCTTCTCTGGGTCCCCGGGAGCACCGGAGA |
| | | CTACAAGGACGACGACGACAAGATCACCTGCCCCCCGCCAATGAGCGTCGAACACGCCGACA |
| | | TTTGGGTCAAGAGTTACAGCTTATACAGCAGGGAAAGGTACATTTGCAACTCGGGCTTCAAG |
| | | CGGAAGGCCGGCACGAGCAGCCTAACCGAGTGCGTCCTCAACAAGGCAACCAACGTCGCCCA |
| | | CTGGACCACCCCAAGCCTCAAGTGTATCAGGGACCCGGCCCTCGTACACCAAAGACCCGCAC |
| | | CCCCAAGTGGGGGCAGCGGAGGGGGTGGCAGCGGCGGAGGAAGCGGGGGCGGAGGCAGCCTG |
| | | CAAAACTGGGTGAACGTGATCTCAGACCTGAAGAAAATCGAGGACCTGATCCAGAGCATGCA |
| | | CATTGACGCCACCCTGTATACCGAGTCCGATGTGCACCCTAGCTGTAAGGTGACCGCCATGA |
| | | AGTGCTTCCTGCTGGAGCTGCAGGTGATCAGCCTGGAGAGCGGAGACGCCTCCATCCACGAT |
| | | ACCGTGGAGAACCTCATCATACTGGCAAATAATAGCCTGTCCTCCAATGGGAACGTGACCGA |
| | | GAGCGGCTGTAAAGAGTGTGAGGAGCTGGAGGAGAAGAATATCAAGGAGTTCCTGCAGAGCT |
| | | TCGTGCATATCGTGCAAATGTTTATCAACACGAGC |
| 889 | IL15_RLI-CO11 | ATGGAGACTGACACCTTACTCCTTTGGGTTCTACTCCTCTGGGTACCCGGCAGCACGGGAGA |
| | | CTACAAGGACGACGACGACAAAATCACCTGTCCCCCGCCCATGAGCGTCGAGCACGCGGACA |
| | | TCTGGGTAAAGAGCTATTCCCTCTACTCCAGGGAGAGGTATATCTGCAACAGCGGCTTCAAA |
| | | AGGAAGGCCGGCACCAGCTCTCTCACGGAGTGCGTACTAAATAAGGCCACCAACGTAGCCCA |
| | | CTGGACCACCCCAAGCCTCAAGTGCATCAGGGATCCCGCCTTAGTTCACCAGAGGCCCGCCC |
| | | CTCCCAGCGGCGGGTCCGGCGGCGGCGGGAGTGGCGGCGGCTCAGGAGGAGGGGGGAGCCTC |
| | | CAGAACTGGGTGAACGTGATCAGCGATCTGAAGAAGATCGAGGACCTCATCCAAAGCATGCA |
| | | TATCGACGCCACGCTGTATACCGAGAGCGACGTCCACCCCTCCTGCAAGGTGACCGCCATGA |
| | | AATGTTTTCTGCTGGAACTGCAAGTGATCAGCCTGGAGAGCGGTGACGCCAGCATCCACGAC |
| | | ACAGTGGAAAACCTCATCATCCTCGCCAATAATAGCCTGAGCAGCAACGGCAACGTGACCGA |
| | | GTCCGGATGCAAGGAATGCGAGGAGCTCGAGGAGAAGAACATCAAAGAGTTCCTGCAGAGCT |
| | | TCGTGCATATCGTGCAGATGTTCATCAACACCAGC |
| 890 | IL15_RLI-CO12 | ATGGAGACAGACACGTTACTACTATGGGTCCTACTCCTCTGGGTCCCCGGCAGCACCGGGGA |
| | | CTATAAAGACGACGACGACAAAATCACGTGCCCTCCCCCCATGTCCGTCGAGCACGCAGACA |
| | | TCTGGGTCAAGAGCTACTCCCTCTACAGCAGGGAAAGGTACATCTGCAACAGCGGCTTCAAG |
| | | CGGAAGGCCGGTACGAGCAGCCTCACCGAGTGCGTCCTCAACAAGGCCACCAACGTCGCACA |
| | | CTGGACTACACCCAGCCTTAAGTGCATCCGAGATCCAGCCCTTGTTCACCAGAGGCCCGCCC |
| | | CGCCTTCCGGAGGCTCCGGCGGCGGCGGGAGCGGCGGTGGCTCCGGCGGTGGAGGCAGCCTG |
| | | CAGAACTGGGTGAACGTGATCAGCGACCTGAAGAAGATCGAGGATCTTATCCAGAGCATGCA |
| | | CATCGACGCCACCCTGTACACCGAGAGCGATGTGCACCCGAGCTGCAAAGTGACCGCCATGA |
| | | AATGCTTCCTGCTGGAGCTGCAAGTGATCAGCCTCGAGTCCGGGGATGCCTCCATCCACGAC |
| | | ACCGTGGAGAACCTCATTATCCTTGCCAACAACAGCCTGAGCAGCAATGGCAATGTGACAGA |
| | | AAGCGGCTGCAAGGAGTGTGAGGAGCTGGAAGAGAAGAATATTAAAGAGTTTCTCCAAAGCT |
| | | TTGTGCACATCGTTCAGATGTTCATCAACACCAGC |
| 891 | IL15_RLI-CO13 | ATGGAAACCGACACGCTCCTCCTCTGGGTTCTTCTTCTATGGGTCCCCGGCTCGACCGGGGA |
| | | TTATAAGGACGACGACGATAAGATCACCTGTCCCCCGCCCATGAGCGTCGAACACGCGGACA |
| | | TTTGGGTCAAGTCCTATAGCCTTTACTCCCGGGAGAGGTACATCTGTAACTCCGGTTTTAAG |
| | | AGGAAGGCGGGGACCAGCAGCCTAACCGAGTGCGTACTCAACAAGGCCACCAACGTCGCGCA |
| | | CTGGACCACCCCGAGCTTAAAGTGCATCCGGGACCCCGCACTCGTCCATCAGAGGCCCGCCC |
| | | CACCTAGCGGTGGCAGCGGGGGTGGAGGCTCCGGCGGCGGCAGCGGGGGCGGAGGAAGCCTG |
| | | CAAAACTGGGTAAACGTGATCAGCGATCTGAAGAAGATCGAGGACCTGATTCAGAGCATGCA |
| | | CATCGACGCCACCCTGTATACCGAAAGCGATGTGCACCCCAGCTGCAAGGTGACCGCCATGA |
| | | AATGTTTTCTGTTAGAGCTCCAGGTGATCTCCCTTGAGAGCGGCGACGCCTCCATTCATGAT |
| | | ACCGTGGAGAACCTCATCATCCTCGCCAACAACAGCCTGTCCAGCAACGGCAACGTCACGGA |
| | | GAGCGGCTGCAAGGAGTGCGAGGAGCTGGAGGAAAAGAATATCAAGGAGTTTCTGCAGAGCT |
| | | TCGTGCACATCGTCCAAATGTTCATCAACACCTCC |
| 892 | IL15_RLI-CO14 | ATGGAGACGGACACCCTACTACTCTGGGTACTTTTACTCTGGGTCCCCGGCAGCACCGGAGA |
| | | TTACAAAGACGACGACGATAAGATCACCTGCCCGCCTCCCATGAGCGTAGAGCACGCCGACA |
| | | TCTGGGTAAAATCATACAGCCTCTACAGCCGAGAGAGGTATATCTGCAATAGCGGCTTCAAG |
| | | CGAAAGGCCGGGACGTCGTCCCTCACCGAGTGCGTACTCAATAAGGCTACCAACGTCGCCCA |
| | | CTGGACCACCCCCAGCCTAAAGTGTATCAGAGATCCGGCCCTAGTCCATCAGAGGCCCGCCC |
| | | CGCCCAGCGGCGGCTCCGGGGGCGGCGGGAGCGGTGGCGGGAGCGGCGGTGGCGGAAGCCTC |
| | | CAGAACTGGGTGAACGTAATCTCGGACCTGAAGAAGATCGAGGACCTGATCCAGAGCATGCA |
| | | CATCGACGCGACCCTGTATACCGAGTCCGACGTGCACCCTAGCTGCAAGGTGACCGCCATGA |
| | | AGTGCTTCCTGCTGGAGCTGCAAGTGATCAGCCTGGAGAGCGGCGACGCCAGCATCCACGAC |
| | | ACCGTTGAGAACCTGATTATCCTGGCCAACAACTCCCTAAGCAGCAATGGCAATGTGACCGA |
| | | ATCCGGGTGCAAGGAGTGTGAGGAGCTGGAGGAGAAAAACATCAAGGAATTTCTGCAGTCCT |
| | | TCGTCCATATCGTGCAGATGTTTATAAATACGTCC |
| 893 | IL15_RLI-CO15 | ATGGAAACCGACACCCTCCTCCTCTGGGTCCTCCTCTTGTGGGTTCCCGGCAGCACCGGCGA |
| | | TTACAAGGACGACGACGACAAGATCACCTGCCCCCCGCCCATGAGCGTCGAGCACGCGGACA |
| | | TCTGGGTAAAAAGCTATAGCTTATACAGCAGGGAGCGTTACATTTGCAACAGCGGCTTCAAG |
| | | CGCAAGGCCGGCACCTCCTCCCTCACCGAGTGCGTCTTGAATAAGGCCACAAACGTTGCCCA |
| | | TTGGACCACGCCCTCGCTCAAGTGCATAAGAGATCCCGCCCTCGTTCACCAGAGGCCCGCCC |
| | | CACCCTCCGGAGGCAGCGGCGGAGGCGGGTCAGGAGGAGGGTCGGGCGGGGGCGGAAGCCTG |
| | | CAGAATTGGGTGAACGTGATCTCCGACCTCAAGAAAATCGAGGATCTAATACAGAGCATGCA |
| | | TATCGACGCCACCCTGTATACCGAGAGCGACGTGCATCCGTCCTGTAAGGTGACCGCCATGA |
| | | AGTGTTTCCTGCTCGAACTCCAGGTAATCAGCCTCGAGTCCGGGGACGCCAGCATACACGAC |
| | | ACCGTCGAAAATCTCATCATCCTGGCCAACAACAGCCTGTCGAGCAATGGCAACGTGACCGA |
| | | AAGCGGCTGCAAGGAGTGCGAGGAGCTGGAAGAAAAGAACATCAAGGAGTTCCTGCAGTCTT |
| | | TTGTGCACATCGTCCAGATGTTCATCAACACTAGC |
| 894 | IL15_RLI-CO16 | ATGGAAACCGACACCCTCCTCCTCTGGGTTCTCCTACTCTGGGTCCCCGGCAGCACCGGAGA |
| | | CTACAAGGACGACGACGATAAGATCACCTGCCCCCCGCCCATGTCCGTCGAGCACGCCGATA |
| | | TCTGGGTAAAGTCCTACTCGCTCTACTCCAGGGAAAGGTATATCTGCAACAGCGGCTTCAAG |
| | | CGGAAGGCCGGAACCAGCTCCCTCACAGAGTGCGTATTAAATAAGGCGACCAACGTCGCACA |
| | | CTGGACCACACCCTCACTTAAGTGCATCAGGGACCCGGCCTTGGTACATCAACGCCCGGCCC |
| | | CGCCTTCCGGCGGCTCCGGCGGCGGGGGCAGCGGTGGAGGCTCCGGGGGCGGCGGCAGCCTG |
| | | CAGAATTGGGTGAACGTGATCAGCGACCTGAAGAAGATCGAGGACCTGATCCAGAGCATGCA |
| | | TATCGACGCCACCCTGTATACAGAAAGCGACGTGCACCCCAGCTGTAAGGTCACCGCAATGA |
| | | AATGCTTCCTGCTGGAGCTTCAGGTCATCTCGCTCGAAAGCGGCGACGCCAGCATCCACGAC |
| | | ACTGTCGAAAACCTGATAATCCTGGCCAATAACAGCCTGAGCAGCAACGGCAACGTGACCGA |
| | | GTCCGGCTGCAAGGAATGTGAGGAGCTGGAGGAAAAGAATATCAAGGAGTTTCTTCAAAGCT |
| | | TTGTGCACATCGTGCAGATGTTTATCAACACCAGC |
| 895 | IL15_RLI-CO17 | ATGGAGACGGACACCCTCCTCCTCTGGGTCCTCCTACTCTGGGTCCCCGGAAGCACCGGCGA |
| | | CTACAAAGACGACGACGACAAGATCACCTGTCCCCCTCCGATGAGCGTCGAGCACGCCGACA |
| | | TTTGGGTCAAGTCCTACAGCCTCTACAGCAGGGAAAGGTACATCTGTAATAGCGGATTCAAG |
| | | CGGAAAGCGGGAACCAGCAGCCTTACCGAGTGCGTTCTTAATAAAGCCACGAACGTCGCCCA |
| | | TTGGACCACCCCCAGCCTCAAGTGCATCCGAGATCCCGCCTTGGTCCACCAAAGACCGGCCC |
| | | CACCCAGCGGCGGAAGCGGCGGCGGCGGGAGCGGGGGCGGCAGCGGTGGAGGCGGCTCCCTG |
| | | CAGAATTGGGTGAACGTGATCAGCGATCTGAAGAAGATAGAGGACCTGATCCAGAGCATGCA |
| | | TATCGATGCCACCCTGTACACCGAGTCCGATGTCCACCCCAGCTGTAAGGTGACTGCGATGA |
| | | AGTGCTTCCTGCTCGAGCTGCAGGTGATTAGCCTGGAGAGCGGCGACGCCAGCATACATGAC |
| | | ACCGTGGAGAATCTGATCATCCTGGCCAATAACTCCCTGAGTAGCAACGGGAACGTGACAGA |
| | | GAGCGGCTGTAAGGAGTGCGAAGAACTGGAAGAGAAGAACATCAAGGAGTTTCTGCAGAGCT |
| | | TCGTGCACATCGTGCAGATGTTCATAAACACAAGC |
| 896 | IL15_RLI-CO18 | ATGGAGACAGACACCTTACTCCTCTGGGTCCTCCTCTTGTGGGTTCCCGGAAGCACCGGAGA |
| | | CTACAAGGACGACGACGATAAGATAACCTGCCCACCCCCCATGAGCGTTGAACACGCCGACA |
| | | TCTGGGTCAAGAGCTATAGCCTCTACAGTAGGGAGAGGTACATCTGCAACAGCGGCTTTAAG |
| | | CGTAAGGCCGGTACCTCCTCGCTCACCGAGTGCGTCCTTAACAAGGCCACCAACGTTGCACA |
| | | CTGGACCACCCCTAGCCTTAAGTGCATCAGGGACCCCGCGCTTGTACACCAGCGTCCCGCCC |
| | | CTCCGAGCGGAGGATCCGGCGGCGGGGGCAGCGGGGGAGGGAGCGGGGGAGGCGGCAGCCTG |
| | | CAAAACTGGGTAAATGTGATCAGCGACCTGAAGAAGATTGAAGACTTGATACAAAGCATGCA |
| | | CATCGACGCCACCCTGTACACCGAGAGCGACGTGCACCCCTCCTGTAAAGTGACCGCGATGA |
| | | AGTGCTTCCTGCTCGAGCTCCAGGTGATCTCCCTGGAGAGCGGGGACGCCAGCATCCACGAC |
| | | ACTGTGGAGAACCTGATCATTCTCGCCAATAACAGCCTGAGCAGCAATGGGAACGTGACGGA |
| | | GAGCGGGTGCAAGGAATGCGAGGAGCTGGAGGAAAAGAATATAAAGGAGTTCCTCCAGAGCT |
| | | TCGTGCACATCGTGCAGATGTTCATCAACACCTCC |
| 897 | IL15_RLI-CO19 | ATGGAGACGGATACCCTCTTACTTTGGGTACTCCTTCTTTGGGTCCCCGGCTCCACGGGCGA |
| | | CTATAAGGACGACGACGACAAGATTACCTGTCCCCCACCCATGTCCGTCGAACACGCCGACA |
| | | TCTGGGTCAAGTCCTACAGCCTCTACAGCAGAGAGAGGTACATCTGCAACAGCGGCTTCAAA |
| | | AGGAAGGCGGGGACATCGAGCCTCACAGAGTGTGTCCTTAACAAGGCCACGAACGTTGCCCA |
| | | TTGGACCACGCCATCATTGAAGTGCATCAGGGATCCCGCCCTAGTTCACCAACGTCCGGCAC |
| | | CCCCCAGTGGCGGCTCAGGCGGCGGAGGCAGCGGGGGAGGCAGCGGGGGCGGAGGCAGCCTC |
| | | CAGAACTGGGTCAACGTGATCAGCGACCTGAAGAAGATAGAGGACCTGATCCAGAGCATGCA |
| | | CATCGACGCGACCCTGTACACCGAGAGCGACGTGCACCCCAGCTGCAAGGTGACCGCCATGA |
| | | AGTGCTTCCTCCTGGAGCTCCAGGTGATTTCCCTGGAATCCGGCGATGCCAGCATCCACGAT |
| | | ACCGTGGAGAACCTGATCATCCTGGCCAACAATTCGCTGAGTAGCAACGGCAACGTGACCGA |
| | | GTCGGGCTGCAAGGAGTGCGAGGAACTGGAAGAGAAGAACATAAAGGAGTTTCTCCAGTCCT |
| | | TTGTGCACATCGTGCAGATGTTCATCAATACCAGC |
| 898 | IL15_RLI-CO20 | ATGGAGACGGACACCCTACTACTCTGGGTCCTCCTCTTGTGGGTCCCCGGGTCCACCGGCGA |
| | | CTACAAAGACGACGACGATAAAATCACCTGCCCACCCCCCATGAGCGTCGAGCACGCCGACA |
| | | TTTGGGTAAAGAGCTACTCCTTGTATAGCCGGGAGAGGTACATCTGCAACTCCGGCTTTAAG |
| | | AGAAAAGCCGGCACCTCCAGCCTCACCGAGTGCGTCTTAAACAAGGCCACCAACGTAGCCCA |
| | | CTGGACTACGCCCTCACTTAAGTGTATCCGCGACCCGGCCCTTGTCCATCAAAGGCCCGCCC |
| | | CGCCCAGCGGAGGCAGCGGCGGGGGCGGCAGCGGGGGCGGATCCGGCGGAGGGGGGAGCCTG |
| | | CAGAACTGGGTGAACGTGATCTCAGACCTGAAGAAGATCGAAGACCTCATCCAGAGCATGCA |
| | | CATAGACGCCACCCTGTATACCGAGTCCGATGTGCATCCAAGTTGCAAAGTGACAGCCATGA |
| | | AATGCTTCCTGCTGGAGCTGCAGGTAATCTCCCTGGAGTCCGGCGACGCCTCCATCCACGAC |
| | | ACCGTGGAGAACCTGATCATCCTGGCGAACAACTCCCTTAGCTCAAATGGCAACGTGACCGA |
| | | GAGCGGGTGCAAAGAGTGTGAGGAGCTGGAGGAGAAGAACATCAAGGAGTTTCTGCAGAGTT |
| | | TTGTGCACATCGTGCAGATGTTCATCAATACCAGC |
| 899 | IL15_RLI-CO21 | ATGGAGACAGATACTTTACTCCTCTGGGTACTCTTACTTTGGGTCCCGGGAAGCACCGGCGA |
| | | CTATAAGGACGACGACGACAAGATCACCTGTCCCCCACCGATGAGCGTCGAGCACGCAGACA |
| | | TCTGGGTAAAGAGCTACAGCCTCTACAGCAGGGAGCGATACATCTGCAACAGCGGCTTCAAA |
| | | AGGAAAGCCGGTACCAGCTCCCTTACCGAGTGCGTACTCAACAAGGCCACCAACGTGGCCCA |
| | | CTGGACCACCCCTAGCTTGAAGTGTATCCGGGACCCCGCCTTAGTCCACCAGAGGCCAGCCC |
| | | CACCCAGCGGTGGCAGCGGCGGAGGCGGCTCCGGGGGAGGCAGCGGCGGGGGCGGCTCCCTG |
| | | CAGAATTGGGTGAACGTGATCAGCGATCTGAAGAAAATCGAAGACCTGATCCAGAGCATGCA |
| | | CATCGACGCCACCCTGTACACCGAGTCCGACGTGCACCCCAGCTGTAAGGTCACCGCCATGA |
| | | AATGCTTCCTGCTGGAGCTGCAGGTGATCAGCCTCGAGTCCGGGGACGCCAGCATCCACGAC |
| | | ACCGTGGAGAACCTGATTATCCTGGCTAACAACTCGCTGTCCAGCAACGGAAATGTGACCGA |
| | | ATCCGGCTGCAAGGAGTGCGAAGAACTTGAAGAGAAGAACATCAAGGAGTTCCTTCAAAGCT |
| | | TCGTGCACATCGTGCAGATGTTCATCAACACCAGC |
| 900 | IL15_RLI-CO22 | ATGGAGACAGATACCTTGTTACTCTGGGTCCTCCTCCTCTGGGTCCCCGGCAGCACCGGCGA |
| | | CTACAAGGACGACGACGATAAAATTACCTGTCCACCACCCATGAGCGTCGAGCACGCCGACA |
| | | TTTGGGTCAAGAGCTATAGCCTCTACAGCCGAGAAAGGTACATCTGCAACAGCGGCTTTAAG |
| | | AGGAAGGCCGGGACCAGCAGCCTCACCGAGTGCGTCTTAAACAAGGCCACCAACGTCGCCCA |
| | | CTGGACCACCCCCTCCCTCAAGTGCATAAGGGATCCCGCCCTAGTACACCAACGCCCCGCCC |
| | | CACCGAGCGGCGGCAGCGGAGGCGGCGGCTCCGGTGGCGGCAGTGGGGGAGGGGGGAGCCTG |
| | | CAGAACTGGGTGAACGTGATCAGCGACCTTAAGAAGATCGAAGACCTGATCCAGAGCATGCA |
| | | CATCGACGCCACCCTGTACACCGAGTCCGACGTGCACCCCAGCTGTAAGGTCACCGCCATGA |
| | | AGTGCTTCCTGCTTGAGCTCCAGGTCATCTCACTGGAGAGCGGCGATGCCAGCATCCACGAT |
| | | ACCGTGGAAAACCTTATCATCCTCGCAAACAATAGCCTCAGCAGCAATGGGAATGTGACCGA |
| | | GAGCGGCTGTAAAGAGTGTGAGGAGCTGGAGGAAAAGAACATCAAGGAGTTCCTGCAGTCCT |
| | | TCGTGCACATCGTTCAAATGTTTATCAACACCAGC |
| 901 | IL15_RLI-CO23 | ATGGAGACGGACACCTTACTCTTATGGGTTCTTCTCCTTTGGGTTCCCGGGTCCACCGGCGA |
| | | CTACAAGGACGACGACGACAAAATCACCTGCCCGCCCCCCATGTCCGTCGAACACGCGGATA |
| | | TCTGGGTAAAGTCCTACTCCCTCTACAGCCGGGAAAGGTACATCTGCAACTCCGGCTTTAAA |
| | | AGGAAGGCGGGGACCTCCAGCCTCACCGAGTGTGTATTAAACAAGGCCACCAACGTAGCGCA |
| | | TTGGACCACCCCCAGCCTCAAGTGCATCCGGGACCCCGCCCTCGTTCATCAGAGGCCGGCCC |
| | | CACCCTCAGGCGGCTCCGGTGGTGGGGGCAGCGGAGGCGGCAGCGGAGGCGGAGGCTCCCTG |
| | | CAGAACTGGGTGAACGTGATCTCCGACCTCAAGAAGATCGAGGACCTGATCCAGTCCATGCA |
| | | CATCGATGCCACGCTGTACACGGAGAGCGACGTGCACCCCAGCTGCAAGGTGACGGCCATGA |
| | | AATGCTTCCTACTGGAGCTCCAGGTGATCAGCCTGGAGTCGGGCGACGCCTCGATCCACGAC |
| | | ACGGTCGAGAATCTGATTATACTCGCCAACAACAGCCTGTCCAGCAACGGCAATGTGACCGA |
| | | AAGCGGCTGTAAGGAGTGTGAAGAACTGGAGGAGAAAAATATCAAGGAATTCCTGCAGAGCT |
| | | TTGTGCATATAGTGCAGATGTTCATCAACACCAGC |
| 902 | IL15_RLI-CO24 | ATGGAGACGGACACCCTCCTACTCTGGGTCCTCCTACTCTGGGTCCCCGGAAGCACAGGCGA |
| | | CTACAAGGACGACGACGACAAGATCACCTGCCCGCCCCCCATGAGCGTCGAGCACGCCGATA |
| | | TCTGGGTCAAGAGCTATTCACTCTATAGCAGGGAGAGGTACATCTGCAACTCCGGCTTCAAG |
| | | AGGAAGGCCGGCACGAGCAGCTTAACCGAGTGTGTTCTCAACAAGGCAACGAACGTAGCCCA |
| | | TTGGACCACGCCCTCCCTAAAGTGCATCAGGGACCCCGCCTTAGTCCACCAGCGGCCGGCCC |
| | | CACCATCCGGAGGGAGCGGCGGCGGAGGAAGCGGCGGCGGCAGCGGGGGCGGAGGCAGCCTG |
| | | CAGAACTGGGTGAACGTGATCAGCGACCTGAAGAAAATAGAGGACCTGATCCAGAGCATGCA |
| | | CATCGACGCTACCCTGTACACCGAGTCCGACGTGCACCCCAGCTGTAAGGTGACCGCGATGA |
| | | AGTGCTTTCTGCTGGAACTGCAGGTGATCAGCCTGGAGAGCGGCGATGCCTCCATCCACGAC |
| | | ACCGTGGAGAACCTGATCATCCTTGCCAATAACAGCCTGTCCTCAAATGGCAACGTGACGGA |
| | | AAGTGGCTGTAAGGAATGCGAGGAGCTGGAAGAGAAAAATATCAAGGAGTTTCTGCAGAGCT |
| | | TTGTGCACATCGTACAGATGTTTATAAACACCAGC |
| 903 | IL15_RLI-CO25 | ATGGAGACGGATACCCTACTTCTCTGGGTCCTCCTCCTATGGGTCCCCGGCTCCACCGGCGA |
| | | CTACAAAGACGACGACGACAAGATCACGTGTCCCCCGCCCATGAGCGTAGAGCACGCCGACA |
| | | TCTGGGTCAAAAGCTACAGCCTCTACAGCAGGGAGCGCTACATCTGCAATAGCGGATTCAAG |
| | | CGCAAAGCGGGCACCAGCAGCCTCACCGAGTGCGTCCTCAATAAAGCCACCAACGTCGCCCA |
| | | TTGGACCACTCCCAGTCTTAAGTGCATCCGGGACCCCGCCCTTGTTCACCAAAGACCCGCCC |
| | | CACCGTCCGGCGGGTCCGGCGGCGGCGGGAGCGGAGGCGGCAGCGGGGGCGGAGGGAGCCTG |
| | | CAAAACTGGGTCAACGTGATCTCCGACCTCAAGAAGATCGAGGACCTGATCCAGAGCATGCA |
| | | TATCGACGCCACCCTATACACGGAGAGCGATGTCCACCCCAGCTGTAAGGTGACAGCCATGA |
| | | AGTGTTTTCTGTTAGAGCTGCAGGTGATCTCCCTGGAGTCCGGCGACGCCAGCATCCACGAC |
| | | ACCGTGGAAAACTTAATAATCCTGGCCAACAACTCTCTGAGCAGCAATGGCAACGTGACCGA |
| | | GAGTGGCTGCAAAGAGTGCGAGGAACTGGAAGAGAAAAATATCAAGGAGTTCCTGCAGAGCT |
| | | TCGTCCATATCGTACAGATGTTTATCAACACGAGC |
| 904 | IL15Ra_WT_miR | ATGGCCCCCAGGAGGGCCAGGGGGTGCCGCACCCTCGGCCTCCCCGCGCTATTATTACTCCT |
| | 122-CO01 | CCTGTTACGACCCCCCGCCACCAGGGGGATCACCTGTCCCCCGCCCATGTCCGTCGAGCACG |
| | | CGGACATTTGGGTCAAGAGCTACTCCCTCTATTCCCGGGAGCGGTACATCTGCAACTCCGGC |
| | | TTCAAGAGGAAGGCCGGCACCAGCAGCCTCACCGAGTGTGTCCTCAATAAGGCCACCAACGT |
| | | CGCCCACTGGACCACCCCCAGCTTGAAGTGCATCCGGGACCCCGCCCTCGTCCACCAGAGGC |
| | | CGGCCCCGCCCAGCACAGTCACAACCGCAGGTGTCACCCCCCAGCCGGAGTCCCTCAGCCCG |
| | | AGCGGCAAGGAGCCCGCCGCCTCCAGCCCGAGTTCGAACAACACCGCGGCCACCACCGCCGC |
| | | CATCGTGCCCGGGAGCCAGCTGATGCCCAGCAAGAGCCCCTCCACCGGGACCACCGAGATCA |
| | | GCAGCCACGAGTCGAGCCACGGGACCCCCAGCCAGACCACCGCCAAGAACTGGGAGCTGACC |
| | | GCGTCCGCGTCACATCAGCCCCCCGGGGTCTACCCCCAAGGCCACAGCGACACCACCGTGGC |
| | | CATTAGCACAAGCACCGTCCTGCTGTGCGGCCTGAGCGCGGTGAGCCTGCTGGCCTGCTACC |
| | | TGAAAAGCAGGCAGACCCCGCCCCTGGCGAGCGTGGAGATGGAGGCGATGGAGGCCCTGCCC |
| | | GTGACCTGGGGCACCAGCTCAAGGGACGAGGACCTGGAGAACTGTAGCCACCACCTG |
| 905 | IL15Ra_WT_miR | ATGGCCCCCAGGCGGGCCAGGGGCTGCAGGACGTTGGGCCTCCCCGCCCTCCTCTTGCTCCT |
| | 122-CO02 | CTTGTTAAGGCCCCCCGCCACCCGGGGCATCACTTGTCCCCCGCCAATGAGCGTAGAGCACG |
| | | CCGACATCTGGGTCAAGAGCTACAGCCTATACTCCCGGGAGCGGTACATCTGTAACAGCGGC |
| | | TTCAAGAGGAAGGCCGGCACCAGTAGCCTCACAGAGTGCGTCCTCAACAAGGCCACGAACGT |
| | | AGCCCACTGGACCACCCCCTCGCTCAAGTGCATCAGGGACCCCGCCCTCGTGCACCAGCGAC |
| | | CCGCGCCGCCCTCCACCGTAACCACCGCCGGGGTTACCCCCCAGCCTGAAAGCCTGAGCCCC |
| | | AGCGGAAAGGAGCCCGCCGCCAGCAGCCCCAGCAGCAATAATACCGCCGCTACGACCGCGGC |
| | | CATCGTCCCTGGGAGCCAGCTGATGCCCAGCAAGTCGCCCAGCACCGGGACCACGGAGATCA |
| | | GCAGCCACGAGAGCAGCCACGGCACGCCCAGCCAGACCACCGCCAAGAACTGGGAGCTGACC |
| | | GCCAGCGCCTCCCACCAGCCGCCAGGCGTCTACCCCCAGGGCCACAGCGACACCACCGTGGC |
| | | CATCTCAACCAGCACGGTCCTGCTGTGCGGCCTGAGCGCCGTGAGCCTGCTGGCCTGCTACC |
| | | TGAAAAGCAGGCAGACCCCACCGCTGGCCTCCGTGGAGATGGAGGCCATGGAGGCCCTGCCC |
| | | GTGACATGGGGCACCAGCAGCAGGGACGAGGACCTGGAGAACTGCTCCCACCACCTG |
| 906 | IL15Ra_WT_miR | ATGGCCCCTCGGAGGGCAAGGGGGTGTCGGACGCTCGGCCTCCCCGCCCTCCTTCTCCTCCT |
| | 122-CO03 | CCTCCTCAGGCCCCCCGCCACCAGGGGCATCACCTGCCCTCCCCCCATGTCGGTAGAACACG |
| | | CCGACATCTGGGTCAAGAGCTACTCCCTCTACAGCAGGGAGCGGTACATTTGCAACAGCGGC |
| | | TTTAAGAGGAAGGCCGGCACTAGCAGCCTTACCGAGTGCGTCCTCAACAAGGCGACCAACGT |
| | | CGCCCACTGGACCACGCCCAGCTTGAAGTGCATCAGGGACCCCGCCCTGGTCCACCAGAGGC |
| | | CAGCCCCGCCCTCCACCGTGACCACGGCGGGCGTGACCCCCCAGCCCGAAAGCCTCTCCCCC |
| | | AGCGGCAAAGAGCCTGCCGCCTCAAGCCCCAGCAGCAACAACACGGCGGCCACCACGGCCGC |
| | | CATCGTGCCCGGCAGCCAGCTGATGCCAAGCAAGTCCCCGTCCACCGGCACAACCGAGATTT |
| | | CCAGCCACGAGAGCAGCCACGGCACCCCCTCCCAAACCACCGCCAAGAACTGGGAGCTGACC |
| | | GCCAGCGCGTCCCACCAGCCCCCCGGCGTCTACCCGCAGGGGCACAGCGACACCACCGTGGC |
| | | CATCTCGACCTCCACGGTGCTGCTGTGCGGCCTGAGCGCCGTCTCGCTCCTGGCCTGTTACC |
| | | TGAAAAGCAGGCAGACCCCTCCCCTCGCCTCCGTGGAAATGGAAGCCATGGAGGCCCTGCCC |
| | | GTGACCTGGGGGACCAGCTCCCGGGACGAGGACCTGGAGAACTGCAGCCACCATCTG |
| 907 | IL15Ra_WT_miR | ATGGCCCCCCGGCGGGCCAGGGGCTGCCGCACCCTCGGCCTCCCCGCCCTCCTCCTTCTCCT |
| | 122-CO04 | CCTCCTAAGACCACCGGCCACCAGGGGAATCACCTGCCCACCCCCGATGAGCGTAGAGCACG |
| | | CCGATATTTGGGTCAAGAGCTACAGCCTCTATAGCAGGGAGAGGTACATCTGCAACTCCGGG |
| | | TTCAAGAGGAAGGCCGGCACCTCCAGCCTCACGGAGTGCGTCCTTAACAAGGCCACCAACGT |
| | | CGCCCACTGGACCACCCCGAGCCTCAAGTGCATCCGGGACCCCGCCCTCGTACACCAGAGGC |
| | | CCGCCCCACCCAGCACGGTCACCACAGCCGGTGTGACCCCACAGCCCGAAAGCCTGAGCCCC |
| | | AGCGGCAAGGAGCCCGCCGCCAGCAGCCCCAGCAGCAACAACACCGCGGCAACGACCGCCGC |
| | | GATCGTGCCGGGCAGCCAGCTGATGCCCAGCAAAAGCCCCAGCACCGGCACGACGGAAATCA |
| | | GCTCCCACGAGTCGAGCCACGGCACTCCCTCCCAGACCACTGCCAAGAACTGGGAGCTTACA |
| | | GCCTCCGCCAGCCACCAGCCCCCCGGGGTGTACCCCCAGGGGCACTCCGACACCACCGTGGC |
| | | CATCTCCACCAGCACCGTGCTGCTGTGCGGCCTGAGCGCCGTGAGCCTGCTCGCCTGCTACC |
| | | TGAAAAGCAGGCAAACGCCCCCGCTGGCCTCCGTCGAGATGGAGGCCATGGAAGCCCTCCCC |
| | | GTGACCTGGGGCACCAGCAGCCGGGATGAAGATCTGGAGAATTGCAGCCACCACCTG |
| 908 | IL15Ra_WT_miR | ATGGCCCCGAGGAGGGCCAGAGGCTGCAGGACCCTCGGCCTCCCCGCCCTCTTACTCCTCCT |
| | 122-CO05 | CTTGCTCCGACCCCCGGCCACCAGGGGCATCACCTGCCCCCCGCCGATGTCGGTCGAACACG |
| | | CCGACATCTGGGTTAAGAGCTATTCCCTATACTCCCGGGAGCGGTATATTTGCAACAGCGGC |
| | | TTCAAGAGGAAGGCCGGCACCAGCTCCCTCACCGAGTGCGTCCTCAACAAGGCCACCAACGT |
| | | GGCCCACTGGACCACACCCAGCCTCAAGTGCATTAGGGACCCCGCCCTCGTACACCAGAGGC |
| | | CCGCCCCACCTAGCACCGTGACGACCGCCGGCGTCACCCCCCAGCCAGAGAGCCTGAGCCCC |
| | | AGCGGCAAAGAGCCCGCTGCCAGCAGCCCCAGCAGCAATAACACGGCGGCCACCACCGCCGC |
| | | AATCGTGCCCGGGAGCCAGCTCATGCCCAGCAAGTCCCCCAGCACCGGCACCACCGAGATCA |
| | | GCAGCCATGAGAGCTCCCACGGGACCCCCTCCCAGACCACCGCCAAGAACTGGGAGCTGACC |
| | | GCCAGCGCCTCCCACCAACCGCCCGGCGTGTACCCCCAGGGGCACAGCGACACCACCGTCGC |
| | | CATCTCGACCTCGACCGTGCTGCTGTGCGGCCTGAGCGCCGTGAGCCTCCTGGCGTGCTACC |
| | | TCAAGAGCCGCCAGACGCCCCCGCTGGCCTCCGTGGAAATGGAGGCCATGGAGGCGCTGCCC |
| | | GTGACGTGGGGCACCTCCAGCCGAGACGAGGATCTGGAAAATTGCAGCCACCACCTG |
| 909 | IL15Ra_WT_miR | ATGGCCCCCCGGAGAGCTAGGGGGTGCAGAACCCTCGGCCTCCCCGCCCTCCTTCTCCTCTT |
| | 122-CO06 | GCTCCTCCGGCCCCCCGCCACCAGGGGCATCACCTGCCCCCCGCCCATGTCGGTCGAGCACG |
| | | CCGACATCTGGGTCAAGAGCTACAGCCTTTACAGCAGGGAGAGGTACATCTGCAACTCCGGC |
| | | TTCAAACGGAAAGCCGGAACCAGCTCCCTCACCGAGTGCGTCCTCAACAAGGCCACCAACGT |
| | | GGCCCACTGGACCACCCCCAGCTTGAAGTGCATCCGGGACCCCGCGTTGGTCCACCAGAGGC |
| | | CCGCCCCGCCGAGCACCGTGACCACAGCGGGAGTGACTCCGCAGCCCGAGAGCCTGTCCCCC |
| | | TCGGGGAAAGAGCCCGCCGCAAGCAGCCCCAGCAGCAACAACACCGCAGCCACCACTGCCGC |
| | | CATCGTCCCCGGCTCCCAGCTGATGCCCTCCAAGAGCCCGAGCACCGGGACCACCGAGATCA |
| | | GCTCCCACGAGAGCAGCCACGGGACCCCAAGCCAGACCACCGCCAAAAACTGGGAGCTCACA |
| | | GCCTCGGCCAGCCACCAGCCCCCCGGCGTGTACCCGCAGGGACACAGCGATACCACCGTGGC |
| | | CATAAGCACGAGCACGGTGCTGCTGTGTGGGCTGTCCGCGGTGTCCCTGCTGGCCTGCTACC |
| | | TGAAAAGCAGGCAGACCCCGCCCCTCGCAAGCGTGGAAATGGAGGCGATGGAAGCCCTCCCG |
| | | GTGACCTGGGGCACCAGCAGCAGGGATGAGGACCTGGAGAATTGTTCCCACCACCTG |
| 910 | IL15Ra_WT_miR | ATGGCGCCCCGTAGGGCGAGGGGCTGCCGGACCTTGGGCCTCCCCGCCCTACTTCTTCTCCT |
| | 122-CO07 | CCTCCTCCGCCCGCCCGCCACGAGGGGTATCACCTGCCCGCCCCCCATGAGCGTCGAGCACG |
| | | CCGACATTTGGGTAAAGAGCTACTCACTCTACAGCAGGGAGAGGTACATCTGCAACAGCGGC |
| | | TTTAAGAGGAAGGCGGGGACGAGCTCCCTAACCGAGTGCGTCCTCAACAAGGCCACCAACGT |
| | | GGCCCACTGGACCACCCCATCGCTCAAGTGCATACGGGACCCGGCATTAGTACACCAGCGGC |
| | | CCGCGCCGCCCAGCACGGTGACGACCGCGGGTGTTACGCCTCAACCCGAAAGCCTGAGCCCC |
| | | AGTGGCAAGGAGCCCGCGGCCAGCTCCCCCTCCAGCAACAATACTGCCGCCACCACCGCCGC |
| | | CATCGTCCCCGGGAGCCAGCTGATGCCCAGCAAGAGCCCCAGCACCGGGACCACCGAAATCA |
| | | GCTCACACGAAAGCTCCCACGGTACCCCCTCCCAGACCACCGCCAAGAACTGGGAGCTGACC |
| | | GCCTCCGCCAGCCATCAGCCCCCCGGTGTGTACCCCCAAGGCCATAGCGACACCACGGTGGC |
| | | CATCAGCACCAGCACCGTGCTGCTCTGCGGCCTGTCCGCCGTGAGCCTGCTGGCCTGTTATC |
| | | TCAAGAGCAGGCAGACCCCACCGCTGGCGAGCGTGGAGATGGAGGCCATGGAGGCCCTGCCC |
| | | GTGACTTGGGGCACGTCCAGCCGAGACGAGGACCTGGAGAACTGCTCCCACCATCTG |
| 911 | IL15Ra_WT_miR | ATGGCCCCCAGGAGGGCCAGGGGCTGTAGGACCCTCGGCCTCCCGGCCCTACTCCTCCTTCT |
| | 122-CO08 | ACTCCTCCGCCCGCCCGCCACCAGGGGCATCACCTGTCCCCCACCGATGAGCGTCGAGCACG |
| | | CGGACATCTGGGTCAAGAGCTACAGCCTCTACAGCAGGGAGAGGTACATCTGTAACAGCGGG |
| | | TTCAAGAGGAAGGCCGGAACCTCAAGCCTCACCGAGTGCGTTCTCAATAAGGCCACCAACGT |
| | | CGCCCACTGGACGACCCCCTCGCTCAAGTGCATCAGGGATCCCGCGTTGGTACACCAACGGC |
| | | CGGCCCCTCCCTCCACGGTGACGACCGCAGGGGTGACTCCGCAGCCCGAGAGCCTCTCCCCC |
| | | AGCGGGAAAGAGCCGGCCGCGAGCAGCCCCAGCAGCAATAACACCGCCGCCACAACGGCCGC |
| | | CATCGTGCCCGGGAGCCAGCTGATGCCCTCCAAGTCCCCCAGCACCGGCACGACCGAGATCT |
| | | CCTCCCACGAGTCCTCCCACGGGACCCCGAGCCAGACCACCGCCAAAAACTGGGAGCTGACA |
| | | GCCAGCGCCTCCCACCAGCCCCCCGGCGTGTACCCGCAAGGACACAGCGATACGACGGTGGC |
| | | CATCTCCACCAGCACCGTCCTGCTGTGCGGGCTCTCAGCCGTGAGCCTGCTGGCCTGTTACC |
| | | TGAAAAGCAGGCAGACCCCGCCACTGGCCAGCGTCGAGATGGAGGCGATGGAGGCGCTGCCC |
| | | GTGACCTGGGGCACGAGCAGCAGGGACGAGGACCTCGAGAACTGCTCCCATCACCTG |
| 912 | IL15Ra_WT_miR | ATGGCCCCGAGGAGGGCGAGGGGCTGCCGCACCCTTGGTCTGCCCGCCCTCCTCCTCCTCCT |
| | 122-CO09 | CTTGCTCAGGCCACCGGCCACCAGGGGGATCACGTGTCCCCCTCCCATGTCCGTTGAGCACG |
| | | CCGACATCTGGGTTAAGTCCTACTCCCTTTACAGCCGCGAGAGGTACATTTGCAACTCCGGC |
| | | TTTAAGAGGAAGGCCGGCACCTCCAGCCTCACCGAGTGCGTCCTTAATAAAGCCACCAACGT |
| | | GGCCCACTGGACCACCCCGAGCCTCAAGTGCATAAGGGACCCCGCCCTCGTCCATCAGAGGC |
| | | CCGCCCCTCCCAGCACTGTGACCACGGCTGGCGTCACGCCGCAGCCCGAGAGCCTGAGTCCC |
| | | AGCGGCAAGGAACCCGCCGCGTCCAGCCCCAGCAGCAATAACACCGCCGCCACCACCGCCGC |
| | | TATCGTGCCGGGGTCCCAGCTGATGCCCAGCAAGAGCCCCAGCACCGGTACGACCGAGATAA |
| | | GCAGCCATGAGAGCTCGCACGGCACCCCCTCGCAGACCACAGCCAAGAACTGGGAGCTGACG |
| | | GCCTCGGCGTCCCACCAGCCCCCCGGCGTGTACCCCCAGGGCCACTCCGACACCACCGTCGC |
| | | CATCAGCACCAGCACGGTCCTGCTCTGCGGCCTGTCGGCCGTTTCCCTGCTGGCCTGCTACC |
| | | TGAAGTCCAGGCAGACCCCACCGCTGGCGTCCGTGGAAATGGAGGCCATGGAGGCTCTGCCC |
| | | GTGACCTGGGGGACCTCCTCCAGGGACGAGGATCTGGAAAATTGCAGCCACCACCTG |
| 913 | IL15Ra_WT_miR | ATGGCCCCCAGGCGAGCCAGGGGCTGTAGGACCCTCGGCCTCCCCGCGCTCCTCCTCCTCCT |
| | 122-CO10 | CCTCCTTAGGCCCCCGGCCACGCGGGGCATAACCTGCCCCCCGCCGATGTCCGTCGAGCACG |
| | | CCGACATTTGGGTTAAGAGCTACAGCCTCTACAGCAGGGAGAGGTACATCTGCAACAGCGGG |
| | | TTCAAAAGGAAGGCCGGCACCAGCAGCCTCACGGAGTGCGTCCTTAACAAGGCCACCAACGT |
| | | CGCTCACTGGACCACCCCATCCCTCAAGTGCATAAGGGACCCGGCCTTGGTACACCAGAGGC |
| | | CCGCCCCGCCGAGCACCGTGACCACGGCAGGAGTGACACCCCAGCCGGAGTCCCTGAGCCCG |
| | | AGCGGCAAAGAGCCGGCCGCCTCGAGCCCCAGCAGCAACAACACGGCCGCCACAACTGCCGC |
| | | CATCGTCCCCGGCAGCCAGCTGATGCCCAGCAAAAGCCCCAGCACGGGCACGACGGAGATCA |
| | | GCTCCCACGAAAGCTCCCACGGCACCCCCAGCCAGACCACCGCCAAGAACTGGGAGCTCACC |
| | | GCCTCCGCGTCGCACCAGCCCCCCGGCGTGTATCCGCAGGGCCACAGCGACACAACCGTGGC |
| | | CATCAGCACCAGCACCGTGCTGCTGTGCGGCCTGTCCGCCGTGTCTCTGCTGGCATGCTACC |
| | | TGAAGTCCCGGCAGACCCCGCCCCTGGCCTCCGTGGAGATGGAGGCCATGGAGGCCCTGCCC |
| | | GTGACCTGGGGAACCAGCAGCAGGGACGAGGACCTGGAGAATTGCTCCCACCACCTG |
| 914 | IL15Ra_WT_miR | ATGGCGCCCAGGCGGGCGCGGGGCTGCAGGACCCTCGGGCTTCCGGCCCTACTCCTCCTCCT |
| | 122-CO11 | CTTACTCAGGCCCCCCGCGACGCGAGGCATCACCTGCCCTCCCCCCATGAGCGTCGAGCACG |
| | | CCGACATCTGGGTCAAGAGCTACTCCTTGTACAGCCGCGAACGTTACATCTGTAACAGCGGC |
| | | TTCAAGAGGAAGGCCGGCACGAGCTCCCTCACGGAGTGCGTACTCAACAAGGCCACCAACGT |
| | | GGCCCACTGGACCACGCCCTCCCTCAAGTGCATCAGGGACCCCGCCCTCGTTCATCAGAGGC |
| | | CTGCCCCACCAAGCACAGTGACGACCGCAGGTGTGACACCCCAGCCCGAGTCCCTATCCCCC |
| | | AGCGGCAAGGAGCCCGCCGCCAGCAGCCCCAGCAGCAACAACACCGCCGCCACCACGGCGGC |
| | | CATCGTGCCAGGCAGCCAGCTGATGCCCTCAAAATCACCCAGCACCGGCACCACCGAAATCA |
| | | GCTCCCACGAGAGCAGCCATGGCACCCCCAGCCAGACGACCGCCAAAAACTGGGAGCTGACC |
| | | GCCAGCGCCAGCCACCAGCCCCCCGGGGTGTACCCCCAGGGGCACAGCGACACCACTGTGGC |
| | | CATCAGCACCAGCACCGTGCTCCTGTGCGGCTTGTCCGCCGTCTCCCTGCTGGCATGTTACC |
| | | TGAAAAGCAGGCAAACGCCCCCGCTGGCCTCCGTGGAGATGGAGGCCATGGAGGCCCTGCCC |
| | | GTGACCTGGGGAACCAGCTCGCGGGACGAAGATCTCGAGAATTGCTCCCATCACCTG |
| 915 | IL15Ra_WT_miR | ATGGCCCCCAGGAGGGCCAGAGGCTGCAGGACCCTTGGGCTCCCCGCCCTCCTTCTCCTCCT |
| | 122-CO12 | CCTCCTAAGGCCCCCGGCCACCCGCGGGATCACCTGCCCGCCCCCCATGAGCGTCGAACACG |
| | | CCGACATCTGGGTCAAGTCCTACAGCCTCTACAGCCGGGAGAGGTACATCTGCAACAGCGGC |
| | | TTCAAGCGTAAGGCCGGGACGAGCTCACTAACAGAGTGCGTCCTCAACAAGGCCACTAACGT |
| | | TGCGCACTGGACGACCCCCAGCCTCAAGTGCATCCGCGACCCGGCCCTCGTACACCAGAGGC |
| | | CCGCCCCGCCGAGCACCGTGACCACCGCCGGAGTGACACCCCAGCCTGAGAGCCTGTCTCCC |
| | | AGCGGGAAGGAGCCCGCTGCCTCCAGCCCGAGCAGCAACAACACCGCAGCGACCACCGCGGC |
| | | CATAGTGCCCGGCTCCCAGCTTATGCCCAGCAAGAGCCCCAGCACGGGAACCACCGAGATCA |
| | | GCTCGCACGAGTCCAGCCACGGGACACCCTCCCAGACCACCGCTAAGAATTGGGAGCTGACC |
| | | GCTAGCGCTTCCCACCAGCCCCCTGGGGTGTACCCACAGGGGCACAGCGACACCACGGTCGC |
| | | CATCAGCACCAGCACCGTGCTGCTGTGCGGCCTAAGCGCGGTGTCCCTGCTGGCGTGTTACC |
| | | TGAAGTCGCGGCAGACCCCACCCCTGGCCAGCGTCGAGATGGAGGCCATGGAGGCCCTGCCC |
| | | GTGACCTGGGGCACCAGCTCCAGGGATGAAGACCTCGAGAACTGCAGCCACCACCTA |
| 916 | IL15Ra_WT_miR | ATGGCCCCCAGAAGGGCCAGGGGTTGCCGCACCCTCGGCCTCCCAGCCCTACTCCTCCTTCT |
| | 122-CO13 | TCTCCTCCGCCCGCCCGCCACGAGGGGCATCACGTGCCCACCCCCCATGAGCGTCGAGCACG |
| | | CCGACATCTGGGTCAAGAGCTACAGCCTCTACTCCCGCGAGCGGTACATCTGCAATAGCGGG |
| | | TTCAAGAGGAAGGCCGGCACCTCCAGCCTCACCGAGTGCGTCCTCAACAAGGCCACCAACGT |
| | | CGCCCACTGGACCACCCCCAGTCTCAAGTGCATCAGGGATCCCGCCCTTGTCCACCAGAGGC |
| | | CCGCCCCACCCAGCACCGTGACCACCGCGGGGGTAACCCCCCAACCTGAGTCGCTGAGCCCC |
| | | AGCGGCAAGGAGCCCGCCGCCAGCAGCCCCAGCTCAAACAATACCGCCGCGACCACCGCCGC |
| | | CATCGTGCCCGGGAGCCAGCTGATGCCCAGCAAGTCCCCCAGCACGGGCACCACGGAGATCT |
| | | CCAGCCACGAGAGCAGCCACGGCACTCCCTCCCAAACCACCGCCAAGAACTGGGAGCTGACC |
| | | GCGTCCGCCTCGCATCAGCCTCCCGGCGTGTACCCCCAGGGCCACAGCGACACCACGGTCGC |
| | | CATCAGCACCAGCACCGTGCTCCTGTGTGGGCTGAGCGCCGTCAGCCTGCTGGCCTGCTACC |
| | | TGAAAAGCCGCCAGACCCCGCCCCTGGCGTCCGTCGAGATGGAGGCCATGGAGGCCCTGCCC |
| | | GTGACCTGGGGAACCAGCTCCAGGGACGAGGACCTGGAGAATTGCAGCCACCACCTC |
| 917 | IL15Ra_WT_miR | ATGGCCCCCCGAAGGGCGAGGGGGTGCCGGACCCTCGGCCTCCCCGCCCTCTTACTCCTCTT |
| | 122-CO14 | GCTCCTCCGCCCGCCCGCGACCAGGGGGATCACCTGTCCGCCGCCCATGTCCGTCGAGCACG |
| | | CCGACATCTGGGTCAAGTCCTACAGCCTCTATTCCCGGGAGAGGTACATCTGCAACAGCGGC |
| | | TTCAAACGTAAGGCCGGGACAAGCAGCCTTACGGAGTGCGTCCTCAACAAAGCCACCAACGT |
| | | GGCGCATTGGACCACCCCCAGCCTCAAGTGCATCAGGGATCCCGCCCTCGTTCACCAGAGGC |
| | | CCGCCCCACCCAGCACCGTGACAACCGCCGGGGTGACCCCCCAGCCCGAATCCCTGTCCCCG |
| | | AGCGGCAAGGAACCCGCCGCGAGCAGCCCCTCCAGCAACAACACCGCCGCTACCACCGCCGC |
| | | GATCGTGCCAGGCTCGCAGCTGATGCCCAGCAAGAGCCCGAGCACCGGGACGACCGAGATCT |
| | | CCAGCCACGAGTCCAGCCACGGGACCCCCAGCCAGACCACGGCCAAGAACTGGGAGCTCACC |
| | | GCCAGCGCGAGCCACCAGCCGCCCGGAGTCTACCCCCAGGGCCACAGCGACACCACCGTTGC |
| | | CATCTCCACGAGCACGGTGCTTCTGTGCGGCCTGTCGGCGGTGAGTCTCCTGGCCTGCTATC |
| | | TGAAATCCCGGCAGACCCCGCCCCTGGCCAGCGTCGAGATGGAGGCCATGGAGGCGCTGCCC |
| | | GTGACCTGGGGGACCTCCTCGCGCGATGAGGACCTGGAGAACTGCTCCCATCACCTG |
| 918 | IL15Ra_WT_miR | ATGGCGCCCAGGAGGGCCAGGGGCTGCCGGACGCTCGGCCTCCCCGCCCTCCTCCTCCTATT |
| | 122-CO15 | ACTCCTAAGGCCCCCCGCCACCAGGGGAATCACCTGTCCCCCGCCCATGTCCGTCGAGCACG |
| | | CCGACATCTGGGTCAAGAGCTACAGCCTCTACAGCAGGGAGCGGTACATCTGCAACAGCGGC |
| | | TTCAAGAGGAAGGCCGGCACCAGCAGCCTCACGGAGTGCGTCCTCAACAAGGCGACCAACGT |
| | | CGCCCATTGGACCACCCCGAGCTTAAAGTGCATCCGGGACCCCGCCCTTGTCCATCAAAGAC |
| | | CGGCGCCCCCCTCCACCGTGACGACAGCCGGGGTAACCCCCCAACCCGAGTCCCTGTCCCCC |
| | | TCCGGAAAGGAGCCCGCAGCCAGCTCCCCCAGCTCCAACAACACCGCCGCAACCACCGCCGC |
| | | GATCGTGCCGGGCAGCCAACTGATGCCCTCCAAGAGCCCATCCACCGGAACCACCGAGATCA |
| | | GCAGCCACGAGTCAAGCCACGGCACCCCCTCACAGACCACCGCCAAAAACTGGGAGCTGACC |
| | | GCCAGCGCCAGCCACCAGCCCCCCGGCGTGTACCCGCAGGGCCATAGCGACACAACCGTCGC |
| | | CATCAGCACCTCCACGGTGCTGCTGTGTGGTCTGAGCGCCGTCAGCCTGCTGGCCTGCTACC |
| | | TCAAGAGCCGCCAGACCCCTCCCCTGGCCTCCGTGGAGATGGAGGCCATGGAGGCCCTGCCC |
| | | GTCACGTGGGGGACGAGCAGCAGGGACGAGGACCTGGAGAACTGCTCCCATCACCTC |
| 919 | IL15Ra_WT_miR | ATGGCCCCCAGGCGGGCCAGGGGCTGTAGGACACTCGGTCTGCCCGCCCTACTCCTCCTTCT |
| | 122-CO16 | ACTACTCAGGCCCCCCGCCACACGCGGCATCACCTGTCCCCCGCCCATGAGCGTCGAGCACG |
| | | CGGACATCTGGGTCAAGAGCTATAGCCTCTATTCAAGGGAGCGGTACATCTGCAACAGCGGC |
| | | TTCAAGCGGAAGGCCGGGACCAGCTCGCTCACCGAGTGCGTCTTGAACAAAGCCACGAACGT |
| | | GGCCCACTGGACCACCCCCAGCCTCAAGTGCATCCGCGACCCCGCCCTCGTCCATCAGAGGC |
| | | CTGCCCCACCGTCCACGGTAACCACGGCCGGGGTCACCCCCCAACCCGAGTCCCTGAGCCCG |
| | | AGCGGCAAGGAGCCCGCCGCCAGCAGCCCCTCCAGCAACAACACGGCCGCCACGACCGCTGC |
| | | CATCGTGCCCGGCTCCCAGCTCATGCCGAGCAAGTCCCCCAGCACCGGCACCACGGAGATCA |
| | | GCTCCCACGAGTCCAGCCACGGGACCCCCTCCCAGACCACCGCCAAGAATTGGGAGCTGACG |
| | | GCCAGCGCCAGCCACCAGCCCCCCGGGGTGTACCCGCAAGGGCACTCCGACACCACCGTGGC |
| | | CATCAGCACCAGCACGGTGCTCCTGTGCGGCCTGAGCGCCGTCAGCCTGCTGGCGTGCTATC |
| | | TGAAAAGCAGGCAGACCCCGCCCCTGGCGTCCGTCGAGATGGAGGCTATGGAGGCCCTGCCG |
| | | GTGACCTGGGGGACCAGCAGCCGTGACGAGGACCTGGAGAACTGTAGCCACCACCTG |
| 920 | IL15Ra_WT_miR | ATGGCCCCACGCCGGGCCCGGGGCTGCAGGACCCTCGGCCTCCCCGCCCTCCTCCTCTTATT |
| | 122-CO17 | GCTCCTCCGGCCGCCCGCCACCAGAGGAATCACCTGCCCACCCCCGATGTCCGTCGAGCACG |
| | | CCGACATCTGGGTCAAGAGCTACTCCCTCTACAGCAGGGAGAGGTACATCTGCAACAGCGGC |
| | | TTCAAACGTAAAGCCGGCACCTCGTCCTTGACGGAGTGCGTCTTGAACAAGGCCACCAACGT |
| | | CGCGCACTGGACCACCCCCTCCCTCAAGTGCATCAGGGATCCCGCCCTCGTACACCAGAGGC |
| | | CCGCCCCACCCAGCACGGTGACCACGGCCGGGGTGACGCCGCAACCCGAATCACTGTCACCC |
| | | TCCGGGAAGGAGCCCGCCGCGAGCAGCCCCAGCAGCAACAATACCGCCGCCACCACCGCGGC |
| | | CATCGTGCCAGGGTCGCAGCTGATGCCCAGCAAGAGCCCCTCCACCGGCACCACGGAGATCT |
| | | CCAGCCACGAGAGCAGCCACGGCACCCCAAGCCAGACCACCGCGAAGAACTGGGAGCTGACC |
| | | GCCAGCGCCAGCCACCAGCCCCCCGGCGTGTACCCCCAGGGCCACAGCGACACCACGGTGGC |
| | | CATCAGCACCTCAACCGTGCTGCTGTGCGGCCTGTCGGCCGTCTCCCTGCTGGCCTGCTACC |
| | | TGAAAAGCAGGCAGACCCCGCCCCTGGCCTCCGTCGAGATGGAGGCAATGGAGGCCCTGCCC |
| | | GTGACCTGGGGGACCAGCAGCCGGGACGAGGACCTCGAGAACTGCAGCCACCACCTC |
| 921 | IL15Ra_WT_miR | ATGGCCCCGCGGAGGGCCAGGGGCTGCCGAACCTTAGGCCTACCAGCCCTCCTCCTCCTTCT |
| | 122-CO18 | CCTCCTCAGGCCCCCCGCCACCAGGGGGATCACGTGCCCGCCCCCCATGAGCGTAGAACACG |
| | | CCGATATCTGGGTCAAGAGCTACTCCCTCTACTCCCGCGAGAGGTACATCTGTAACTCCGGC |
| | | TTCAAGAGGAAGGCCGGGACCTCCAGCCTCACGGAGTGTGTCCTCAATAAGGCCACCAACGT |
| | | CGCCCACTGGACCACCCCCAGCTTAAAGTGCATCCGCGACCCCGCACTCGTTCACCAGAGGC |
| | | CCGCCCCGCCCAGCACCGTCACGACCGCAGGCGTGACGCCCCAGCCCGAAAGCCTGTCACCA |
| | | AGCGGCAAGGAGCCGGCCGCCAGCTCACCAAGTTCCAACAACACCGCGGCGACCACCGCCGC |
| | | GATCGTGCCCGGCAGCCAGCTGATGCCGAGCAAGAGCCCCTCCACGGGGACCACCGAGATCT |
| | | CCAGCCACGAATCCAGCCACGGCACCCCCTCCCAGACCACCGCCAAGAACTGGGAGCTGACG |
| | | GCCTCCGCCAGCCACCAGCCCCCCGGCGTGTACCCCCAGGGGCACAGCGACACGACCGTGGC |
| | | CATCTCCACCTCCACCGTCCTGCTGTGCGGGCTCAGCGCCGTGAGCCTGCTGGCCTGCTACC |
| | | TGAAGTCCAGGCAGACCCCTCCCCTGGCCAGCGTGGAAATGGAGGCCATGGAGGCGCTGCCC |
| | | GTGACATGGGGCACCTCCAGCAGGGACGAGGACCTGGAGAATTGCTCGCACCACCTG |
| 922 | IL15Ra_WT_miR | ATGGCCCCGCGGAGGGCCCGGGGTTGCCGGACCCTCGGCCTCCCCGCCCTCCTACTCCTCCT |
| | 122-CO19 | ATTGTTACGCCCGCCCGCCACCAGGGGGATCACCTGTCCCCCTCCCATGAGCGTCGAGCACG |
| | | CGGACATCTGGGTCAAAAGCTACAGCTTGTATAGCCGCGAAAGGTACATCTGCAACTCCGGC |
| | | TTTAAGAGGAAGGCCGGCACGTCCTCCCTCACCGAGTGCGTCCTCAACAAGGCCACCAACGT |
| | | CGCCCATTGGACGACCCCCTCCCTCAAGTGCATCAGGGACCCCGCCCTCGTCCATCAGAGGC |
| | | CAGCCCCACCGTCCACGGTCACCACCGCCGGGGTCACGCCCCAGCCCGAATCCCTGAGCCCC |
| | | TCAGGCAAGGAGCCCGCCGCGAGCAGCCCCAGCTCCAATAACACGGCCGCGACCACCGCGGC |
| | | CATCGTGCCCGGGTCCCAGCTGATGCCCAGCAAGAGCCCCAGCACCGGCACCACGGAGATCT |
| | | CCAGCCACGAGAGCTCCCACGGCACCCCCAGCCAGACGACCGCTAAGAACTGGGAGCTGACC |
| | | GCCTCGGCCAGCCACCAACCCCCCGGCGTCTACCCCCAGGGCCATAGCGACACCACCGTCGC |
| | | CATCAGCACCAGCACGGTCCTGCTGTGCGGGCTGAGCGCAGTGAGCCTGCTCGCCTGCTACC |
| | | TTAAGAGCAGGCAGACCCCGCCCCTGGCCAGCGTGGAGATGGAGGCCATGGAGGCCCTGCCC |
| | | GTCACTTGGGGAACGAGCAGCCGCGACGAAGACCTGGAGAACTGCAGCCACCACCTG |
| 923 | IL15Ra_WT_miR | ATGGCCCCCCGTCGGGCCAGGGGCTGCCGGACCCTCGGGCTCCCGGCCCTTTTGCTCTTGCT |
| | 122-CO20 | CCTCCTTAGGCCCCCCGCCACCCGAGGCATCACCTGCCCGCCCCCCATGTCCGTTGAGCACG |
| | | CGGACATCTGGGTCAAGTCCTACTCCCTCTATAGCAGAGAACGGTACATCTGCAACAGCGGA |
| | | TTCAAGCGGAAGGCGGGCACCAGCAGCCTCACCGAGTGCGTCCTCAACAAGGCCACCAACGT |
| | | CGCCCACTGGACCACCCCCTCCCTCAAGTGCATCAGGGACCCGGCCCTCGTTCATCAGAGGC |
| | | CCGCACCCCCCAGCACCGTGACCACCGCCGGTGTCACCCCGCAGCCCGAAAGCCTGAGCCCT |
| | | AGCGGCAAGGAGCCCGCCGCCAGCAGCCCCAGCAGCAACAACACTGCCGCGACGACCGCCGC |
| | | CATCGTGCCCGGAAGCCAGCTGATGCCCTCCAAATCGCCCAGCACCGGCACGACCGAGATAA |
| | | GCAGCCACGAGAGCAGCCACGGGACGCCCAGCCAAACGACGGCCAAGAATTGGGAGCTGACC |
| | | GCTTCCGCCTCCCACCAGCCCCCCGGGGTGTACCCACAGGGGCATAGCGACACCACCGTGGC |
| | | CATCAGCACCTCGACCGTGCTGCTGTGTGGTCTGAGCGCCGTGTCACTGCTGGCCTGCTACC |
| | | TGAAGTCCCGTCAGACCCCACCCCTGGCCTCGGTGGAGATGGAAGCCATGGAGGCCCTGCCC |
| | | GTGACCTGGGGCACCAGCAGCAGGGACGAGGACCTGGAGAACTGCTCCCACCACCTG |
| 924 | IL15Ra_WT_miR | ATGGCCCCTAGGAGGGCCCGGGGCTGCCGGACGTTGGGCCTCCCCGCCCTACTCCTCTTGTT |
| | 122-CO21 | GCTCCTCAGGCCCCCGGCCACCCGAGGCATCACCTGCCCTCCCCCCATGAGCGTCGAGCACG |
| | | CCGACATCTGGGTAAAGAGCTACAGCTTGTACTCCAGGGAACGGTATATCTGCAATAGCGGG |
| | | TTCAAGAGAAAGGCCGGGACTAGCAGCCTCACCGAGTGCGTACTCAACAAAGCCACCAACGT |
| | | CGCCCACTGGACGACCCCGTCCCTAAAGTGCATCAGGGACCCCGCCCTCGTACACCAAAGGC |
| | | CCGCCCCGCCGAGCACCGTGACCACCGCCGGGGTGACCCCTCAACCGGAGAGCCTGTCACCC |
| | | AGCGGCAAAGAGCCCGCCGCCAGCTCCCCCAGCAGCAACAACACCGCCGCCACGACGGCGGC |
| | | CATCGTGCCCGGCAGCCAGCTCATGCCGTCGAAAAGCCCCAGCACGGGGACCACGGAGATCT |
| | | CCAGCCACGAATCCTCCCACGGGACCCCGAGCCAAACCACGGCCAAGAACTGGGAGCTGACC |
| | | GCCAGCGCCAGCCACCAGCCCCCCGGCGTGTACCCCCAGGGCCACAGCGACACGACGGTGGC |
| | | CATCAGCACCAGCACAGTCCTGCTGTGCGGGCTGTCGGCCGTGAGCCTCCTGGCATGCTACC |
| | | TGAAAAGCCGGCAGACCCCGCCACTGGCCAGCGTGGAGATGGAGGCCATGGAGGCTCTCCCG |
| | | GTGACCTGGGGCACCTCCAGCAGGGACGAGGACCTGGAGAACTGCAGCCACCACCTG |
| 925 | IL15Ra_WT_miR | ATGGCCCCACGAAGGGCCCGGGGCTGTCGCACCCTCGGCCTCCCCGCCCTCCTCCTCCTACT |
| | 122-CO22 | CCTCCTCAGGCCGCCCGCCACCAGAGGCATCACGTGCCCTCCCCCCATGTCGGTCGAGCACG |
| | | CCGATATCTGGGTCAAGAGCTACAGCCTCTACTCCAGGGAGAGGTACATCTGCAACTCCGGG |
| | | TTTAAGAGGAAAGCCGGGACCAGCAGCCTCACCGAGTGCGTCCTCAACAAGGCGACCAACGT |
| | | CGCCCACTGGACAACCCCCTCGCTCAAGTGTATCAGGGACCCCGCCCTAGTTCACCAGCGGC |
| | | CCGCCCCACCCAGCACTGTGACCACTGCCGGCGTAACCCCCCAGCCCGAGAGCCTCAGCCCC |
| | | AGCGGCAAGGAACCCGCCGCCAGCAGTCCCAGCAGCAACAATACGGCCGCCACTACGGCTGC |
| | | CATCGTCCCCGGCAGCCAGCTGATGCCCAGCAAGAGCCCGAGCACCGGGACCACCGAGATCA |
| | | GCAGCCACGAGAGCTCCCATGGCACACCCAGCCAGACCACCGCCAAGAACTGGGAGCTGACC |
| | | GCCTCCGCCTCCCACCAGCCCCCCGGGGTGTACCCCCAGGGCCACAGCGACACCACCGTGGC |
| | | CATCAGCACCAGCACCGTGCTGCTGTGTGGTCTGAGCGCCGTGTCCCTGCTCGCGTGTTACC |
| | | TCAAGAGCAGGCAGACGCCTCCCCTGGCCAGCGTGGAGATGGAGGCCATGGAGGCCCTGCCC |
| | | GTGACCTGGGGCACCAGCTCCAGGGACGAGGACTTGGAGAACTGCTCCCACCACCTG |
| 926 | IL15Ra_WT_miR | ATGGCCCCCCGGAGGGCCCGGGGGTGCCGCACCCTTGGGCTCCCCGCCCTCCTCCTTCTCCT |
| | 122-CO23 | CCTCTTAAGACCGCCCGCCACCAGGGGCATCACGTGTCCCCCGCCCATGTCCGTTGAGCACG |
| | | CGGACATCTGGGTCAAGTCCTACAGCCTCTACAGCCGCGAGAGGTACATCTGTAACAGCGGC |
| | | TTCAAACGGAAGGCCGGGACCTCCAGCCTCACGGAGTGCGTCTTGAACAAAGCCACCAACGT |
| | | GGCCCACTGGACGACCCCCAGTCTCAAGTGTATACGGGACCCGGCCCTTGTACACCAGAGGC |
| | | CCGCCCCACCGTCCACCGTGACTACTGCCGGCGTGACGCCCCAACCGGAGTCCCTGAGCCCC |
| | | TCCGGCAAGGAGCCCGCCGCCTCGAGCCCAAGCAGCAACAACACCGCAGCTACCACCGCCGC |
| | | CATCGTGCCCGGCTCCCAGCTGATGCCCTCCAAGAGCCCCTCTACCGGTACCACCGAGATCT |
| | | CCAGCCACGAATCGTCGCACGGGACCCCCAGCCAGACCACGGCCAAGAACTGGGAGCTGACG |
| | | GCCTCCGCCAGCCACCAGCCCCCCGGCGTGTACCCCCAGGGGCACTCCGACACAACCGTGGC |
| | | CATCTCCACCAGCACCGTTCTGCTGTGCGGCCTGAGCGCCGTCTCCCTGCTCGCCTGCTATC |
| | | TGAAAAGCAGGCAGACCCCGCCCCTGGCCTCCGTGGAGATGGAGGCCATGGAGGCCCTCCCG |
| | | GTCACGTGGGGCACGTCGAGCCGTGACGAGGACCTCGAGAACTGCTCACACCACCTG |
| 927 | IL15Ra_WT_miR | ATGGCGCCCAGGAGGGCGCGAGGCTGCAGGACCCTCGGCCTCCCCGCCCTCCTCCTCCTACT |
| | 122-CO24 | CCTCCTCAGGCCCCCCGCCACCAGGGGGATAACCTGCCCACCCCCCATGAGCGTAGAGCACG |
| | | CGGACATCTGGGTCAAGAGCTACAGCCTCTACAGCAGGGAGAGGTACATCTGCAACAGCGGC |
| | | TTTAAGCGGAAGGCCGGCACCAGCTCGCTTACGGAGTGTGTCCTCAACAAGGCCACCAACGT |
| | | CGCCCACTGGACCACCCCCAGCCTCAAGTGCATCAGGGACCCGGCCCTCGTCCATCAGAGGC |
| | | CCGCCCCACCCAGCACCGTCACCACAGCCGGGGTAACACCCCAGCCCGAGAGCCTGAGCCCG |
| | | AGCGGCAAGGAGCCTGCCGCCTCCTCCCCGAGCAGCAACAATACCGCCGCAACGACTGCCGC |
| | | CATCGTGCCGGGCTCACAGCTGATGCCAAGCAAGAGCCCCAGCACCGGCACCACCGAGATCA |
| | | GCAGCCATGAGAGCTCGCACGGCACCCCCAGCCAAACCACCGCCAAGAACTGGGAGCTGACC |
| | | GCCAGCGCCTCCCACCAGCCCCCCGGCGTGTACCCCCAGGGCCACTCGGATACCACCGTGGC |
| | | CATAAGCACCTCCACGGTGCTGCTCTGTGGCCTCAGCGCCGTGTCCCTGCTGGCCTGCTATC |
| | | TGAAAAGCCGGCAGACCCCACCCCTGGCCAGCGTGGAGATGGAGGCCATGGAGGCCCTGCCC |
| | | GTGACCTGGGGTACGTCCTCCAGGGACGAGGATCTCGAGAACTGCTCCCACCACCTG |
| 928 | IL15Ra_WT_miR | ATGGCCCCCCGGAGGGCCCGAGGGTGCCGGACGCTCGGGTTACCCGCCCTTCTCCTCCTATT |
| | 122-CO25 | GCTCCTCCGCCCACCCGCCACGAGGGGTATCACCTGCCCTCCGCCCATGAGCGTCGAGCACG |
| | | CGGACATCTGGGTCAAGTCCTACAGCCTCTACAGCCGCGAGCGGTACATCTGCAACAGCGGT |
| | | TTCAAGAGGAAGGCAGGGACCAGCTCCCTCACGGAGTGCGTCCTCAACAAGGCCACCAACGT |
| | | CGCGCACTGGACCACCCCGAGCCTCAAGTGCATCAGGGACCCCGCCCTCGTCCACCAGAGGC |
| | | CAGCCCCGCCCAGCACCGTCACCACCGCCGGCGTGACCCCTCAGCCCGAAAGCCTGAGCCCC |
| | | AGCGGCAAGGAACCGGCGGCCAGCTCCCCAAGCAGCAACAACACGGCCGCCACCACCGCCGC |
| | | CATCGTGCCCGGGAGCCAGCTGATGCCCAGCAAGTCCCCGAGCACGGGCACCACCGAGATCT |
| | | CCAGCCACGAGTCCTCCCACGGCACCCCCAGCCAGACCACCGCCAAGAACTGGGAGCTGACG |
| | | GCCAGCGCCAGCCACCAGCCGCCGGGCGTCTACCCGCAGGGGCACTCCGATACCACCGTAGC |
| | | CATATCCACCAGCACCGTTCTGCTGTGTGGCCTCTCCGCCGTCTCCCTGCTGGCCTGCTACC |
| | | TGAAAAGCAGGCAGACCCCACCACTGGCCAGCGTGGAGATGGAAGCCATGGAGGCCCTGCCC |
| | | GTGACCTGGGGCACCTCCAGCCGCGACGAGGACCTCGAGAATTGCTCCCATCACCTG |
| 929 | IL15opt-tPa6- | ATGGACGCCATGAAGCGCGGTTTGTGTTGCGTCCTCCTTCTCTGCGGGGCGGTCTTCGTCAG |
| | CO26 | CCCGTCCCAGGAGATCCACGCCAGGTTCAGGCGGGGAGCCCGCAACTGGGTCAACGTTATCA |
| | | GCGATCTTAAAAAGATCGAGGACCTCATCCAATCGATGCACATCGACGCCACGTTATACACG |
| | | GAGTCCGACGTGCACCCCAGCTGCAAGGTCACCGCCATGAAGTGCTTCCTCCTCGAGCTCCA |
| | | AGTCATATCGCTCGAAAGCGGAGACGCGAGCATCCACGACACCGTCGAGAACCTGATCATCC |
| | | TGGCCAACAACAGCCTGTCGAGCAACGGGAACGTGACCGAGAGCGGGTGCAAGGAGTGCGAG |
| | | GAGCTGGAGGAGAAGAACATCAAGGAGTTCCTGCAGAGCTTCGTGCACATCGTCCAGATGTT |
| | | CATAAACACCAGC |
| 930 | IL15opt-tPa6- | ATGGACGCCATGAAAAGGGGGCTCTGCTGCGTCCTCCTCCTCTGCGGGGCCGTCTTCGTGAG |
| | CO27 | CCCCAGCCAGGAGATCCACGCCCGGTTCAGGAGGGGGGCCCGGAATTGGGTAAACGTCATCA |
| | | GCGACCTCAAGAAGATCGAGGACCTCATCCAGTCCATGCACATCGACGCCACGCTCTATACC |
| | | GAGAGCGACGTCCACCCAAGCTGCAAGGTCACCGCCATGAAGTGCTTCCTCCTCGAGCTCCA |
| | | GGTCATCAGCCTCGAGAGCGGCGACGCCAGCATCCACGACACCGTTGAGAACCTCATCATCC |
| | | TGGCCAACAATAGCCTCTCCTCAAACGGCAACGTGACCGAGAGCGGGTGCAAAGAGTGTGAG |
| | | GAGCTGGAGGAGAAAAACATCAAGGAGTTCCTGCAGAGCTTCGTGCACATCGTGCAGATGTT |
| | | CATCAACACCAGC |
| 931 | IL15opt-tPa6- | ATGGACGCAATGAAGAGGGGCCTCTGTTGCGTCCTACTCTTGTGCGGGGCCGTCTTCGTCAG |
| | CO28 | CCCCAGCCAGGAGATCCACGCGAGGTTCCGCAGGGGCGCGAGGAATTGGGTCAACGTCATCT |
| | | CGGACCTCAAGAAAATCGAGGACCTCATCCAGTCGATGCACATCGACGCCACCCTCTACACC |
| | | GAGTCCGACGTGCATCCCAGTTGCAAGGTCACCGCCATGAAGTGCTTCCTCCTCGAGCTCCA |
| | | GGTCATCTCCCTTGAGTCCGGCGACGCCAGTATCCACGACACGGTCGAGAACCTGATCATCC |
| | | TGGCCAACAACAGCCTGTCCAGCAACGGCAACGTGACCGAGTCCGGCTGCAAGGAGTGCGAG |
| | | GAGCTGGAGGAGAAGAACATCAAGGAGTTCCTCCAAAGCTTCGTGCACATCGTGCAGATGTT |
| | | CATAAATACCAGC |
| 932 | IL15opt-tPa6- | ATGGACGCCATGAAGAGGGGCCTCTGTTGCGTCCTTCTCCTCTGCGGGGCCGTCTTCGTCAG |
| | CO29 | CCCCAGCCAGGAGATACACGCAAGGTTCCGCAGGGGGGCCCGCAACTGGGTCAACGTGATCA |
| | | GCGACCTCAAGAAAATCGAGGACCTCATACAGAGCATGCACATCGACGCCACCCTCTACACC |
| | | GAGAGCGACGTCCACCCCAGCTGTAAGGTCACCGCCATGAAGTGCTTCCTCTTGGAACTCCA |
| | | GGTCATCAGCCTCGAGAGCGGCGACGCCTCGATCCACGACACCGTTGAGAACCTGATCATCC |
| | | TGGCCAACAACAGCCTCAGCTCCAACGGCAATGTGACGGAGAGCGGCTGCAAGGAGTGCGAG |
| | | GAGCTGGAGGAGAAGAACATCAAAGAGTTCCTCCAGTCCTTCGTGCACATCGTGCAGATGTT |
| | | CATCAACACCAGC |
| 933 | IL15opt-tPa6- | ATGGACGCCATGAAGAGGGGCTTATGCTGCGTCCTCCTCCTGTGCGGAGCCGTCTTCGTCAG |
| | CO30 | CCCCAGCCAGGAGATCCACGCCAGGTTCAGGCGCGGCGCCAGGAACTGGGTCAACGTCATCT |
| | | CCGACCTCAAAAAGATCGAGGACCTCATACAGAGCATGCACATCGACGCCACGCTCTACACG |
| | | GAGTCAGACGTCCACCCCAGCTGCAAGGTAACCGCCATGAAGTGTTTCCTCCTCGAGCTCCA |
| | | GGTCATCAGCTTGGAGAGCGGGGACGCCTCCATCCACGACACGGTAGAGAACCTCATCATCC |
| | | TGGCCAACAACAGCCTGAGCTCCAACGGCAACGTGACGGAGTCCGGCTGCAAGGAGTGCGAG |
| | | GAACTGGAGGAGAAGAACATCAAGGAGTTCCTGCAGTCCTTCGTGCACATCGTGCAGATGTT |
| | | CATCAACACGTCT |
| 934 | IL15opt-tPa6- | ATGGACGCCATGAAGAGGGGGCTTTGTTGCGTACTCCTCCTTTGCGGGGCCGTCTTCGTAAG |
| | CO31 | CCCCAGCCAGGAGATACACGCCCGGTTTAGGAGGGGAGCGCGCAACTGGGTCAACGTCATCT |
| | | CCGACCTCAAGAAGATCGAGGATCTCATTCAGTCGATGCACATCGACGCCACCCTCTACACC |
| | | GAGTCCGACGTCCACCCCAGCTGCAAGGTAACCGCAATGAAGTGTTTCCTACTCGAGCTACA |
| | | GGTAATCTCTCTCGAGTCCGGGGACGCCTCGATCCACGACACCGTAGAGAACCTCATCATAC |
| | | TGGCCAACAATTCGCTGTCCTCCAACGGGAATGTGACCGAGAGCGGCTGTAAGGAGTGCGAG |
| | | GAGCTGGAGGAGAAGAACATAAAGGAGTTCCTGCAGAGCTTCGTGCACATCGTGCAAATGTT |
| | | CATCAACACCAGC |
| 935 | IL15opt-tPa6- | ATGGACGCCATGAAGAGGGGCCTCTGTTGCGTCCTTCTCTTGTGCGGGGCCGTCTTCGTCAG |
| | CO32 | CCCCTCGCAGGAGATACACGCGCGATTCAGGAGGGGGGCCAGGAACTGGGTCAACGTCATAA |
| | | GCGATCTAAAGAAGATCGAGGACCTCATCCAGAGCATGCACATAGACGCCACCCTCTACACC |
| | | GAGAGCGACGTGCACCCCTCCTGCAAGGTAACCGCCATGAAGTGCTTCCTCCTCGAGTTGCA |
| | | GGTCATCTCGCTCGAGAGCGGAGACGCCTCCATCCACGACACCGTCGAGAATCTCATCATCC |
| | | TTGCCAACAACTCACTCAGCAGCAACGGAAACGTCACCGAGTCCGGCTGCAAAGAGTGCGAG |
| | | GAGCTGGAGGAGAAAAACATCAAGGAGTTCCTGCAGAGCTTCGTGCACATCGTGCAGATGTT |
| | | CATCAACACCAGC |
| 936 | IL15opt-tPa6- | ATGGACGCCATGAAGAGGGGCCTCTGCTGTGTCCTCCTCCTCTGTGGCGCCGTCTTCGTCAG |
| | CO33 | CCCCAGCCAGGAGATCCACGCCCGCTTCAGGAGGGGCGCCCGGAATTGGGTCAACGTCATCA |
| | | GCGACCTAAAGAAGATCGAGGATCTCATACAGAGCATGCACATCGACGCCACGCTCTACACA |
| | | GAGAGCGACGTCCACCCGAGCTGCAAGGTAACCGCCATGAAGTGCTTCCTCCTCGAGCTTCA |
| | | GGTCATCTCGCTCGAGAGCGGGGACGCTAGCATACACGATACAGTCGAGAACCTGATCATCC |
| | | TGGCCAACAACTCTCTCTCCAGCAACGGGAACGTGACCGAGAGCGGGTGCAAGGAATGCGAG |
| | | GAGCTGGAGGAGAAGAACATCAAGGAGTTCCTCCAAAGCTTTGTGCACATCGTGCAGATGTT |
| | | TATCAACACCAGC |
| 937 | IL15opt-tPa6- | ATGGACGCCATGAAGCGCGGCCTCTGCTGTGTACTCCTCTTGTGCGGCGCCGTTTTCGTCAG |
| | CO34 | CCCCTCCCAGGAGATCCACGCGCGATTCAGGAGGGGGGCCAGGAACTGGGTCAACGTTATCA |
| | | GCGATCTCAAGAAGATCGAGGACTTGATCCAGAGTATGCACATCGACGCCACGCTCTACACC |
| | | GAGAGCGACGTGCACCCCTCGTGCAAGGTTACCGCCATGAAGTGCTTCCTCCTCGAGCTCCA |
| | | GGTAATCAGCCTCGAGTCCGGGGACGCCAGCATCCACGACACAGTCGAGAACCTGATCATCC |
| | | TGGCCAACAACAGCCTGTCGAGCAACGGAAACGTGACCGAGAGCGGGTGCAAGGAATGCGAG |
| | | GAGCTGGAGGAGAAGAATATAAAGGAGTTCCTGCAGTCCTTTGTGCATATCGTGCAGATGTT |
| | | CATCAACACGAGC |
| 938 | IL15opt-tPa6- | ATGGACGCGATGAAGCGGGGCTTATGCTGTGTCCTCCTTCTCTGCGGCGCCGTCTTCGTGAG |
| | CO35 | CCCGTCCCAGGAGATCCACGCCAGGTTTCGCCGGGGCGCCAGGAACTGGGTCAACGTCATCA |
| | | GCGACCTCAAAAAGATCGAGGACCTCATCCAGTCCATGCACATCGACGCCACCCTTTACACC |
| | | GAGTCCGACGTGCACCCCAGCTGCAAGGTCACCGCCATGAAGTGCTTCCTCCTCGAGCTCCA |
| | | GGTCATCAGCCTTGAGTCCGGCGACGCGAGCATCCACGACACCGTCGAGAACCTGATCATCC |
| | | TGGCCAACAACAGCCTCTCGAGCAACGGGAATGTGACGGAGTCGGGATGTAAGGAGTGCGAG |
| | | GAGCTGGAGGAGAAGAACATCAAGGAGTTTCTTCAGTCCTTTGTGCACATAGTGCAGATGTT |
| | | TATCAACACCAGT |
| 939 | IL15opt-tPa6- | ATGGACGCCATGAAGAGGGGGCTCTGCTGTGTCTTGCTCCTCTGCGGCGCCGTTTTCGTCAG |
| | CO36 | CCCGAGCCAAGAGATCCACGCGCGGTTTCGGCGCGGCGCCCGGAACTGGGTCAACGTCATAT |
| | | CCGACCTAAAGAAGATCGAGGACCTCATCCAGAGCATGCACATCGACGCCACCCTCTACACC |
| | | GAGTCCGACGTCCACCCCAGCTGCAAGGTTACGGCCATGAAGTGCTTCCTCCTCGAGCTCCA |
| | | GGTCATCAGCTTAGAGAGCGGGGACGCCAGCATCCACGACACCGTCGAGAATCTGATCATTC |
| | | TGGCGAACAACAGCCTGAGCAGCAATGGGAACGTGACCGAGTCGGGGTGTAAGGAGTGCGAG |
| | | GAGCTGGAGGAGAAGAACATCAAGGAGTTTCTGCAGTCCTTCGTGCACATCGTGCAGATGTT |
| | | TATCAACACCTCG |
| 940 | IL15opt-tPa6- | ATGGACGCCATGAAGCGGGGGCTCTGCTGCGTACTCCTCCTCTGCGGCGCCGTCTTCGTCAG |
| | CO37 | CCCCAGCCAGGAGATACACGCCCGCTTTCGGAGGGGCGCTAGGAACTGGGTTAACGTAATCT |
| | | CCGACCTCAAGAAGATCGAGGACCTCATCCAGAGCATGCACATCGACGCCACCCTCTACACC |
| | | GAAAGCGACGTCCACCCGAGCTGCAAGGTCACGGCCATGAAGTGTTTTCTCCTCGAGCTCCA |
| | | GGTTATCAGCCTTGAGAGCGGCGACGCCTCCATCCACGACACCGTCGAGAATCTGATCATCC |
| | | TGGCCAATAACAGCCTCAGCTCGAACGGCAACGTGACCGAGAGCGGGTGCAAAGAGTGCGAG |
| | | GAGCTGGAGGAGAAGAACATCAAGGAGTTCCTGCAGTCCTTCGTGCATATCGTGCAGATGTT |
| | | CATCAACACCAGC |
| 941 | IL15opt-tPa6- | ATGGACGCCATGAAGCGCGGCCTCTGCTGCGTCCTACTCCTTTGCGGGGCCGTATTCGTCAG |
| | CO38 | CCCCAGCCAGGAGATCCACGCCCGGTTCCGGAGGGGCGCTAGGAACTGGGTTAACGTGATCA |
| | | GCGACTTGAAGAAGATCGAGGACCTCATCCAGAGCATGCACATCGACGCGACCTTGTATACC |
| | | GAGTCGGACGTCCACCCCAGCTGCAAGGTCACCGCCATGAAGTGCTTTCTCCTCGAGCTCCA |
| | | GGTCATCTCTCTCGAAAGCGGCGACGCCAGCATCCACGACACCGTCGAGAACCTGATCATCC |
| | | TGGCCAATAACTCCCTGTCCTCCAACGGCAATGTGACGGAGTCCGGGTGCAAGGAGTGCGAG |
| | | GAGCTCGAGGAGAAGAACATCAAGGAGTTCCTCCAAAGCTTTGTGCACATCGTGCAGATGTT |
| | | CATCAACACCAGC |
| 942 | IL15opt-tPa6- | ATGGACGCCATGAAGAGGGGCCTTTGCTGCGTCTTGCTCCTCTGCGGCGCCGTATTCGTGAG |
| | CO39 | CCCATCCCAGGAGATCCACGCCAGGTTCCGCAGGGGGGCCCGCAACTGGGTCAACGTCATCA |
| | | GCGACCTTAAAAAGATCGAGGACCTCATCCAGTCCATGCACATCGACGCAACCCTATACACC |
| | | GAGTCGGACGTGCATCCCAGTTGCAAGGTAACCGCCATGAAGTGCTTTCTCCTCGAGCTCCA |
| | | GGTAATCAGCTTAGAGAGCGGAGACGCCAGCATCCACGACACGGTTGAAAACCTCATTATCC |
| | | TGGCCAACAACTCCCTGTCCAGCAACGGCAACGTGACCGAGTCGGGGTGCAAGGAGTGCGAG |
| | | GAGCTGGAGGAGAAGAACATCAAGGAGTTCCTGCAAAGCTTCGTGCACATCGTGCAGATGTT |
| | | CATCAACACCAGC |
| 943 | IL15opt-tPa6- | ATGGACGCCATGAAGAGGGGCCTCTGCTGCGTCCTCCTCCTCTGCGGCGCCGTCTTCGTGTC |
| | CO40 | GCCCAGCCAGGAGATCCACGCCAGATTCCGGCGAGGGGCCAGGAACTGGGTCAACGTCATTA |
| | | GCGACCTTAAGAAGATCGAGGACCTCATCCAGAGCATGCACATCGACGCCACGCTCTACACC |
| | | GAGTCCGACGTCCACCCCAGCTGCAAGGTCACCGCCATGAAGTGTTTCCTCCTCGAGCTCCA |
| | | GGTCATCTCCCTAGAGAGCGGGGACGCCTCGATACACGACACCGTTGAGAACCTGATCATCC |
| | | TCGCGAACAACTCCCTCAGCTCCAACGGGAACGTGACCGAGAGCGGGTGTAAGGAATGCGAG |
| | | GAGCTGGAGGAGAAGAACATCAAAGAGTTTCTGCAGAGCTTCGTGCACATCGTGCAGATGTT |
| | | CATCAACACGAGC |
| 944 | IL15opt-tPa6- | ATGGACGCGATGAAGAGGGGCCTCTGTTGCGTCCTCCTCCTCTGCGGGGCCGTCTTCGTGAG |
| | CO41 | CCCCAGCCAGGAGATCCACGCGAGGTTCAGGCGGGGCGCCAGGAACTGGGTCAACGTCATCA |
| | | GCGATCTAAAGAAGATCGAGGACCTCATCCAGTCCATGCACATCGACGCCACCCTATATACC |
| | | GAGAGCGACGTTCACCCCAGCTGCAAGGTTACCGCCATGAAGTGCTTCCTCCTAGAGCTCCA |
| | | AGTCATCAGCCTCGAAAGCGGCGACGCCTCCATCCACGACACCGTCGAGAACCTGATCATCC |
| | | TCGCCAATAATAGCCTGTCCAGCAACGGGAATGTGACGGAGTCGGGATGCAAGGAGTGCGAG |
| | | GAGCTGGAGGAGAAGAACATCAAAGAGTTCCTCCAGAGCTTTGTGCACATCGTGCAGATGTT |
| | | CATCAATACCAGC |
| 945 | IL15opt-tPa6- | ATGGACGCCATGAAGAGGGGCCTCTGCTGCGTCCTCCTTCTCTGCGGGGCGGTGTTCGTGAG |
| | CO42 | CCCCAGCCAGGAGATCCACGCCCGCTTCCGCCGCGGCGCCCGGAACTGGGTCAACGTCATCA |
| | | GCGACCTTAAGAAGATCGAGGACCTAATCCAGAGCATGCACATCGACGCCACGCTATATACC |
| | | GAGAGCGACGTGCACCCCAGCTGCAAGGTCACCGCCATGAAGTGCTTCCTCCTCGAGCTCCA |
| | | GGTCATCAGCCTCGAGAGCGGCGACGCCAGCATCCACGACACCGTTGAGAACCTGATCATCC |
| | | TGGCCAACAACAGCCTCAGCTCCAACGGCAACGTGACCGAGAGCGGCTGCAAGGAGTGCGAG |
| | | GAGCTCGAGGAGAAGAACATCAAGGAGTTCCTCCAGTCCTTCGTGCACATCGTGCAGATGTT |
| | | CATCAACACCTCC |
| 946 | IL15opt-tPa6- | ATGGACGCCATGAAGCGGGGGCTCTGCTGCGTCCTCCTCCTTTGCGGGGCCGTCTTCGTCAG |
| | CO43 | CCCCAGCCAAGAGATACACGCCAGGTTCCGCCGCGGGGCCAGAAACTGGGTTAACGTAATCA |
| | | GCGACCTCAAGAAGATCGAGGACCTTATCCAGAGCATGCATATCGACGCCACGCTCTACACG |
| | | GAGAGCGACGTCCATCCCAGCTGCAAGGTCACCGCCATGAAGTGTTTTCTCCTCGAGCTTCA |
| | | GGTCATTTCCTTGGAAAGCGGGGACGCCTCCATCCACGACACGGTCGAAAACCTCATCATCC |
| | | TGGCCAACAACAGCCTCTCCTCCAACGGGAACGTGACCGAGTCCGGGTGCAAGGAATGCGAG |
| | | GAGCTGGAGGAGAAAAACATCAAGGAGTTTCTGCAGAGCTTTGTCCACATCGTGCAGATGTT |
| | | CATCAACACCAGC |
| 947 | IL15opt-tPa6- | ATGGACGCCATGAAGCGGGGTCTGTGTTGCGTCCTCCTCCTCTGCGGAGCGGTTTTCGTTAG |
| | CO44 | CCCCAGCCAGGAGATCCACGCCCGGTTCAGGAGGGGCGCCCGCAACTGGGTAAACGTCATCT |
| | | CCGACCTTAAGAAGATCGAGGACCTCATTCAGAGCATGCACATCGACGCCACCCTCTACACG |
| | | GAGTCCGACGTGCACCCCTCCTGTAAGGTCACCGCCATGAAGTGCTTTCTCCTCGAGCTCCA |
| | | GGTCATCAGCCTGGAGAGCGGGGACGCCTCCATACACGACACGGTGGAGAACCTAATCATCC |
| | | TAGCCAACAACAGCCTGAGCTCGAACGGAAATGTGACCGAAAGCGGCTGCAAGGAGTGCGAG |
| | | GAACTGGAGGAGAAGAACATCAAGGAGTTCCTGCAGAGCTTCGTGCACATCGTCCAGATGTT |
| | | CATAAACACCAGC |
| 948 | IL15opt-tPa6- | ATGGACGCGATGAAGAGGGGCCTCTGCTGCGTCCTCCTCCTCTGCGGCGCCGTTTTCGTCAG |
| | CO45 | CCCCAGCCAGGAGATACACGCCCGGTTTCGGAGGGGCGCCAGGAACTGGGTTAACGTCATCT |
| | | CCGATCTCAAGAAGATCGAGGACCTAATCCAGAGCATGCACATCGACGCCACGCTCTACACG |
| | | GAATCCGACGTCCACCCCAGCTGCAAGGTTACCGCCATGAAGTGCTTCCTCCTCGAGCTCCA |
| | | GGTCATCAGCTTAGAGAGCGGGGACGCGAGCATCCACGACACCGTGGAGAACCTCATCATCC |
| | | TGGCCAACAACTCCCTGAGCAGCAACGGCAACGTGACGGAGTCCGGCTGCAAGGAGTGCGAG |
| | | GAGCTGGAGGAAAAGAATATCAAGGAGTTCCTGCAGAGCTTCGTGCACATTGTCCAGATGTT |
| | | CATCAACACGTCC |
| 949 | IL15opt-tPa6- | ATGGACGCCATGAAGAGGGGGCTCTGCTGCGTCCTCCTCCTCTGCGGCGCCGTCTTCGTCTC |
| | CO46 | ACCGTCCCAGGAGATCCACGCCAGGTTCAGGAGGGGCGCCCGGAACTGGGTTAACGTCATCT |
| | | CCGACCTCAAGAAGATAGAGGACCTCATACAGTCGATGCACATCGACGCCACCCTTTACACC |
| | | GAGAGCGACGTCCACCCCAGCTGCAAGGTCACGGCCATGAAGTGTTTCCTCTTGGAGCTCCA |
| | | AGTCATCAGCCTCGAGAGCGGCGACGCCTCGATCCACGACACGGTCGAGAATCTGATCATCC |
| | | TGGCCAACAACAGCCTGAGCAGCAATGGAAACGTCACGGAGTCGGGCTGCAAGGAGTGCGAG |
| | | GAGCTGGAGGAGAAGAACATCAAGGAGTTCCTGCAGAGCTTCGTACACATAGTCCAGATGTT |
| | | CATCAACACCAGC |
| 950 | IL15opt-tPa6- | ATGGACGCCATGAAGAGGGGACTCTGCTGCGTCCTCCTCCTCTGCGGGGCCGTCTTCGTCAG |
| | CO47 | CCCCAGCCAGGAGATTCACGCCCGGTTCAGGAGGGGAGCCAGGAATTGGGTCAACGTCATCA |
| | | GCGACTTGAAGAAGATCGAGGACCTCATCCAGTCCATGCACATCGACGCCACCCTCTACACG |
| | | GAGTCCGACGTACATCCCAGCTGCAAGGTCACCGCCATGAAGTGCTTCCTCCTCGAGCTCCA |
| | | GGTCATCAGCCTTGAGAGCGGAGACGCCTCCATCCACGACACCGTTGAGAACCTGATCATCC |
| | | TGGCCAACAACAGCCTGAGCAGCAACGGCAACGTGACGGAGAGCGGGTGCAAGGAGTGCGAG |
| | | GAGCTGGAAGAGAAGAACATCAAGGAGTTTCTGCAAAGCTTCGTCCATATAGTGCAGATGTT |
| | | CATCAATACGAGC |
| 951 | IL15opt-tPa6- | ATGGACGCCATGAAGCGCGGGCTCTGCTGCGTACTCCTCCTCTGCGGGGCCGTCTTCGTGAG |
| | CO48 | CCCCAGCCAGGAGATCCACGCCCGCTTCAGGCGGGGGGCCCGCAACTGGGTAAACGTCATCA |
| | | GCGACCTCAAGAAGATCGAGGACCTCATCCAGAGCATGCACATCGACGCCACCCTTTACACC |
| | | GAGTCCGACGTTCACCCGTCCTGCAAGGTCACCGCCATGAAGTGTTTCCTACTCGAACTCCA |
| | | AGTCATATCCTTGGAGTCCGGAGACGCCTCCATCCACGACACCGTCGAGAACCTGATCATCC |
| | | TGGCCAACAACTCGCTGTCCAGCAACGGCAACGTGACGGAGAGCGGATGCAAGGAGTGTGAG |
| | | GAGCTGGAGGAAAAGAACATCAAGGAGTTCCTGCAGAGCTTTGTGCACATCGTGCAGATGTT |
| | | TATCAACACCTCC |
| 952 | IL15opt-tPa6- | ATGGACGCCATGAAGCGGGGACTCTGCTGCGTCCTACTCCTCTGCGGGGCCGTCTTCGTAAG |
| | CO49 | CCCCAGCCAGGAGATCCACGCCCGCTTTAGGAGGGGCGCCAGGAACTGGGTCAACGTCATAA |
| | | GCGACCTCAAAAAGATCGAGGACCTCATCCAGTCGATGCACATCGACGCCACCCTCTATACC |
| | | GAGTCCGACGTGCACCCGTCCTGTAAGGTTACCGCAATGAAGTGCTTCCTCTTGGAACTCCA |
| | | GGTCATCAGCCTCGAGAGCGGCGACGCCAGCATCCACGACACCGTCGAGAACCTGATCATCC |
| | | TGGCCAACAACTCCCTGAGCAGCAACGGCAACGTGACCGAAAGCGGGTGCAAGGAGTGCGAG |
| | | GAGCTGGAGGAGAAGAATATCAAGGAATTTCTGCAGTCGTTTGTGCATATAGTGCAGATGTT |
| | | CATCAACACCTCT |
| 953 | IL15opt-tPa6- | ATGGACGCGATGAAGCGCGGGCTATGCTGCGTCCTATTGCTCTGCGGCGCCGTCTTCGTCAG |
| | CO50 | CCCGAGCCAAGAGATACACGCCCGCTTTAGGAGGGGGGCCAGGAACTGGGTCAACGTAATAT |
| | | CCGACTTAAAGAAGATCGAGGATCTCATCCAGAGCATGCACATCGACGCCACCCTCTACACG |
| | | GAGAGCGACGTCCACCCCAGCTGCAAGGTCACCGCCATGAAGTGTTTCCTTCTTGAGCTCCA |
| | | GGTCATCAGCCTAGAGTCCGGGGACGCCAGCATCCACGACACGGTTGAGAACCTGATAATCC |
| | | TGGCCAACAACAGCCTGAGCAGCAACGGCAATGTGACCGAGAGCGGGTGCAAGGAGTGCGAG |
| | | GAGCTGGAGGAGAAGAACATCAAGGAGTTCCTCCAGAGCTTCGTCCACATCGTGCAGATGTT |
| | | CATCAACACCAGC |
| 954 | IL15_Fc_RLI- | ATGGAAACCGACACCCTCCTCCTCTGGGTCCTCCTACTCTGGGTTCCCGGAAGCACCGGCGA |
| | CO01 | ACCGAAAAGCTGCGACAAGACCCACACCTGCCCCCCGTGCCCCGCCCCCGAGCTCCTCGGGG |
| | | GCCCCAGCGTCTTCCTCTTCCCCCCGAAGCCCAAAGATACCTTAATGATCAGCCGGACCCCG |
| | | GAGGTCACGTGCGTCGTCGTCGCCGTCAGCCACGAGGACCCGGAGGTTAAGTTCAACTGGTA |
| | | CGTCGACGGCGTCGAGGTCCACAACGCGAAAACCAAGCCCCGGGAAGAACAGTATAATAGCA |
| | | CTTACCGGGTGGTGTCCGTGCTGACCGTTCTTCACCAGGACTGGCTGAACGGCAAGGAGTAC |
| | | AAGTGCAAGGTGTCCAATAAGGCCCTGCCCGCGCCCATCGAGAAGACCATCAGCAAGGCCAA |
| | | GGGCCAGCCCAGGGAACCCCAGGTATACACCCTGCCACCCAGCCGGGACGAGCTCACCAAGA |
| | | ACCAGGTGAGCCTGACCTGCCTGGTGAAGGGGTTCTATCCCAGCGACATCGCTGTCGAATGG |
| | | GAGAGCAACGGCCAGCCCGAGAACAACTATAAGACCACACCCCCCGTGCTGGACAGCGACGG |
| | | CAGCTTCTTCCTGTACAGCAAGCTGACCGTCGACAAAAGCCGGTGGCAGCAAGGCAACGTGT |
| | | TTAGCTGCTCCGTCATGCACGAGGCCCTGCACAACCACTACACCCAGAAGAGTCTGAGCCTG |
| | | TCCCCCGGCAAGATCACCTGCCCGCCCCCAATGAGCGTGGAGCACGCCGACATCTGGGTGAA |
| | | GTCGTACTCCCTGTACAGCAGGGAGAGGTACATCTGCAACAGTGGATTCAAGCGGAAGGCCG |
| | | GGACCAGCAGCCTGACCGAGTGCGTCCTGAATAAGGCCACCAACGTGGCCCACTGGACCACC |
| | | CCCTCGCTGAAATGTATAAGGGATCCCGCCCTGGTGCACCAGAGGCCCGCCCCACCGAGCGG |
| | | TGGCTCCGGCGGAGGCGGCAGCGGGGGCGGAAGCGGCGGAGGCGGGAGCCTGCAGAACTGGG |
| | | TGAACGTCATCTCCGACCTGAAAAAGATCGAGGACCTTATCCAGAGCATGCACATCGACGCG |
| | | ACCCTCTACACCGAGAGCGATGTACACCCCTCCTGTAAGGTGACCGCCATGAAGTGCTTCCT |
| | | GCTGGAGCTGCAGGTGATCAGCCTGGAGTCCGGCGACGCCTCCATCCACGACACCGTGGAGA |
| | | ACCTATCATCCTCGCGAACAACAGCCTGAGCTCGAACGGGAACGTGACGGAGAGCGGCTGC |
| | | AAAGAGTGTGAGGAGCTGGAGGAGAAGAACATCAAGGAGTTCCTGCAGTCCTTCGTCCACAT |
| | | CGTCCAGATGTTCATCAATACCTCC |
| 955 | IL15_Fc_RLI- | ATGGAGACGGACACCTTACTCCTCTGGGTCCTCCTCCTTTGGGTCCCGGGCTCCACCGGGGA |
| | CO02 | GCCCAAAAGCTGCGACAAGACGCACACCTGCCCGCCCTGTCCCGCCCCCGAACTCTTGGGCG |
| | | GCCCCAGCGTCTTCTTGTTTCCCCCCAAGCCCAAAGACACGCTCATGATCTCTCGGACCCCC |
| | | GAGGTTACCTGTGTAGTCGTCGCCGTCAGCCACGAGGACCCCGAGGTCAAGTTCAACTGGTA |
| | | CGTGGACGGGGTCGAGGTACACAACGCCAAGACCAAGCCACGGGAAGAACAGTACAACAGCA |
| | | CCTATCGGGTGGTGAGCGTCCTGACCGTGCTCCACCAAGACTGGCTGAACGGGAAGGAGTAC |
| | | AAGTGCAAGGTGTCCAACAAGGCCCTGCCGGCCCCGATCGAAAAGACCATTTCGAAGGCCAA |
| | | AGGCCAGCCCAGGGAACCCCAGGTGTACACCCTCCCACCCAGCCGCGACGAGCTCACGAAGA |
| | | ACCAAGTGAGCCTCACCTGCCTGGTGAAGGGCTTCTACCCGAGCGACATCGCTGTGGAGTGG |
| | | GAGAGCAACGGCCAGCCAGAGAACAACTATAAGACCACCCCTCCGGTGCTGGACAGCGACGG |
| | | CAGCTTCTTTCTCTATAGCAAGCTGACCGTGGACAAATCCCGGTGGCAGCAGGGCAACGTGT |
| | | TCTCCTGCAGCGTGATGCACGAGGCCCTGCATAATCATTACACCCAGAAAAGCCTGAGCCTG |
| | | AGCCCCGGCAAGATCACCTGCCCGCCCCCCATGAGCGTGGAACACGCCGACATCTGGGTGAA |
| | | GTCCTACTCCCTGTATAGCAGGGAGAGGTACATCTGCAACAGCGGCTTCAAGAGGAAGGCCG |
| | | GCACCAGCTCCCTGACCGAGTGTGTGCTCAACAAGGCCACAAATGTGGCCCATTGGACCACA |
| | | CCGTCCCTGAAGTGCATAAGAGATCCAGCCCTCGTGCACCAGAGGCCTGCCCCGCCCTCCGG |
| | | GGGAAGCGGGGGTGGGGGTAGCGGCGGCGGGAGCGGGGGCGGAGGCTCCCTCCAAAACTGGG |
| | | TTAACGTGATTAGCGACCTGAAGAAGATCGAGGACCTGATCCAGAGCATGCACATCGACGCC |
| | | ACCCTCTACACCGAGTCCGACGTGCACCCCAGCTGCAAGGTGACCGCCATGAAGTGTTTCCT |
| | | CCTGGAGCTGCAGGTAATCTCCCTGGAGAGCGGGGACGCCAGCATCCATGATACGGTGGAAA |
| | | ACCTGATCATCCTGGCGAACAACTCCCTGAGCAGCAATGGCAACGTCACCGAGAGCGGATGC |
| | | AAGGAGTGCGAGGAGCTGGAGGAAAAGAATATCAAGGAGTTCCTGCAGTCCTTCGTCCACAT |
| | | CGTGCAGATGTTCATCAACACCTCG |
| 956 | IL15_Fc_RLI- | ATGGAGACAGACACCCTCCTCCTCTGGGTCCTCCTCCTCTGGGTCCCCGGGAGCACCGGGGA |
| | CO03 | ACCCAAGAGCTGCGACAAAACCCACACCTGCCCCCCGTGCCCCGCCCCGGAACTCCTCGGCG |
| | | GGCCCAGCGTCTTTCTCTTCCCTCCCAAGCCCAAAGACACGCTCATGATCTCCAGGACCCCC |
| | | GAGGTAACCTGCGTAGTCGTCGCCGTTAGTCACGAGGACCCGGAGGTCAAGTTCAACTGGTA |
| | | CGTCGACGGCGTCGAAGTCCACAACGCGAAGACCAAGCCCCGGGAGGAACAGTACAACAGCA |
| | | CCTACAGGGTGGTGAGCGTGCTCACCGTCCTGCATCAGGACTGGCTCAACGGCAAGGAGTAC |
| | | AAGTGTAAGGTCAGCAACAAGGCACTGCCCGCCCCCATCGAGAAAACCATCAGCAAGGCCAA |
| | | GGGCCAGCCCCGCGAGCCCCAGGTGTACACCCTGCCCCCGAGCCGGGACGAGCTCACCAAGA |
| | | ACCAGGTGAGCCTGACCTGTCTGGTGAAAGGCTTCTACCCCTCAGACATAGCCGTGGAGTGG |
| | | GAGAGCAATGGGCAGCCGGAGAACAACTATAAGACCACCCCTCCCGTGCTAGACTCGGACGG |
| | | GAGTTTCTTTCTGTACTCCAAGCTGACCGTAGACAAGAGCAGGTGGCAGCAGGGGAACGTGT |
| | | TCAGCTGCTCCGTGATGCACGAGGCCCTGCACAATCACTACACTCAGAAAAGCCTGTCCCTG |
| | | AGCCCCGGCAAAATCACCTGCCCCCCGCCCATGAGCGTCGAGCACGCCGACATCTGGGTGAA |
| | | AAGCTACTCGCTGTACAGCCGGGAGCGGTACATCTGCAACTCGGGCTTCAAACGGAAGGCCG |
| | | GCACCAGCTCTCTGACCGAGTGTGTTCTCAATAAGGCCACCAACGTGGCACACTGGACCACC |
| | | CCCTCCCTAAAGTGCATTAGGGACCCCGCCCTGGTGCATCAGAGGCCCGCCCCTCCAAGCGG |
| | | GGGGAGCGGCGGTGGCGGCTCGGGGGGAGGCAGCGGGGGCGGGGGTTCCCTGCAGAACTGGG |
| | | TGAACGTGATCTCCGACCTGAAGAAGATCGAAGATCTGATCCAGTCGATGCACATCGACGCC |
| | | ACACTGTATACCGAGAGCGACGTCCACCCCAGTTGCAAGGTGACCGCGATGAAGTGTTTCCT |
| | | GCTGGAGCTCCAGGTGATCAGCCTGGAGAGCGGGGACGCCAGCATCCACGACACGGTGGAGA |
| | | ACCTGATCATCCTGGCCAACAATAGCCTCAGCAGCAATGGCAACGTGACCGAAAGCGGGTGC |
| | | AAGGAGTGCGAGGAGCTGGAGGAGAAGAACATCAAGGAATTCCTGCAAAGCTTCGTCCACAT |
| | | CGTCCAGATGTTTATCAACACCAGT |
| 957 | IL15_Fc_RLI- | ATGGAGACTGATACGCTACTCCTCTGGGTCCTCCTCCTCTGGGTCCCCGGGAGCACCGGGGA |
| | CO04 | GCCGAAGTCCTGCGACAAGACCCACACGTGCCCACCCTGCCCCGCCCCCGAACTCCTCGGGG |
| | | GCCCCTCCGTCTTCCTCTTTCCCCCTAAGCCCAAGGACACCTTGATGATCAGCAGAACGCCC |
| | | GAGGTCACCTGTGTAGTCGTCGCCGTCAGCCACGAGGACCCGGAGGTCAAATTCAACTGGTA |
| | | CGTGGACGGCGTCGAGGTTCACAACGCCAAGACCAAGCCCCGGGAGGAGCAGTACAATAGCA |
| | | CCTACAGGGTGGTGAGCGTGCTGACGGTGCTACACCAGGACTGGCTGAACGGGAAAGAGTAT |
| | | AAGTGCAAGGTGAGCAACAAGGCCCTGCCCGCCCCGATCGAGAAGACCATCAGCAAGGCCAA |
| | | GGGCCAGCCCAGGGAGCCCCAGGTCTACACCCTGCCCCCCAGCAGGGATGAGCTGACGAAGA |
| | | ACCAGGTCAGCCTGACTTGCCTGGTCAAGGGCTTCTACCCCAGCGATATCGCCGTGGAGTGG |
| | | GAAAGCAACGGCCAGCCCGAGAATAACTACAAGACCACCCCGCCCGTGCTGGATTCCGACGG |
| | | CAGCTTTTTCCTGTACTCCAAGCTGACCGTCGACAAAAGCAGGTGGCAGCAGGGCAACGTGT |
| | | TCAGCTGTAGCGTTATGCACGAGGCCCTGCACAACCACTACACCCAGAAAAGCCTCAGCCTG |
| | | TCCCCCGGCAAGATCACCTGCCCCCCGCCGATGAGCGTGGAGCACGCCGACATCTGGGTCAA |
| | | GAGCTACAGCCTGTACAGCAGGGAGAGGTACATCTGCAACAGCGGCTTCAAGAGGAAGGCGG |
| | | GCACCAGCAGCCTGACGGAGTGCGTGCTTAACAAGGCCACGAACGTCGCCCATTGGACCACC |
| | | CCGAGCCTTAAGTGTATCAGGGATCCGGCCCTGGTCCACCAGAGGCCCGCCCCGCCCTCCGG |
| | | AGGCAGCGGAGGCGGCGGAAGCGGTGGCGGAAGCGGGGGCGGTGGCAGCCTACAGAACTGGG |
| | | TGAACGTGATCTCAGATCTGAAAAAGATCGAGGACCTGATCCAGTCCATGCACATCGATGCA |
| | | ACCCTGTATACCGAGAGCGACGTGCACCCCAGCTGCAAGGTGACCGCCATGAAATGTTTCCT |
| | | GCTGGAGCTGCAGGTGATCAGCCTGGAAAGCGGGGACGCCTCCATCCACGACACCGTGGAGA |
| | | ACCTGATCATCCTCGCCAACAACAGCCTGAGCAGCAACGGCAACGTGACCGAGAGCGGGTGC |
| | | AAAGAGTGTGAGGAGCTGGAGGAGAAGAACATAAAGGAGTTCCTGCAGAGCTTCGTGCACAT |
| | | CGTCCAGATGTTCATCAACACCTCC |
| 958 | IL15_Fc_RLI- | ATGGAGACGGACACCCTACTCCTATGGGTCCTTCTCCTCTGGGTCCCGGGCAGCACCGGCGA |
| | CO05 | GCCCAAGAGCTGCGACAAGACGCACACCTGCCCGCCGTGCCCCGCCCCCGAGCTCCTCGGGG |
| | | GCCCCAGCGTATTCCTCTTCCCCCCAAAGCCCAAGGACACCCTCATGATCAGCCGGACCCCC |
| | | GAGGTCACCTGCGTCGTCGTAGCCGTCTCCCACGAGGACCCCGAGGTCAAGTTTAACTGGTA |
| | | CGTTGACGGCGTCGAGGTCCACAACGCGAAGACCAAGCCCCGGGAGGAGCAATACAACTCCA |
| | | CATACCGCGTGGTGAGCGTGTTGACCGTGCTCCACCAGGACTGGCTCAATGGCAAAGAGTAC |
| | | AAATGCAAGGTGAGCAACAAGGCCCTGCCGGCCCCAATCGAGAAGACCATCAGCAAGGCGAA |
| | | AGGGCAACCCAGGGAGCCCCAGGTGTATACGCTCCCACCCAGCAGGGACGAGCTCACCAAGA |
| | | ACCAGGTGAGCCTGACGTGCCTCGTGAAGGGCTTTTACCCGAGCGACATCGCCGTCGAGTGG |
| | | GAGAGCAACGGGCAACCCGAGAACAACTACAAAACCACCCCTCCCGTGCTGGACAGCGACGG |
| | | CAGCTTCTTTCTGTACAGCAAGCTGACCGTGGACAAGAGCCGGTGGCAGCAGGGGAACGTTT |
| | | TTAGCTGCTCCGTCATGCACGAGGCCCTGCACAACCATTACACCCAGAAAAGCCTGAGCCTT |
| | | AGCCCCGGGAAGATCACGTGCCCGCCCCCAATGAGCGTGGAGCACGCCGACATATGGGTCAA |
| | | GTCGTACAGCCTGTACAGCCGGGAGAGGTACATATGCAACTCCGGCTTCAAGCGGAAAGCGG |
| | | GCACCTCCAGCCTGACCGAGTGCGTGCTGAACAAGGCCACTAATGTGGCCCATTGGACCACC |
| | | CCCTCCCTGAAATGTATCAGAGATCCGGCCCTGGTCCACCAGAGGCCCGCCCCACCCAGCGG |
| | | CGGCAGCGGTGGCGGCGGCAGTGGAGGCGGCTCAGGGGGCGGGGGCAGCCTGCAGAACTGGG |
| | | TGAACGTGATCTCCGACCTGAAGAAGATCGAGGACCTGATCCAGTCCATGCACATCGATGCC |
| | | ACACTGTACACGGAAAGCGATGTGCACCCCAGCTGCAAGGTGACCGCCATGAAGTGCTTCCT |
| | | GCTGGAGCTCCAGGTCATCTCCCTGGAATCAGGGGACGCCAGCATCCACGACACCGTGGAAA |
| | | ACCTGATCATCCTGGCCAACAATAGCCTGAGCAGCAACGGGAACGTAACCGAGAGCGGCTGC |
| | | AAGGAGTGCGAGGAGCTGGAGGAGAAGAACATAAAGGAGTTCCTCCAGAGCTTCGTGCACAT |
| | | CGTGCAGATGTTTATCAACACCAGC |
| 959 | IL15_Fc_RLI- | ATGGAGACAGATACCCTGCTCCTCTGGGTTCTCCTCTTGTGGGTCCCCGGCAGCACCGGAGA |
| | CO06 | GCCCAAGAGCTGTGACAAGACACACACCTGCCCGCCCTGCCCCGCCCCCGAGCTCTTGGGCG |
| | | GGCCCTCCGTGTTCTTGTTCCCGCCCAAGCCTAAGGACACCCTCATGATATCGAGGACCCCG |
| | | GAGGTTACCTGCGTCGTCGTAGCGGTGTCCCACGAAGACCCCGAGGTCAAATTTAACTGGTA |
| | | CGTGGACGGCGTCGAGGTACATAACGCGAAGACCAAGCCCCGGGAGGAGCAATACAACTCCA |
| | | CCTACAGGGTCGTGAGTGTCCTGACCGTACTGCACCAGGACTGGCTCAACGGGAAGGAGTAC |
| | | AAGTGCAAGGTGAGCAATAAGGCCCTGCCCGCCCCGATCGAGAAAACCATCAGCAAGGCCAA |
| | | GGGCCAGCCGAGGGAGCCCCAGGTGTACACCCTCCCGCCCTCACGCGACGAGCTGACCAAGA |
| | | ACCAGGTGTCGCTGACCTGCCTGGTCAAGGGTTTCTACCCGAGCGACATCGCCGTGGAGTGG |
| | | GAGAGCAACGGCCAGCCGGAAAACAACTACAAGACGACACCACCCGTCCTGGACAGCGACGG |
| | | GAGCTTCTTTCTGTATTCTAAGCTCACCGTGGACAAGAGCCGGTGGCAGCAGGGCAACGTGT |
| | | TCTCCTGCTCCGTCATGCACGAAGCCCTGCACAACCACTACACCCAGAAAAGCCTGAGCCTC |
| | | TCCCCCGGCAAGATCACGTGCCCCCCGCCCATGAGCGTGGAGCACGCGGACATTTGGGTCAA |
| | | GAGCTACAGCCTGTACAGCCGGGAACGCTACATCTGTAACTCGGGCTTCAAGAGGAAGGCCG |
| | | GCACCAGCTCACTGACCGAGTGCGTGCTGAACAAGGCCACCAACGTGGCCCACTGGACCACC |
| | | CCCTCCCTCAAGTGTATCCGCGACCCCGCCCTGGTGCACCAAAGGCCCGCCCCACCTAGTGG |
| | | CGGGAGCGGCGGCGGTGGATCAGGCGGCGGCTCCGGGGGAGGGGGTAGCCTGCAAAACTGGG |
| | | TGAATGTAATCAGCGACCTCAAGAAGATCGAAGACCTGATCCAGAGCATGCACATCGACGCG |
| | | ACCCTGTACACGGAAAGCGACGTGCACCCCAGCTGCAAGGTGACCGCCATGAAGTGCTTCCT |
| | | GCTGGAGCTGCAGGTGATCAGCCTGGAGAGCGGGGATGCCAGCATCCACGACACCGTGGAAA |
| | | ACCTCATCATCCTGGCCAATAACTCCCTGAGCAGCAACGGGAACGTGACCGAGTCCGGCTGC |
| | | AAGGAGTGCGAGGAACTCGAAGAGAAAAACATCAAGGAATTCCTGCAGTCGTTCGTGCATAT |
| | | CGTGCAGATGTTCATCAACACCAGC |
| 960 | IL15_Fc_RLI- | ATGGAGACGGACACGCTCCTCCTCTGGGTCTTGCTCCTCTGGGTCCCCGGCAGCACGGGCGA |
| | CO07 | GCCCAAGTCCTGCGACAAGACCCACACCTGCCCGCCCTGCCCGGCCCCCGAGCTACTCGGGG |
| | | GCCCCAGCGTATTCCTCTTCCCACCCAAGCCTAAGGACACGCTCATGATCTCGCGGACCCCG |
| | | GAGGTCACGTGCGTCGTCGTCGCCGTCTCCCACGAGGACCCCGAGGTCAAATTTAACTGGTA |
| | | CGTCGACGGCGTCGAGGTCCACAACGCCAAGACCAAGCCCCGGGAAGAACAGTACAATTCGA |
| | | CGTACCGCGTGGTGTCCGTGCTGACCGTCCTGCACCAGGACTGGCTCAATGGGAAGGAGTAC |
| | | AAGTGCAAAGTCAGCAACAAGGCCCTGCCTGCCCCCATCGAAAAGACCATCAGCAAGGCAAA |
| | | GGGCCAACCAAGGGAGCCCCAGGTGTACACACTGCCCCCCAGCAGGGACGAGCTGACAAAGA |
| | | ATCAGGTGAGCCTGACCTGCCTGGTCAAGGGGTTTTACCCCAGCGACATAGCCGTGGAGTGG |
| | | GAGTCCAACGGGCAGCCCGAGAATAATTACAAGACCACCCCGCCCGTGCTGGACAGCGACGG |
| | | GAGCTTCTTCCTGTACTCCAAGCTGACCGTGGACAAAAGCAGGTGGCAGCAGGGCAACGTCT |
| | | TTAGCTGCTCCGTGATGCACGAGGCCCTGCACAACCATTACACCCAGAAGTCCCTCAGCCTG |
| | | AGCCCCGGCAAGATCACCTGCCCGCCCCCCATGTCCGTGGAGCACGCCGACATATGGGTGAA |
| | | ATCGTACAGCCTGTACTCACGGGAGCGGTACATCTGCAACAGCGGATTCAAGAGAAAGGCCG |
| | | GCACCAGCAGCCTGACCGAGTGCGTGCTGAACAAGGCCACCAACGTGGCCCACTGGACCACG |
| | | CCCTCCCTCAAGTGTATACGGGATCCCGCACTCGTGCATCAAAGGCCCGCCCCACCCTCCGG |
| | | AGGCTCCGGGGGAGGAGGAAGCGGGGGCGGGTCCGGCGGCGGGGGAAGCCTGCAGAACTGGG |
| | | TGAACGTGATCAGCGACCTCAAGAAGATCGAGGACCTGATACAGTCCATGCACATCGACGCC |
| | | ACCCTCTACACCGAGAGCGACGTCCACCCCTCGTGCAAGGTGACCGCCATGAAGTGCTTCCT |
| | | GCTGGAGCTCCAGGTGATAAGCCTGGAGTCCGGCGATGCATCGATCCACGACACCGTGGAGA |
| | | ACCTAATCATCCTCGCAAACAACAGCCTCTCCTCGAACGGCAACGTTACCGAGAGCGGTTGC |
| | | AAGGAATGCGAGGAGCTGGAGGAAAAGAATATCAAGGAGTTCCTGCAGAGCTTCGTCCACAT |
| | | CGTCCAGATGTTCATCAACACCTCC |
| 961 | IL15_Fc_RLI- | ATGGAGACGGACACCCTCCTCCTCTGGGTCCTCCTCCTCTGGGTCCCCGGTAGCACCGGGGA |
| | CO08 | GCCCAAGTCCTGCGACAAGACCCACACGTGTCCCCCCTGCCCCGCCCCGGAGTTGCTCGGCG |
| | | GGCCGAGCGTCTTCCTCTTTCCCCCCAAGCCCAAAGACACCTTAATGATCAGCCGGACCCCC |
| | | GAGGTTACGTGTGTCGTCGTCGCGGTGTCCCACGAAGACCCCGAGGTCAAATTTAACTGGTA |
| | | CGTGGACGGGGTCGAGGTTCACAACGCCAAGACCAAGCCCCGGGAGGAGCAGTACAACTCCA |
| | | CCTACCGCGTGGTGTCCGTGCTGACCGTGCTGCACCAGGACTGGCTGAATGGGAAGGAGTAT |
| | | AAGTGCAAGGTGTCCAACAAGGCCCTGCCCGCCCCGATCGAAAAGACGATCTCCAAGGCCAA |
| | | GGGCCAGCCCAGGGAGCCTCAGGTGTACACCCTGCCCCCCTCCCGGGATGAGCTGACCAAAA |
| | | ATCAAGTGTCCCTGACCTGCCTGGTGAAGGGATTCTATCCCAGCGACATCGCGGTCGAGTGG |
| | | GAGAGCAACGGGCAGCCCGAGAACAACTACAAGACGACCCCTCCCGTGCTGGATAGCGACGG |
| | | GAGCTTCTTCCTGTACAGCAAGCTGACCGTGGACAAGAGCAGGTGGCAGCAGGGCAACGTTT |
| | | TTAGCTGCAGCGTGATGCACGAGGCCCTGCACAACCACTACACACAGAAAAGCCTCAGCCTG |
| | | TCCCCCGGGAAAATCACCTGCCCACCCCCCATGTCCGTGGAGCACGCCGACATCTGGGTGAA |
| | | AAGCTACAGCCTCTACTCCCGGGAGCGCTACATCTGCAATTCCGGCTTCAAGAGGAAGGCCG |
| | | GCACCTCCAGCCTCACCGAATGCGTGCTGAACAAGGCCACCAACGTGGCGCATTGGACCACA |
| | | CCCAGCCTGAAGTGTATCCGAGATCCGGCCCTGGTACACCAGCGTCCCGCACCCCCGAGCGG |
| | | GGGCTCCGGCGGCGGCGGGAGCGGGGGCGGTAGTGGGGGAGGCGGTAGCCTCCAGAATTGGG |
| | | TGAACGTGATCTCCGATCTGAAGAAGATCGAGGACCTGATCCAGTCCATGCATATAGATGCG |
| | | ACCCTGTACACGGAATCCGACGTGCACCCCAGCTGTAAGGTGACCGCCATGAAGTGCTTTCT |
| | | CCTGGAACTCCAGGTGATCAGCCTGGAGAGCGGCGACGCCTCAATCCACGACACGGTGGAGA |
| | | ACCTCATCATCCTGGCGAACAATTCGCTCAGCTCCAACGGCAACGTGACCGAGAGCGGGTGC |
| | | AAGGAATGCGAGGAGCTGGAGGAGAAGAACATCAAAGAGTTCCTGCAGTCCTTTGTGCATAT |
| | | CGTGCAGATGTTCATCAACACCTCC |
| 962 | IL15_Fc_RLI- | ATGGAGACAGACACGCTCCTCCTGTGGGTACTCCTCCTCTGGGTCCCCGGAAGCACGGGGGA |
| | CO09 | ACCAAAGAGCTGCGACAAGACCCACACCTGCCCCCCGTGCCCCGCCCCCGAGCTACTCGGCG |
| | | GGCCGTCCGTCTTCCTCTTCCCGCCCAAGCCCAAAGACACGCTCATGATCAGCAGGACCCCG |
| | | GAGGTAACCTGCGTAGTCGTCGCCGTTAGCCACGAAGACCCGGAGGTCAAGTTCAACTGGTA |
| | | CGTCGACGGGGTCGAGGTCCACAACGCCAAGACCAAGCCCCGCGAGGAGCAGTACAACAGCA |
| | | CGTACAGGGTCGTCTCCGTGCTGACCGTGCTGCATCAGGACTGGCTCAACGGCAAGGAGTAT |
| | | AAGTGCAAGGTGAGCAACAAGGCCCTGCCCGCCCCCATCGAGAAGACCATCAGCAAGGCTAA |
| | | GGGCCAGCCCAGGGAGCCCCAGGTGTACACCCTGCCCCCCAGCAGGGACGAACTCACCAAGA |
| | | ACCAGGTGAGCCTGACCTGCCTGGTAAAGGGCTTCTACCCCAGCGATATCGCGGTGGAGTGG |
| | | GAGAGCAATGGCCAGCCCGAAAACAACTACAAGACGACCCCGCCGGTCCTGGACAGCGACGG |
| | | CAGCTTCTTCCTGTATTCCAAGCTCACCGTGGACAAATCCAGGTGGCAGCAGGGCAATGTGT |
| | | TCAGCTGCAGCGTGATGCACGAGGCCCTGCACAACCACTACACCCAGAAGTCCCTGAGCCTG |
| | | TCCCCCGGGAAGATCACCTGCCCGCCCCCCATGAGCGTGGAGCACGCGGATATCTGGGTGAA |
| | | GTCCTACAGCCTGTACAGTCGAGAACGGTACATCTGCAACAGCGGCTTTAAGCGGAAGGCCG |
| | | GCACCAGCAGCCTCACCGAGTGCGTGTTGAACAAGGCCACCAACGTCGCCCACTGGACAACC |
| | | CCCAGCCTGAAATGTATCCGAGATCCCGCGCTAGTCCACCAACGACCCGCCCCTCCCTCCGG |
| | | CGGGAGCGGCGGCGGTGGGTCGGGCGGCGGCAGCGGGGGTGGCGGCAGCCTCCAGAACTGGG |
| | | TGAACGTGATCAGCGATCTGAAAAAGATCGAGGACCTGATCCAGTCGATGCACATCGACGCG |
| | | ACCCTCTACACAGAGTCCGACGTCCATCCCAGCTGCAAGGTGACCGCCATGAAATGCTTCCT |
| | | GCTGGAGCTCCAGGTGATCAGCCTGGAAAGCGGGGACGCCTCCATACACGACACCGTGGAGA |
| | | ACCTGATCATCCTGGCCAACAACAGCCTCAGCAGCAATGGGAACGTGACCGAATCTGGCTGC |
| | | AAGGAGTGCGAGGAGCTGGAGGAGAAGAACATCAAGGAGTTTCTCCAATCCTTCGTGCACAT |
| | | CGTCCAGATGTTCATCAACACCAGC |
| 963 | IL15_Fc_RLI- | ATGGAGACTGACACCCTCCTCCTATGGGTCCTACTACTCTGGGTCCCGGGCAGCACCGGCGA |
| | CO10 | GCCAAAGTCCTGCGACAAGACCCATACCTGCCCGCCCTGCCCCGCCCCGGAGCTCCTCGGCG |
| | | GCCCGAGCGTCTTCCTCTTCCCTCCCAAGCCCAAGGACACCCTCATGATCAGCCGGACCCCC |
| | | GAGGTAACCTGTGTCGTCGTCGCCGTCAGCCACGAGGACCCAGAGGTAAAATTCAATTGGTA |
| | | CGTCGACGGCGTCGAGGTCCACAACGCCAAGACCAAGCCGCGCGAGGAGCAGTACAACAGCA |
| | | CGTACAGGGTGGTCAGCGTGCTGACCGTGCTGCATCAGGACTGGCTCAACGGCAAGGAGTAT |
| | | AAGTGCAAGGTAAGCAACAAGGCCCTGCCCGCCCCCATCGAGAAGACCATCTCTAAGGCCAA |
| | | AGGACAGCCCCGAGAGCCCCAGGTGTATACCCTGCCACCCAGCCGGGACGAGCTCACCAAAA |
| | | ACCAGGTGAGCCTGACCTGCCTGGTGAAGGGCTTTTACCCGAGCGACATCGCCGTGGAGTGG |
| | | GAGAGCAACGGCCAACCGGAGAACAACTACAAGACGACACCCCCCGTGCTGGACTCCGACGG |
| | | CAGCTTCTTTCTGTACTCGAAGCTCACCGTGGACAAGAGCCGATGGCAGCAGGGGAATGTGT |
| | | TCTCCTGCAGCGTCATGCATGAGGCGCTGCACAACCACTACACCCAGAAAAGCCTGAGCCTT |
| | | TCACCCGGCAAGATCACCTGCCCCCCTCCGATGAGCGTGGAACACGCGGACATCTGGGTGAA |
| | | AAGCTACTCCCTGTACAGCAGGGAGCGGTACATCTGCAACAGCGGCTTCAAGCGGAAAGCCG |
| | | GCACCAGCTCCCTGACCGAGTGCGTCCTGAATAAGGCCACGAACGTGGCGCACTGGACAACC |
| | | CCCAGCCTGAAGTGCATCAGGGATCCCGCCCTGGTGCACCAAAGGCCCGCCCCGCCGAGCGG |
| | | GGGCTCCGGCGGGGGTGGCAGCGGTGGCGGTTCGGGAGGGGGAGGAAGCCTGCAAAACTGGG |
| | | TGAACGTGATCTCCGACCTGAAGAAGATCGAGGACCTGATCCAGAGCATGCACATCGACGCG |
| | | ACCCTGTATACCGAGTCCGACGTGCACCCCTCCTGTAAGGTCACCGCGATGAAGTGCTTCCT |
| | | CCTGGAACTGCAGGTTATCAGCCTGGAGTCCGGAGACGCCTCCATTCACGACACTGTGGAGA |
| | | ACCTGATCATCCTGGCGAACAACAGCCTGAGCTCCAACGGAAATGTGACCGAGAGCGGGTGC |
| | | AAAGAGTGCGAGGAGCTGGAAGAGAAGAACATTAAGGAGTTCCTACAGAGCTTCGTGCACAT |
| | | CGTGCAGATGTTCATAAACACCAGC |
| 964 | IL15_Fc_RLI- | ATGGAGACTGACACACTCCTCTTGTGGGTCCTCCTCCTGTGGGTACCCGGGAGCACCGGAGA |
| | CO11 | GCCCAAGAGCTGCGACAAGACGCATACCTGTCCGCCCTGCCCCGCCCCCGAGCTTCTCGGGG |
| | | GACCCAGCGTATTCCTCTTCCCCCCGAAGCCGAAAGATACCTTAATGATCTCCAGGACGCCC |
| | | GAGGTAACCTGCGTCGTCGTCGCGGTCAGCCACGAGGACCCGGAGGTCAAGTTCAACTGGTA |
| | | CGTTGACGGGGTCGAGGTCCACAACGCCAAGACGAAGCCCCGGGAGGAGCAATACAACAGTA |
| | | CCTACAGGGTGGTGAGCGTGCTGACGGTGCTGCACCAAGACTGGCTGAACGGCAAAGAGTAT |
| | | AAATGCAAAGTGAGCAACAAAGCGCTGCCGGCCCCCATCGAAAAGACCATCTCCAAGGCCAA |
| | | AGGCCAGCCCCGGGAGCCGCAGGTGTACACCCTCCCGCCCAGCCGGGACGAGCTGACCAAGA |
| | | ATCAGGTCAGCCTCACCTGCCTGGTGAAGGGATTCTACCCCAGCGACATCGCTGTGGAGTGG |
| | | GAGTCCAACGGCCAGCCCGAGAATAACTACAAGACCACTCCCCCCGTGCTGGACAGCGACGG |
| | | CTCCTTCTTCCTGTATAGCAAACTGACGGTGGACAAATCCCGGTGGCAGCAAGGCAACGTGT |
| | | TCAGCTGCAGCGTGATGCACGAAGCGCTGCACAACCATTACACCCAGAAGTCCCTGTCGCTG |
| | | AGCCCCGGCAAGATCACCTGCCCGCCCCCCATGAGCGTGGAGCACGCCGACATCTGGGTGAA |
| | | AAGCTATAGCCTCTACAGCCGGGAACGCTACATTTGTAACTCCGGGTTCAAGAGGAAGGCCG |
| | | GAACCAGCTCCCTGACCGAGTGCGTCCTGAACAAAGCCACCAATGTGGCCCATTGGACCACC |
| | | CCCTCCCTGAAGTGTATCAGGGATCCCGCGCTGGTGCACCAAAGGCCCGCTCCCCCGAGCGG |
| | | AGGCAGCGGGGGTGGGGGCTCAGGGGGAGGGAGCGGCGGCGGCGGTTCCCTGCAGAACTGGG |
| | | TCAATGTCATCTCCGATCTCAAAAAGATCGAGGACCTGATCCAGAGCATGCACATCGACGCC |
| | | ACCTTGTATACAGAGTCCGACGTGCATCCCAGCTGCAAGGTGACCGCCATGAAATGCTTCCT |
| | | GCTGGAACTGCAGGTGATCAGCCTGGAGAGCGGCGACGCATCCATCCACGACACCGTGGAGA |
| | | ACCTGATCATCCTGGCGAATAACAGCCTGAGCTCCAATGGCAACGTGACCGAGAGCGGGTGC |
| | | AAGGAGTGTGAGGAGCTGGAGGAGAAGAATATCAAGGAGTTCCTGCAGAGCTTCGTGCACAT |
| | | CGTCCAAATGTTCATCAACACCAGC |
| 965 | IL15_Fc_RLI- | ATGGAGACGGACACCCTTCTCCTCTGGGTCCTCCTTCTCTGGGTCCCCGGAAGCACCGGGGA |
| | CO12 | GCCGAAAAGCTGCGACAAGACCCACACCTGCCCGCCCTGCCCCGCGCCCGAGCTCCTCGGCG |
| | | GGCCATCCGTCTTCCTATTCCCGCCCAAGCCCAAGGACACTTTGATGATAAGCAGGACCCCG |
| | | GAGGTCACGTGCGTCGTAGTAGCGGTCAGCCACGAAGACCCCGAGGTCAAGTTCAACTGGTA |
| | | CGTCGACGGCGTCGAAGTCCACAACGCCAAGACCAAACCACGCGAGGAGCAATACAACTCGA |
| | | CCTACAGGGTGGTGAGCGTGCTGACGGTCCTGCATCAGGACTGGCTGAACGGCAAGGAGTAT |
| | | AAATGTAAGGTGAGCAACAAGGCCCTGCCCGCCCCCATCGAGAAGACCATCAGCAAGGCCAA |
| | | GGGCCAACCGAGGGAGCCCCAGGTCTACACGCTGCCCCCCTCGCGGGACGAGCTGACCAAGA |
| | | ACCAGGTGAGCCTGACCTGCCTGGTGAAGGGCTTCTACCCCTCCGATATCGCCGTGGAGTGG |
| | | GAGAGCAACGGGCAGCCAGAGAACAACTACAAGACCACGCCCCCGGTGCTCGACAGCGACGG |
| | | CAGCTTCTTCCTGTATAGCAAGCTGACCGTGGACAAGAGCCGCTGGCAGCAGGGCAACGTGT |
| | | TTAGCTGCAGCGTGATGCACGAAGCCCTGCATAACCACTACACCCAGAAAAGCCTGTCACTG |
| | | AGCCCGGGAAAGATCACCTGCCCCCCACCCATGAGCGTGGAGCACGCCGACATCTGGGTGAA |
| | | GTCCTACTCCCTGTACAGCAGGGAGCGGTACATCTGCAACAGCGGGTTCAAGCGCAAGGCCG |
| | | GCACCAGCTCGCTGACCGAGTGCGTGCTGAACAAGGCCACAAACGTCGCCCACTGGACGACC |
| | | CCATCACTGAAGTGTATCAGGGATCCCGCCCTGGTGCACCAGAGGCCCGCCCCGCCTTCAGG |
| | | CGGCAGCGGGGGAGGAGGATCCGGCGGTGGGAGCGGCGGCGGGGGATCGCTGCAAAACTGGG |
| | | TGAACGTCATATCGGACCTGAAGAAGATCGAGGACCTCATCCAGAGCATGCACATCGACGCA |
| | | ACCCTGTACACAGAGAGTGACGTCCATCCCTCCTGCAAGGTCACCGCCATGAAGTGCTTCCT |
| | | GCTGGAGCTTCAGGTCATCAGCCTGGAATCCGGGGACGCCTCCATCCATGATACCGTGGAGA |
| | | ACCTGATCATCCTGGCCAACAACTCGCTCAGCAGCAACGGGAATGTCACCGAGAGCGGGTGC |
| | | AAGGAGTGCGAGGAGCTGGAGGAGAAAAACATCAAGGAATTCCTGCAAAGCTTCGTGCACAT |
| | | CGTGCAGATGTTTATCAACACCTCG |
| 966 | IL15_Fc_RLI- | ATGGAGACGGACACCCTTCTCCTCTGGGTCCTCCTTCTGTGGGTCCCCGGGAGCACCGGGGA |
| | CO13 | GCCAAAGAGCTGCGACAAGACCCACACCTGCCCGCCCTGCCCGGCCCCCGAGTTACTCGGCG |
| | | GCCCCAGCGTCTTCCTCTTCCCTCCCAAGCCCAAGGACACCCTCATGATCTCGAGGACCCCC |
| | | GAGGTCACCTGCGTTGTCGTCGCCGTCAGCCACGAGGATCCAGAGGTTAAGTTCAACTGGTA |
| | | CGTTGACGGCGTCGAGGTCCACAACGCCAAGACGAAGCCCCGCGAGGAGCAATATAACTCCA |
| | | CCTATCGGGTGGTGAGCGTGCTCACCGTGTTGCACCAGGACTGGCTGAACGGGAAGGAGTAC |
| | | AAATGTAAGGTGTCCAATAAGGCCCTGCCCGCCCCGATAGAAAAGACCATCTCCAAGGCCAA |
| | | GGGGCAGCCCAGGGAGCCCCAGGTATACACCCTCCCACCTAGCCGCGACGAGCTGACCAAGA |
| | | ACCAGGTGAGCCTGACGTGCCTGGTGAAGGGCTTTTACCCCAGCGATATTGCGGTGGAGTGG |
| | | GAAAGCAACGGCCAGCCGGAGAACAACTACAAGACCACACCCCCGGTGCTGGACTCGGACGG |
| | | CAGCTTCTTTCTGTATTCGAAGCTCACCGTGGACAAGTCCAGGTGGCAGCAGGGCAATGTGT |
| | | TCAGCTGCAGCGTGATGCATGAGGCCCTGCACAACCACTACACCCAGAAAAGCCTGAGCCTG |
| | | AGCCCCGGGAAGATAACCTGCCCTCCCCCCATGTCCGTGGAACACGCCGACATCTGGGTGAA |
| | | AAGCTACAGCCTGTATAGCCGCGAGCGTTACATCTGCAACAGCGGGTTCAAAAGGAAGGCAG |
| | | GCACCTCCAGCCTGACCGAATGTGTCCTGAACAAGGCCACCAACGTGGCACACTGGACCACA |
| | | CCGAGCCTGAAGTGCATAAGGGACCCAGCCCTGGTGCATCAGAGGCCGGCCCCACCCAGTGG |
| | | GGGCAGCGGCGGCGGCGGATCGGGCGGCGGCAGCGGTGGCGGAGGCTCCCTCCAGAATTGGG |
| | | TGAACGTGATAAGCGACCTCAAGAAGATCGAGGACCTGATCCAGAGCATGCACATCGATGCC |
| | | ACGCTCTACACGGAATCCGACGTGCACCCCTCGTGCAAAGTGACCGCCATGAAGTGCTTCCT |
| | | ACTGGAGCTCCAGGTGATCTCCCTCGAGTCCGGAGATGCCTCCATCCACGACACCGTGGAGA |
| | | ACCTGATCATCCTCGCCAACAACAGCCTGTCCAGCAACGGCAATGTTACCGAGAGCGGGTGC |
| | | AAGGAGTGTGAGGAGCTGGAGGAGAAGAACATCAAAGAGTTCCTCCAGAGCTTCGTGCACAT |
| | | CGTCCAAATGTTCATCAACACTTCC |
| 967 | IL15Fc_RLI- | ATGGAGACAGACACGCTCCTCTTATGGGTCCTCCTCCTCTGGGTCCCCGGCAGCACCGGGGA |
| | CO14 | GCCCAAGAGCTGCGACAAGACCCACACCTGCCCGCCCTGCCCCGCCCCCGAGCTCCTCGGCG |
| | | GTCCCAGCGTCTTCCTCTTCCCGCCCAAGCCGAAGGATACCTTAATGATCAGCCGGACCCCC |
| | | GAGGTCACCTGTGTAGTCGTCGCCGTCAGCCACGAGGACCCCGAAGTCAAGTTCAACTGGTA |
| | | CGTCGACGGCGTTGAGGTACACAACGCGAAGACCAAGCCCAGGGAGGAGCAGTACAACAGCA |
| | | CCTACCGGGTGGTGAGCGTGCTGACCGTGCTCCACCAGGACTGGCTGAACGGCAAGGAGTAC |
| | | AAGTGCAAGGTGTCCAACAAGGCCCTCCCCGCCCCGATCGAGAAGACCATCAGCAAGGCCAA |
| | | GGGCCAACCCAGAGAGCCCCAGGTATACACCCTGCCCCCCAGCCGGGACGAGCTGACCAAGA |
| | | ACCAGGTCAGCCTGACCTGCCTGGTGAAGGGCTTCTACCCCAGCGACATCGCCGTGGAGTGG |
| | | GAGAGCAACGGCCAGCCCGAAAACAATTACAAGACCACCCCGCCCGTGCTGGACTCCGACGG |
| | | CAGCTTCTTCCTCTACAGCAAGCTGACCGTGGACAAAAGCCGCTGGCAGCAGGGGAATGTGT |
| | | TCAGCTGCTCGGTCATGCACGAAGCCCTCCACAACCACTACACCCAGAAAAGCCTGAGCCTG |
| | | TCGCCTGGCAAGATCACCTGCCCGCCCCCCATGTCGGTCGAGCACGCCGACATCTGGGTCAA |
| | | GAGCTATTCCCTGTATAGCAGGGAGCGGTACATTTGCAACTCAGGTTTCAAGAGGAAGGCCG |
| | | GCACCAGCAGCCTCACCGAGTGTGTGCTGAACAAGGCCACCAACGTGGCTCACTGGACCACC |
| | | CCCAGCCTGAAATGCATCCGTGATCCCGCACTGGTACACCAGAGGCCCGCCCCGCCCAGCGG |
| | | CGGCTCGGGCGGAGGAGGGTCCGGGGGCGGCAGCGGTGGCGGTGGCTCGCTGCAGAACTGGG |
| | | TGAATGTGATCAGCGACCTGAAAAAGATCGAGGATCTTATCCAAAGCATGCACATAGATGCC |
| | | ACCCTGTACACCGAAAGCGACGTGCACCCCAGCTGCAAAGTGACCGCCATGAAGTGTTTCCT |
| | | GCTCGAGCTGCAGGTCATCAGCCTGGAGAGCGGCGACGCCAGCATCCACGATACCGTGGAGA |
| | | ACCTGATCATCCTGGCGAACAACAGCCTCAGCTCCAACGGAAATGTGACCGAGAGCGGCTGC |
| | | AAGGAGTGCGAGGAGCTGGAGGAAAAGAACATCAAAGAGTTCCTGCAGAGCTTCGTGCATAT |
| | | AGTGCAGATGTTCATTAACACCAGC |
| 968 | IL15Fc_RLI- | ATGGAGACGGACACCCTCCTCTTATGGGTCCTCCTCCTCTGGGTCCCCGGGAGCACCGGCGA |
| | CO15 | GCCCAAGTCCTGCGACAAGACCCACACCTGCCCGCCCTGCCCCGCCCCCGAGCTCTTAGGCG |
| | | GCCCCTCGGTATTCCTCTTCCCGCCCAAGCCGAAGGACACACTTATGATATCGAGGACCCCG |
| | | GAGGTCACCTGCGTAGTCGTCGCCGTATCCCACGAGGACCCGGAGGTCAAGTTCAACTGGTA |
| | | CGTCGACGGCGTCGAGGTCCACAACGCGAAGACGAAACCGAGGGAGGAGCAGTATAACAGCA |
| | | CTTACAGGGTGGTGTCCGTGCTGACCGTGCTGCACCAGGACTGGCTGAACGGGAAAGAGTAC |
| | | AAGTGCAAGGTCAGCAACAAGGCCCTGCCCGCCCCCATTGAGAAGACCATCAGCAAGGCCAA |
| | | GGGCCAGCCCAGGGAGCCCCAGGTGTACACCCTGCCCCCCTCCAGGGACGAGCTGACCAAGA |
| | | ATCAGGTGTCCCTGACCTGCCTCGTGAAAGGCTTCTACCCCAGCGACATCGCGGTGGAGTGG |
| | | GAGAGCAACGGCCAGCCGGAAAATAACTACAAGACCACCCCGCCCGTGCTGGACAGCGACGG |
| | | AAGCTTCTTCCTCTACAGCAAGCTGACCGTGGACAAGAGCAGGTGGCAGCAGGGCAACGTCT |
| | | TCAGCTGCTCCGTGATGCACGAGGCCCTGCACAACCACTACACCCAGAAAAGCCTCAGCCTG |
| | | AGCCCCGGGAAGATCACCTGTCCCCCACCCATGTCCGTGGAGCACGCCGACATTTGGGTGAA |
| | | AAGCTACAGCCTGTACTCCCGGGAGCGCTACATTTGCAACAGCGGCTTCAAAAGGAAGGCCG |
| | | GCACCTCCTCCCTGACGGAGTGCGTCCTGAACAAGGCCACGAACGTGGCCCACTGGACAACT |
| | | CCTAGCCTGAAGTGCATCAGGGATCCCGCACTGGTGCACCAGAGGCCCGCCCCACCCTCCGG |
| | | GGGCTCCGGAGGAGGCGGAAGCGGGGGAGGCTCGGGCGGCGGAGGCAGCCTGCAGAACTGGG |
| | | TCAACGTCATCAGCGACCTCAAGAAGATCGAGGACCTGATCCAGTCCATGCACATCGACGCC |
| | | ACCCTATACACCGAGAGTGATGTGCACCCCAGCTGCAAGGTCACAGCGATGAAGTGCTTCCT |
| | | GCTCGAGCTCCAGGTGATCAGCCTGGAAAGCGGCGACGCCTCCATCCACGACACCGTGGAGA |
| | | ATCTGATCATCCTGGCCAACAACAGCCTGAGCAGCAACGGCAACGTGACCGAGTCGGGTTGC |
| | | AAGGAGTGCGAGGAACTGGAGGAGAAGAATATAAAGGAGTTCCTGCAGAGCTTCGTCCATAT |
| | | CGTGCAGATGTTCATCAACACCTCC |
| 969 | IL15_Fc_RLI- | ATGGAGACTGACACGCTCCTCCTCTGGGTCCTCCTCCTCTGGGTCCCGGGCAGCACCGGCGA |
| | CO16 | GCCAAAGTCCTGCGACAAGACCCACACCTGCCCCCCGTGTCCGGCGCCAGAGCTCCTTGGGG |
| | | GGCCCTCCGTCTTCCTTTTCCCGCCCAAGCCCAAGGACACCCTCATGATCAGCCGCACACCG |
| | | GAGGTCACGTGTGTAGTCGTCGCCGTCTCCCACGAGGACCCGGAGGTTAAATTTAACTGGTA |
| | | CGTGGACGGCGTTGAGGTCCACAACGCCAAGACCAAACCCAGGGAGGAGCAGTACAACAGTA |
| | | CCTACCGGGTGGTCAGCGTGCTGACCGTGCTGCATCAGGACTGGCTGAACGGTAAGGAGTAC |
| | | AAGTGTAAAGTGAGCAACAAGGCCCTTCCAGCCCCCATCGAAAAGACCATCAGCAAGGCCAA |
| | | GGGTCAGCCGCGGGAGCCCCAGGTGTACACCCTGCCCCCCTCCAGGGATGAGCTGACCAAGA |
| | | ACCAAGTGTCCCTGACCTGTCTGGTGAAGGGCTTCTACCCGTCCGACATCGCGGTAGAGTGG |
| | | GAGTCCAACGGGCAGCCGGAGAACAACTACAAAACCACCCCACCCGTGCTGGACAGCGACGG |
| | | GAGCTTCTTCCTGTACTCAAAGCTGACGGTCGACAAGTCCAGGTGGCAGCAGGGCAATGTGT |
| | | TCAGCTGCAGCGTAATGCACGAGGCCCTGCACAACCATTACACTCAAAAGAGCCTCAGCCTG |
| | | AGCCCAGGCAAGATCACATGTCCCCCGCCCATGAGCGTGGAGCACGCCGACATCTGGGTGAA |
| | | GTCCTATAGCCTTTACTCCAGGGAAAGGTACATCTGTAACAGCGGCTTCAAGCGGAAGGCGG |
| | | GGACCAGCAGCCTGACCGAATGCGTCCTGAACAAGGCCACCAATGTCGCCCACTGGACTACC |
| | | CCCAGCCTGAAGTGTATCCGGGATCCCGCCCTGGTGCATCAGCGACCCGCCCCGCCCTCCGG |
| | | CGGTTCCGGGGGTGGCGGAAGCGGCGGAGGCTCCGGCGGTGGCGGATCCCTGCAGAACTGGG |
| | | TGAACGTGATCTCCGATCTGAAGAAGATCGAGGACCTGATCCAAAGCATGCACATCGACGCC |
| | | ACGCTCTACACAGAGAGCGACGTGCACCCCAGCTGCAAGGTCACCGCGATGAAATGCTTCCT |
| | | CCTGGAGCTGCAGGTGATCAGCCTGGAATCGGGGGACGCCAGCATCCACGACACCGTGGAGA |
| | | ACCTCATCATCCTCGCCAACAATAGCCTGAGCAGCAACGGCAACGTGACCGAATCCGGCTGC |
| | | AAGGAATGTGAGGAGCTGGAGGAGAAGAACATCAAAGAGTTCCTGCAGAGCTTCGTCCATAT |
| | | CGTGCAGATGTTCATCAACACCAGC |
| 970 | IL15_Fc_RLI- | ATGGAGACAGACACCTTGCTCCTCTGGGTCCTCCTCCTCTGGGTTCCGGGCAGCACGGGCGA |
| | CO17 | GCCCAAGAGCTGCGACAAAACCCATACGTGCCCTCCCTGCCCCGCCCCCGAGTTGCTCGGGG |
| | | GGCCCTCCGTATTCCTTTTCCCACCCAAGCCAAAGGACACCCTAATGATCAGCCGGACCCCC |
| | | GAAGTCACCTGCGTCGTTGTTGCCGTCTCCCACGAAGACCCCGAGGTCAAGTTCAACTGGTA |
| | | CGTCGACGGGGTCGAGGTACACAACGCCAAAACGAAGCCGAGGGAGGAGCAGTACAACTCCA |
| | | CCTACAGAGTGGTGTCCGTGCTGACGGTGCTGCACCAAGATTGGCTCAACGGGAAGGAGTAC |
| | | AAGTGCAAGGTGAGCAACAAAGCTCTGCCCGCCCCCATCGAAAAGACGATTAGCAAAGCCAA |
| | | GGGGCAGCCCAGGGAGCCCCAGGTCTACACGCTGCCTCCCAGCCGTGACGAACTGACCAAGA |
| | | ACCAGGTAAGCCTGACCTGTCTCGTGAAGGGCTTCTACCCCAGCGACATCGCCGTGGAGTGG |
| | | GAAAGCAACGGACAACCCGAAAACAACTACAAGACCACCCCACCCGTGCTCGACTCGGACGG |
| | | CAGCTTCTTCCTGTATAGCAAGCTGACCGTCGACAAGAGCAGGTGGCAGCAGGGCAATGTGT |
| | | TCAGCTGCTCGGTGATGCACGAAGCCCTCCACAACCACTACACCCAGAAAAGCCTGTCCCTC |
| | | AGCCCGGGCAAGATCACCTGCCCGCCGCCCATGTCCGTGGAGCACGCGGACATCTGGGTGAA |
| | | AAGCTACTCCCTGTACTCCAGGGAGAGGTATATCTGCAACAGCGGCTTCAAACGGAAGGCCG |
| | | GGACCAGCAGCCTGACGGAGTGCGTCCTGAACAAGGCCACCAACGTGGCCCATTGGACCACG |
| | | CCCTCGCTCAAGTGTATCAGGGACCCCGCCCTGGTGCACCAGAGGCCCGCCCCACCCTCCGG |
| | | AGGTTCCGGCGGAGGGGGCAGTGGCGGGGGCTCCGGCGGAGGTGGGAGCCTGCAGAACTGGG |
| | | TCAACGTGATCAGCGACCTGAAGAAGATCGAAGACCTGATACAGAGCATGCACATCGACGCC |
| | | ACCCTGTACACCGAGAGCGACGTCCACCCCAGCTGCAAGGTGACCGCCATGAAGTGCTTTCT |
| | | GCTGGAGCTGCAGGTGATCAGCCTCGAGTCCGGGGATGCCTCCATCCATGACACCGTGGAGA |
| | | ACCTGATAATCCTGGCCAATAATAGTCTGAGCAGCAACGGCAACGTGACCGAGAGCGGCTGC |
| | | AAGGAGTGCGAGGAGCTGGAAGAGAAGAACATCAAGGAGTTCCTGCAGTCCTTCGTGCATAT |
| | | AGTGCAGATGTTTATCAACACCAGC |
| 971 | IL15_Fc_RLI- | ATGGAAACGGATACCCTCCTCCTCTGGGTCCTTCTGCTCTGGGTCCCCGGCAGCACCGGCGA |
| | CO18 | GCCCAAGTCCTGCGACAAAACCCATACCTGCCCCCCGTGCCCCGCCCCCGAGCTCCTCGGCG |
| | | GCCCCAGCGTCTTCCTCTTCCCACCCAAGCCGAAGGATACGCTCATGATAAGCCGCACCCCC |
| | | GAGGTCACCTGCGTCGTTGTCGCCGTAAGCCACGAGGACCCCGAGGTCAAGTTCAACTGGTA |
| | | CGTAGACGGCGTCGAGGTCCACAACGCCAAGACCAAACCCAGAGAGGAGCAGTACAATAGCA |
| | | CCTACCGGGTCGTGAGCGTCCTGACCGTGCTCCACCAGGACTGGCTCAACGGGAAAGAGTAT |
| | | AAGTGCAAGGTTAGCAACAAGGCCCTGCCCGCACCCATCGAGAAGACCATTAGCAAGGCCAA |
| | | GGGGCAGCCCAGGGAGCCGCAGGTGTATACCCTCCCGCCCTCCCGCGATGAGCTCACCAAGA |
| | | ACCAGGTGAGCCTGACCTGCCTGGTGAAGGGCTTCTACCCCAGCGACATCGCCGTCGAGTGG |
| | | GAGAGCAACGGGCAGCCCGAGAACAACTACAAGACCACCCCACCCGTGCTGGATAGCGACGG |
| | | GAGCTTTTTTCTCTACAGCAAGCTGACCGTGGACAAGAGCAGGTGGCAGCAGGGGAACGTGT |
| | | TTAGCTGCAGCGTCATGCACGAAGCCCTGCACAACCATTATACGCAGAAGTCCCTGAGCCTG |
| | | TCCCCCGGCAAGATCACCTGCCCGCCCCCCATGTCGGTCGAGCACGCCGACATCTGGGTGAA |
| | | AAGCTATAGCCTGTACAGCCGCGAGAGGTACATCTGCAATTCCGGCTTCAAACGGAAGGCCG |
| | | GGACCTCCAGCCTGACCGAGTGCGTGCTTAACAAGGCCACTAACGTGGCCCATTGGACCACC |
| | | CCCAGCCTCAAGTGCATCAGGGACCCCGCCCTGGTGCACCAGAGGCCCGCCCCTCCGAGCGG |
| | | AGGCTCCGGAGGGGGCGGTAGCGGCGGTGGGAGCGGTGGGGGAGGTAGCCTGCAGAATTGGG |
| | | TGAACGTGATCAGCGACCTCAAAAAGATAGAGGACCTGATCCAGAGCATGCACATCGATGCC |
| | | ACCCTGTACACGGAGTCCGACGTGCACCCCAGCTGCAAGGTGACGGCCATGAAGTGCTTCCT |
| | | GCTGGAACTGCAGGTCATCAGCCTGGAGAGCGGCGACGCCAGCATCCACGATACCGTGGAAA |
| | | ATCTGATCATCCTGGCGAACAACAGTCTGTCAAGCAACGGCAACGTGACCGAGAGCGGGTGT |
| | | AAGGAATGCGAGGAGCTCGAAGAGAAGAATATCAAGGAGTTCCTGCAGAGCTTTGTGCATAT |
| | | CGTGCAGATGTTCATAAACACCAGC |
| 972 | IL15_Fc_RLI- | ATGGAAACCGACACGCTCCTCCTCTGGGTCCTCTTGCTCTGGGTCCCGGGCTCCACCGGGGA |
| | CO19 | GCCCAAGAGCTGCGACAAGACCCACACGTGCCCGCCCTGTCCGGCTCCAGAGCTCCTCGGCG |
| | | GCCCCAGCGTCTTCCTCTTCCCGCCCAAGCCCAAGGACACCCTCATGATCTCCCGGACCCCC |
| | | GAGGTCACCTGCGTCGTCGTAGCCGTCAGCCACGAGGATCCCGAGGTCAAGTTCAACTGGTA |
| | | CGTCGACGGCGTCGAGGTACACAACGCCAAGACCAAGCCCCGCGAGGAGCAGTACAATAGTA |
| | | CCTACAGGGTAGTGAGCGTCCTGACCGTCCTCCATCAAGACTGGCTGAACGGCAAGGAGTAT |
| | | AAATGCAAGGTCAGCAATAAGGCCCTGCCCGCCCCCATCGAGAAGACCATCTCCAAGGCCAA |
| | | GGGGCAGCCACGAGAGCCCCAGGTGTACACCCTGCCTCCCTCTAGGGACGAGCTCACAAAGA |
| | | ACCAAGTTAGCTTGACGTGCCTGGTGAAGGGGTTCTACCCCTCCGACATCGCCGTGGAGTGG |
| | | GAGAGCAACGGCCAACCGGAGAACAATTATAAGACCACCCCGCCCGTGCTGGACAGCGATGG |
| | | GAGCTTCTTTCTGTATTCAAAGCTGACCGTCGACAAGAGCAGGTGGCAGCAGGGTAACGTGT |
| | | TCAGCTGCAGTGTGATGCACGAGGCCCTGCACAACCACTACACCCAGAAAAGCCTGAGCCTG |
| | | AGCCCTGGCAAGATCACCTGTCCCCCGCCCATGAGCGTGGAGCACGCCGACATCTGGGTGAA |
| | | AAGCTACAGCCTGTACTCCAGGGAGAGGTATATCTGCAACAGCGGCTTCAAGAGGAAGGCCG |
| | | GAACATCAAGCCTGACCGAGTGCGTGCTGAACAAGGCCACCAACGTGGCCCACTGGACGACT |
| | | CCCTCCCTGAAATGCATCAGGGACCCCGCCCTAGTGCACCAAAGGCCCGCCCCGCCCTCGGG |
| | | AGGTAGTGGGGGCGGTGGGAGCGGGGGCGGGAGTGGCGGGGGCGGCTCGCTGCAGAACTGGG |
| | | TGAATGTTATCTCCGATCTGAAAAAGATCGAGGACCTCATCCAGAGCATGCACATCGACGCC |
| | | ACCCTCTACACTGAGAGCGATGTGCATCCCAGCTGCAAGGTGACCGCCATGAAGTGTTTCCT |
| | | GCTGGAGCTGCAAGTAATCAGCCTGGAGTCCGGCGACGCCAGCATCCACGACACCGTGGAGA |
| | | ATCTGATAATCCTGGCGAATAACAGCCTGAGTTCCAACGGGAACGTCACCGAAAGCGGCTGC |
| | | AAGGAGTGCGAGGAGCTGGAAGAGAAGAACATCAAGGAGTTCCTGCAGTCCTTTGTGCACAT |
| | | CGTGCAGATGTTCATCAACACCTCC |
| 973 | IL15_Fc_RLI- | ATGGAGACGGACACCCTCCTCCTCTGGGTACTCCTCCTCTGGGTCCCCGGCAGCACCGGGGA |
| | CO20 | GCCCAAGTCCTGCGACAAGACCCATACCTGCCCTCCCTGCCCGGCTCCCGAGCTCCTAGGGG |
| | | GTCCCTCCGTCTTCCTTTTTCCCCCGAAGCCTAAGGATACCCTCATGATTAGCCGCACGCCC |
| | | GAGGTCACGTGCGTTGTCGTCGCCGTAAGCCACGAAGACCCCGAGGTCAAGTTCAACTGGTA |
| | | CGTGGACGGGGTGGAGGTCCACAACGCGAAGACCAAGCCCCGGGAGGAGCAGTACAACTCCA |
| | | CCTACAGGGTGGTGAGTGTGCTGACGGTGCTGCACCAGGACTGGCTCAATGGGAAGGAGTAC |
| | | AAGTGCAAGGTGAGCAACAAAGCGCTGCCCGCCCCGATCGAAAAGACCATCTCCAAGGCGAA |
| | | GGGCCAGCCCAGGGAGCCCCAGGTGTACACCCTGCCCCCCTCCCGGGACGAGCTGACCAAAA |
| | | ACCAGGTCAGCCTGACCTGCCTCGTCAAGGGGTTTTACCCCAGCGACATCGCAGTGGAGTGG |
| | | GAAAGCAACGGCCAGCCCGAAAACAACTATAAGACCACCCCTCCCGTGCTGGACTCCGACGG |
| | | CAGCTTTTTCCTCTACTCTAAGCTCACCGTGGACAAAAGCAGGTGGCAGCAGGGGAACGTCT |
| | | TCAGCTGCTCCGTCATGCACGAGGCCCTCCACAACCACTACACCCAGAAAAGCCTGTCCCTC |
| | | TCCCCCGGGAAGATCACGTGCCCTCCCCCCATGAGCGTGGAACATGCCGACATCTGGGTGAA |
| | | GTCCTACAGCCTGTACAGCCGGGAAAGGTACATCTGCAACAGCGGCTTCAAGAGGAAGGCCG |
| | | GAACGTCCAGCCTGACGGAGTGCGTCCTGAATAAGGCCACCAACGTGGCCCATTGGACCACC |
| | | CCCAGCCTCAAATGTATAAGGGACCCCGCCCTTGTGCACCAAAGGCCCGCCCCGCCCTCCGG |
| | | CGGCTCGGGCGGCGGCGGAAGCGGAGGCGGTAGCGGCGGGGGCGGGAGCCTTCAGAACTGGG |
| | | TCAACGTGATCAGCGACCTGAAAAAGATCGAGGACCTGATCCAGAGCATGCACATCGACGCC |
| | | ACTCTGTACACCGAAAGCGATGTGCACCCCTCCTGCAAGGTGACCGCTATGAAGTGTTTTCT |
| | | GCTCGAGCTGCAGGTGATCTCCCTGGAGAGCGGCGACGCCAGCATCCACGACACCGTGGAGA |
| | | ACCTGATAATCCTGGCCAACAACAGCCTCAGCAGCAACGGGAACGTCACCGAGAGCGGCTGC |
| | | AAGGAGTGCGAAGAACTGGAGGAGAAAAACATCAAAGAGTTCCTGCAGAGCTTCGTGCACAT |
| | | CGTGCAGATGTTTATCAACACCAGC |
| 974 | IL15_Fc_RLI- | ATGGAGACTGACACCCTCCTCCTCTGGGTTCTTCTTTTGTGGGTCCCCGGTTCAACCGGGGA |
| | CO21 | GCCAAAGTCCTGCGATAAAACGCACACGTGCCCGCCCTGCCCCGCCCCGGAGCTCCTCGGCG |
| | | GGCCCTCGGTCTTCCTCTTCCCGCCCAAGCCGAAGGACACCCTCATGATCAGCCGGACCCCC |
| | | GAGGTCACCTGTGTCGTCGTGGCAGTTAGCCACGAGGACCCCGAAGTCAAGTTCAACTGGTA |
| | | CGTGGACGGCGTCGAGGTTCACAACGCCAAGACCAAGCCCAGGGAGGAGCAATACAACAGCA |
| | | CCTACAGGGTCGTCTCCGTGCTGACCGTGCTGCACCAGGACTGGCTGAACGGAAAAGAGTAT |
| | | AAGTGCAAGGTGAGCAACAAGGCCCTGCCAGCCCCGATCGAGAAGACCATAAGCAAGGCCAA |
| | | GGGCCAGCCCAGGGAGCCCCAGGTGTATACGCTCCCTCCCAGCCGGGATGAGCTGACCAAAA |
| | | ACCAGGTGTCCCTGACCTGCCTGGTGAAGGGCTTCTACCCCAGCGACATCGCCGTGGAATGG |
| | | GAGTCCAACGGACAGCCGGAGAACAACTACAAGACCACACCGCCCGTGCTGGACAGCGACGG |
| | | ATCATTCTTCCTGTACAGCAAGCTGACCGTGGACAAGAGCAGGTGGCAGCAGGGCAACGTGT |
| | | TCAGCTGCTCCGTGATGCACGAGGCGCTGCACAATCACTACACACAGAAGTCCCTGTCCCTC |
| | | AGCCCGGGCAAGATAACGTGCCCACCCCCCATGAGCGTGGAGCACGCCGATATCTGGGTGAA |
| | | GTCCTACAGCCTGTATAGCAGGGAGAGGTACATCTGCAACAGCGGCTTCAAGCGTAAGGCCG |
| | | GGACCTCCAGCCTCACCGAGTGCGTGCTGAACAAGGCCACCAACGTCGCCCACTGGACGACG |
| | | CCGTCCCTGAAATGTATAAGGGACCCGGCCCTCGTGCACCAAAGGCCCGCCCCACCTAGCGG |
| | | CGGGTCCGGGGGAGGGGGCAGCGGCGGGGGTTCAGGCGGGGGCGGCAGCCTGCAAAATTGGG |
| | | TAAACGTGATCTCCGACCTCAAGAAAATCGAGGATCTGATCCAGAGCATGCACATCGACGCC |
| | | ACCCTGTACACGGAGAGCGACGTACACCCCAGCTGCAAGGTGACCGCCATGAAGTGCTTCCT |
| | | GCTCGAGCTTCAAGTGATCAGCCTGGAGAGCGGCGACGCCAGCATCCACGACACCGTGGAGA |
| | | ACCTGATCATACTGGCCAATAACAGCCTGAGCAGCAACGGGAACGTGACCGAGAGCGGGTGC |
| | | AAGGAGTGCGAGGAGCTGGAGGAGAAGAACATCAAAGAGTTTCTGCAGTCCTTCGTGCACAT |
| | | CGTGCAGATGTTCATAAACACAAGC |
| 975 | IL15_Fc_RLI- | ATGGAAACCGATACCCTCCTCCTCTGGGTCCTCTTGCTCTGGGTCCCCGGCAGCACCGGGGA |
| | CO22 | GCCAAAGAGCTGCGACAAGACCCACACCTGCCCACCCTGCCCCGCCCCCGAGCTCCTCGGGG |
| | | GTCCTAGCGTCTTTCTCTTTCCCCCCAAACCCAAGGATACCCTCATGATCAGCAGGACCCCC |
| | | GAGGTCACGTGCGTCGTCGTCGCCGTCAGCCACGAAGACCCCGAGGTCAAGTTCAACTGGTA |
| | | CGTAGACGGAGTCGAGGTCCACAACGCGAAGACCAAACCCCGCGAGGAGCAGTACAACAGCA |
| | | CCTACCGTGTGGTGAGCGTGCTGACCGTGCTTCACCAGGATTGGCTCAATGGCAAGGAGTAT |
| | | AAGTGCAAGGTCAGCAACAAGGCCCTGCCCGCGCCCATCGAGAAGACCATCAGCAAGGCCAA |
| | | GGGGCAACCCAGGGAACCCCAGGTGTACACCCTGCCACCCAGCAGGGACGAGCTGACCAAGA |
| | | ACCAGGTGAGCCTGACCTGCTTAGTGAAAGGTTTCTACCCCAGCGACATCGCCGTGGAGTGG |
| | | GAGTCCAACGGGCAGCCCGAGAACAACTACAAAACCACCCCGCCGGTGCTGGACAGCGATGG |
| | | CAGCTTCTTCCTGTATAGCAAACTGACCGTGGACAAGAGCCGGTGGCAGCAGGGCAACGTCT |
| | | TCTCCTGCAGTGTGATGCACGAGGCCCTGCACAACCACTACACGCAGAAAAGCCTGTCCCTT |
| | | AGCCCCGGCAAGATCACCTGCCCGCCCCCCATGAGCGTGGAGCATGCCGACATATGGGTGAA |
| | | GTCCTACAGCCTCTACAGCCGGGAGAGGTATATCTGCAACAGCGGCTTTAAGAGGAAGGCGG |
| | | GGACCAGCTCCCTGACCGAATGCGTGCTGAACAAGGCCACCAACGTGGCGCACTGGACAACT |
| | | CCCAGCCTGAAGTGCATCAGGGACCCCGCCCTCGTGCACCAAAGGCCCGCCCCTCCCAGCGG |
| | | GGGTAGCGGGGGCGGGGGAAGCGGGGGCGGCAGCGGTGGTGGCGGAAGCCTTCAGAACTGGG |
| | | TGAACGTGATCTCCGATCTGAAAAAGATTGAAGATCTGATCCAGAGCATGCACATCGACGCA |
| | | ACCCTCTACACCGAGTCCGACGTCCATCCCTCCTGTAAGGTGACCGCGATGAAATGCTTTCT |
| | | GCTGGAGCTCCAGGTCATCTCGCTCGAGTCAGGCGACGCCAGCATCCACGATACCGTGGAAA |
| | | ATCTGATCATCCTGGCCAACAACAGCCTGAGCTCGAACGGGAATGTGACCGAGTCCGGGTGT |
| | | AAGGAGTGTGAGGAGCTGGAGGAGAAGAACATCAAGGAGTTCCTCCAGAGCTTCGTGCACAT |
| | | CGTGCAGATGTTCATCAACACCTCG |
| 976 | IL15_Fc_RLI- | ATGGAGACAGACACCCTCCTCCTCTGGGTCCTCCTCCTCTGGGTCCCCGGCAGCACCGGCGA |
| | CO23 | GCCGAAAAGCTGCGACAAGACCCACACGTGCCCGCCCTGCCCGGCCCCCGAGCTCCTCGGAG |
| | | GACCCAGCGTGTTCCTCTTCCCGCCCAAGCCCAAGGACACCCTCATGATCAGCCGCACCCCC |
| | | GAGGTCACCTGCGTTGTCGTAGCCGTCTCCCACGAGGACCCCGAGGTCAAGTTTAATTGGTA |
| | | CGTCGACGGCGTCGAAGTCCATAACGCCAAGACGAAGCCCAGGGAGGAGCAGTATAACAGCA |
| | | CGTATAGGGTGGTGAGCGTCCTGACCGTGCTGCACCAGGACTGGCTGAACGGCAAAGAGTAC |
| | | AAGTGCAAGGTATCCAACAAAGCCCTGCCTGCCCCCATCGAAAAGACGATCTCCAAGGCGAA |
| | | GGGCCAGCCCCGAGAGCCCCAGGTGTACACGCTGCCCCCGTCCAGGGACGAGCTCACCAAAA |
| | | ACCAGGTGAGCCTCACTTGCCTCGTGAAGGGGTTCTACCCCAGCGACATCGCCGTCGAGTGG |
| | | GAGTCCAATGGGCAGCCCGAGAACAACTACAAGACCACCCCACCCGTCCTGGACTCCGACGG |
| | | CTCATTCTTCCTGTATTCCAAGCTGACCGTGGACAAGTCCAGGTGGCAGCAAGGCAACGTCT |
| | | TCAGCTGCAGCGTCATGCACGAGGCCCTGCACAATCACTACACCCAGAAGTCACTGAGCCTG |
| | | TCCCCGGGGAAGATCACTTGTCCCCCGCCCATGTCCGTGGAGCACGCCGATATCTGGGTGAA |
| | | AAGCTACAGCCTGTACTCCCGCGAGAGGTACATCTGCAACTCCGGGTTCAAGCGGAAGGCCG |
| | | GCACCTCCAGCCTGACCGAGTGCGTGCTGAACAAGGCCACCAACGTGGCCCACTGGACCACC |
| | | CCGAGCCTGAAATGTATAAGGGATCCCGCGCTCGTGCACCAGAGGCCGGCCCCTCCTTCGGG |
| | | GGGCAGCGGGGGTGGCGGCTCAGGCGGCGGGTCCGGGGGTGGCGGGAGCCTGCAAAACTGGG |
| | | TGAACGTGATAAGCGACCTGAAGAAGATCGAGGACCTCATCCAGTCGATGCACATCGACGCC |
| | | ACCCTGTACACCGAGAGCGATGTGCACCCCAGCTGCAAGGTGACCGCCATGAAATGCTTCCT |
| | | CCTGGAGCTGCAGGTGATCTCCCTGGAGAGCGGCGACGCCTCCATCCACGACACGGTGGAGA |
| | | ACCTGATCATCCTGGCCAACAATTCGCTCTCCAGCAACGGCAACGTGACCGAGAGCGGGTGC |
| | | AAGGAGTGCGAGGAGCTGGAGGAGAAAAACATTAAGGAGTTCCTGCAATCCTTCGTGCATAT |
| | | AGTCCAGATGTTCATTAACACCAGC |
| 977 | IL15_Fc_RLI- | ATGGAGACGGACACCCTCCTCCTCTGGGTCCTCCTCCTCTGGGTCCCCGGGAGCACGGGCGA |
| | CO24 | GCCCAAGAGCTGCGACAAGACCCACACCTGCCCGCCCTGCCCCGCCCCCGAGCTCCTCGGCG |
| | | GCCCATCCGTCTTCCTCTTCCCGCCCAAGCCCAAGGACACCCTCATGATCAGCAGGACCCCC |
| | | GAGGTCACCTGCGTCGTCGTTGCCGTCAGCCACGAGGACCCGGAGGTCAAATTCAACTGGTA |
| | | CGTTGACGGGGTGGAGGTCCACAACGCCAAGACCAAGCCCCGCGAGGAGCAGTACAATTCTA |
| | | CATACCGGGTGGTGTCCGTGCTCACCGTCCTGCACCAGGATTGGCTGAACGGAAAAGAATAC |
| | | AAGTGCAAAGTGAGCAACAAGGCGCTGCCCGCCCCCATCGAGAAGACCATCTCCAAGGCCAA |
| | | GGGCCAGCCCAGGGAACCACAGGTGTACACCCTGCCCCCCAGTAGGGACGAGCTCACCAAGA |
| | | ACCAGGTCAGCCTGACCTGCCTGGTGAAGGGATTCTACCCCTCCGACATAGCCGTCGAGTGG |
| | | GAGTCCAACGGGCAGCCGGAGAATAACTACAAGACCACCCCGCCCGTGCTCGATAGCGACGG |
| | | CTCCTTCTTCCTGTACAGCAAGCTGACAGTGGACAAGAGCAGGTGGCAGCAGGGCAATGTGT |
| | | TCTCCTGTTCCGTGATGCACGAGGCCCTCCACAACCACTACACCCAGAAGTCCCTGTCCCTG |
| | | AGCCCCGGCAAGATCACTTGCCCACCCCCCATGAGCGTCGAGCACGCCGACATATGGGTGAA |
| | | AAGCTACAGCCTGTACTCCCGGGAGAGGTACATCTGTAACTCGGGGTTCAAAAGGAAGGCGG |
| | | GCACCTCCTCCCTGACCGAGTGTGTTCTGAACAAGGCCACCAACGTGGCCCACTGGACCACC |
| | | CCCTCTCTGAAGTGTATCAGGGACCCGGCCCTCGTCCATCAGCGTCCCGCCCCTCCCTCCGG |
| | | AGGCAGCGGCGGAGGGGGATCAGGGGGCGGCAGCGGCGGTGGGGGGAGCCTGCAGAACTGGG |
| | | TGAACGTCATCAGCGACCTGAAGAAGATCGAGGATCTGATACAGAGCATGCACATCGACGCC |
| | | ACCCTGTACACGGAAAGCGACGTGCACCCCTCCTGTAAGGTGACCGCCATGAAGTGCTTCCT |
| | | CCTTGAGCTCCAGGTGATCAGCCTGGAGAGCGGCGACGCCAGCATCCACGACACCGTGGAGA |
| | | ACCTGATCATCCTGGCCAACAATTCACTGAGCTCTAACGGCAATGTCACCGAGTCGGGCTGC |
| | | AAGGAGTGCGAGGAGCTCGAGGAGAAGAACATCAAGGAGTTCCTGCAGTCCTTCGTGCACAT |
| | | CGTACAGATGTTCATCAATACCAGC |
| 978 | IL15_Fc_RLI- | ATGGAGACAGACACCCTCCTACTCTGGGTCCTCCTCCTCTGGGTCCCCGGCAGCACCGGGGA |
| | CO25 | ACCCAAAAGCTGCGACAAGACACATACCTGTCCTCCGTGCCCCGCCCCCGAGCTCCTCGGCG |
| | | GGCCCTCCGTCTTCCTCTTCCCGCCCAAGCCCAAGGATACGCTCATGATCAGCCGGACTCCC |
| | | GAGGTCACGTGTGTTGTCGTCGCCGTTAGCCACGAGGACCCCGAAGTCAAGTTCAACTGGTA |
| | | CGTCGACGGCGTCGAGGTCCACAACGCCAAGACCAAGCCCAGGGAGGAGCAGTACAACAGCA |
| | | CCTACAGGGTGGTTTCGGTGCTGACCGTGCTGCACCAGGATTGGCTGAACGGCAAGGAGTAC |
| | | AAGTGCAAGGTGAGCAACAAGGCCCTGCCCGCCCCCATCGAGAAGACCATCAGCAAAGCCAA |
| | | GGGGCAACCAAGGGAGCCCCAGGTCTACACCCTCCCGCCCAGCCGCGACGAGCTGACTAAGA |
| | | ACCAGGTGAGCCTGACCTGCCTGGTGAAGGGCTTTTACCCCAGCGACATCGCGGTGGAATGG |
| | | GAGAGCAACGGCCAGCCCGAGAACAACTATAAGACCACCCCGCCCGTGCTGGACAGCGACGG |
| | | AAGCTTCTTCCTCTACAGCAAGCTGACCGTGGACAAGAGCCGGTGGCAGCAGGGCAATGTGT |
| | | TCAGCTGCTCAGTGATGCACGAGGCCCTGCACAATCACTACACCCAGAAGTCGCTGAGCCTG |
| | | AGCCCGGGAAAGATCACATGCCCGCCCCCCATGAGCGTGGAACACGCAGACATCTGGGTGAA |
| | | AAGCTACTCCCTGTACAGCAGGGAAAGGTACATCTGCAACTCCGGCTTCAAGAGGAAGGCCG |
| | | GCACCAGCTCCCTGACCGAGTGCGTGCTGAATAAGGCCACCAATGTGGCCCATTGGACGACG |
| | | CCCAGCCTCAAATGTATCCGAGATCCCGCTTTGGTGCACCAGAGGCCCGCCCCGCCGTCCGG |
| | | CGGCTCCGGGGGCGGCGGAAGCGGGGGTGGAAGCGGCGGCGGCGGGTCCCTTCAGAACTGGG |
| | | TGAATGTGATCTCCGACCTCAAGAAGATCGAGGACCTGATCCAGAGCATGCACATCGACGCC |
| | | ACGCTCTACACCGAATCCGACGTGCACCCCAGCTGCAAGGTTACCGCCATGAAGTGCTTCCT |
| | | CCTGGAGCTGCAGGTGATCAGTCTGGAGAGCGGCGATGCCAGCATCCACGATACCGTGGAAA |
| | | ACCTTATCATCCTGGCCAACAACTCCCTGAGCTCCAACGGGAATGTGACCGAGAGCGGGTGC |
| | | AAGGAGTGCGAGGAACTCGAGGAGAAGAACATCAAGGAATTTCTGCAAAGCTTCGTGCACAT |
| | | AGTGCAGATGTTCATCAACACGTCC |

[1918] Modified nucleotide sequences encoding IL15 polypeptides: In some embodiments, the IL15 polynucleotide (e.g., a RNA, e.g., an mRNA) comprises a chemically modified nucleobase, e.g., 5-methoxyuracil. In some embodiments, the mRNA is a uracil-modified sequence comprising an ORF encoding an IL15 polypeptide, IL15Ra polypeptide, or both IL15 and IL15Ra polypeptides, wherein the mRNA comprises a chemically modified nucleobase, e.g., 5-methoxyuracil.

[1919] In certain aspects of the disclosure, when the 5-methoxyuracil base is connected to a ribose sugar, as it is in polynucleotides, the resulting modified nucleoside or nucleotide is referred to as 5-methoxyuridine. In some embodiments, uracil in the IL15 polynucleotide is at least about 25%, at least about 30%, at least about 40%, at least about 50%, at least about 60%, at least about 70%, at least about 80%, at least 90%, at least 95%, at least 99%, or about 100% 5-methoxyuracil. In one embodiment, uracil in the IL15 polynucleotide is at least 95% 5-methoxyuracil. In another embodiment, uracil in the IL15 polynucleotide is 100% 5-methoxyuracil.

[1920] In embodiments where uracil in the 1115 polynucleotide is at least 95% 5-methoxyuracil, overall uracil content can be adjusted such that an mRNA provides suitable protein expression levels while inducing little to no immune response. In some embodiments, the uracil content of the ORF (% U_{TM}) is between about 105% and about 145%, about 105% and about 140%, about 110% and about 140%, about 110% and about 145%, about 115% and about 135%, about 105% and about 135%, about 110% and about 135%, about 115% and about 145%, or about 115% and about 140%. In other embodiments, the uracil content of the ORF is between about 117% and about 134% or between 118% and 132% of the % U_{TM}. In some embodiments, the % U_{TM} is about 115%, about 120%, about 125%, about 130%, about 135%, about 140%, about 145%, or about 150%. In this context, the term “uracil” can refer to 5-methoxyuracil and/or naturally occurring uracil.

[1921] In some embodiments, the uracil content in the ORF of the mRNA encoding an IL15Rα polypeptide, a IL15 polypeptide, or both IL15Rα and IL15 polypeptides of the disclosure is less than about 50%, about 40%, about 30%, or about 20% of the total nucleobase content in the ORF. In some embodiments, the uracil content in the ORF is between about 15% and about 25% of the total nucleobase content in the ORF. In other embodiments, the uracil content in the ORF is between about 20% and about 30% of the total nucleobase content in the ORF. In one embodiment, the uracil content in the ORF of the mRNA encoding an IL15Rα polypeptide, a IL15 polypeptide, or both IL15Rα and IL15 polypeptides is less than about 20% of the total nucleobase content in the open reading frame. In this context, the term “uracil” can refer to 5-methoxyuracil and/or naturally occurring uracil.

[1922] In further embodiments, the ORF of the mRNA encoding an IL15Rα polypeptide, a IL15 polypeptide, or both IL15Rα and IL15 polypeptides having 5-methoxyuracil and adjusted uracil content has increased Cytosine (C), Guanine (G), or Guanine/Cytosine (G/C) content (absolute or relative). In some embodiments, the overall increase in C, G, or G/C content (absolute or relative) of the ORF is at least about 2%, at least about 3%, at least about 4%, at least about 5%, at least about 6%, at least about 7%, at least about 10%, at least about 15%, at least about 20%, at least about 40%, at least about 50%, at least about 60%, at least about 70%, at least about 80%, at least about 90%, at least about 95%, or at least about 100% relative to the G/C content (absolute or relative) of the wild-type ORF. In some embodiments, the G, the C, or the G/C content in the ORF is less than about 100%, less than about 90%, less than about 85%, or less than about 80% of the theoretical maximum G, C, or G/C content of the corresponding wild-type nucleotide sequence encoding the IL15Rα polypeptide, IL15 polypeptide, or both IL15Rα and IL15 polypeptides (% G_{TMX}; % C_{TMX}, or % G/C_{TMX}). In other embodiments, the G, the C, or the G/C content in the ORF is between about 70% and about 80%, between about 71% and about 79%, between about 71% and about 78%, or between about 71% and about 77% of the % G_{TMX}, % C_{TMX}, or % G/C_{TMX}. In some embodiments, the increases in G and/or C content (absolute or relative) described herein can be conducted by replacing synonymous codons with low G, C, or G/C content with synonymous codons having higher G, C, or G/C content. In other embodiments, the increase in G and/or C content (absolute or relative) is conducted by replacing a codon ending with U with a synonymous codon ending with G or C.

[1923] In further embodiments, the ORF of the mRNA encoding an IL15Rα polypeptide, a IL15 polypeptide, or both IL15Rα and IL15 polypeptides of the disclosure comprises 5-methoxyuracil and has an adjusted uracil content containing less uracil pairs (UU) and/or uracil triplets (UUU) and/or uracil quadruplets (UUUU) than the corresponding wild-type nucleotide sequence encoding the IL15Rα polypeptide, IL15 polypeptide, or both IL15Rα and IL15 polypeptides. In some embodiments, the ORF of the mRNA encoding an IL15Rα polypeptide, a IL15 polypeptide, or both IL15Rα and IL15 polypeptides of the disclosure contains no uracil pairs and/or uracil triplets and/or uracil quadruplets. In some embodiments, uracil pairs and/or uracil triplets and/or uracil quadruplets are reduced below a certain threshold, e.g., no more than 1, 2, 3, 4, 5, 6, 7, 8, 9, 10, 11, 12, 13, 14, 15, 16, 17, 18, 19, or 20 occurrences in the ORF of the mRNA encoding the IL15Rα polypeptide, IL15 polypeptide, or both IL15Rα and IL15 polypeptides. In a particular embodiment, the ORF of the mRNA encoding the IL15Rα polypeptide, IL15 polypeptide, or both IL15Rα and IL15 polypeptides of the disclosure contains less than 20, 19, 18, 17, 16, 15, 14, 13, 12, 11, 10, 9, 8, 7, 6, 5, 4, 3, 2, or 1 non-phenylalanine uracil pairs and/or triplets. In another embodiment, the ORF of the mRNA encoding the IL15Rα polypeptide, IL15 polypeptide, or both IL15Rα and IL15 polypeptides contains no non-phenylalanine uracil pairs and/or triplets.

[1924] In further embodiments, the ORF of the mRNA encoding an IL15Rα polypeptide, a IL15 polypeptide, or both IL15Rα and IL15 polypeptides of the disclosure comprises 5-methoxyuracil and has an adjusted uracil content containing less uracil-rich clusters than the corresponding wild-type nucleotide sequence encoding the IL15Rα polypeptide, a IL15 polypeptide, or both IL15Rα and IL15 polypeptides. In some embodiments, the ORF of the mRNA encoding the IL15Rα polypeptide, IL15 polypeptide, or both IL15Rα and IL15 polypeptides of the disclosure contains uracil-rich clusters that are shorter in length than corresponding uracil-rich clusters in the corresponding wild-type nucleotide sequence encoding the IL15Rα polypeptide, IL15 polypeptide, or both IL15Rα and IL15 polypeptides.

[1925] In further embodiments, alternative lower frequency codons are employed. At least about 5%, at least about 10%, at least about 15%, at least about 20%, at least about 25%, at least about 30%, at least about 35%, at least about 40%, at least about 45%, at least about 50%, at least about 55%, at least about 60%, at least about 65%, at least about 70%, at least about 75%, at least about 80%, at least about 85%, at least about 90%, at least about 95%, at least about 99%, or 100% of the codons in the IL15Rα polypeptide, IL15 polypeptide, or both IL15Rα and IL15 polypeptides-encoding ORF of the 5-methoxyuracil-comprising mRNA are substituted with alternative codons, each alternative codon having a codon frequency lower than the codon frequency of the substituted codon in the synonymous codon set. The ORF also has adjusted uracil content, as described above. In some embodiments, at least one codon in the ORF of the mRNA encoding the IL15Rα polypeptide, IL15 polypeptide, or both IL15Rα and IL15 polypeptides is substituted with an alternative codon having a codon frequency lower than the codon frequency of the substituted codon in the synonymous codon set.

[1926] In some embodiments, the adjusted uracil content, IL15Rα polypeptide, IL15 polypeptide, or both IL15Rα and IL15 polypeptides-encoding ORF of the 5-methoxyuracil-comprising mRNA exhibits expression levels of IL15 and/or IL15Rα when administered to a mammalian cell that are higher than expression levels of IL15 and/or IL15Rα from the corresponding wild-type mRNA. In other embodiments, the expression levels of IL15 and/or IL15Rα when administered to a mammalian cell are increased relative to a corresponding mRNA containing at least 95% 5-methoxyuracil and having a uracil content of about 160%, about 170%, about 180%, about 190%, or about 200% of the theoretical minimum.

[1927] In yet other embodiments, the expression levels of IL15 and/or IL15Rα when administered to a mammalian cell are increased relative to a corresponding mRNA, wherein at least about 50%, at least about 60%, at least about 70%, at least about 80%, at least about 90%, or about 100% of uracils are 1-methylpseudouracil or pseudouracils. In some embodiments, the mammalian cell is a mouse cell, a rat cell, or a rabbit cell. In other embodiments, the mammalian cell is a monkey cell or a human cell. In some embodiments, the human cell is a HeLa cell, a BJ fibroblast cell, or a peripheral blood mononuclear cell (PBMC). In some embodiments, IL15 and/or IL15Rα is expressed when the mRNA is administered to a mammalian cell in vivo. In some embodiments, the mRNA is administered to mice, rabbits, rats, monkeys, or humans. In one embodiment, mice are null mice. In some embodiments, the mRNA is administered to mice in an amount of about 0.01 mg/kg, about 0.05 mg/kg, about 0.1 mg/kg, or about 0.15 mg/kg. In some embodiments, the mRNA is administered intravenously or intramuscularly. In other embodiments, the IL15 and/or IL15Rα polypeptide is expressed when the mRNA is administered to a mammalian cell in vitro. In some embodiments, the expression is increased by at least about 2-fold, at least about 5-fold, at least about 10-fold, at least about 50-fold, at least about 500-fold, at least about 1500-fold, or at least about 3000-fold. In other embodiments, the expression is increased by at least about 10%, about 20%, about 30%, about 40%, about 50%, 60%, about 70%, about 80%, about 90%, or about 100%.

[1928] In some embodiments, adjusted uracil content, IL15Rα polypeptide, IL15 polypeptide, or both IL15Rα and IL15 polypeptides-encoding ORF of the 5-methoxyuracil-comprising mRNA exhibits increased stability. In some embodiments, the mRNA exhibits increased stability in a cell relative to the stability of a corresponding wild-type mRNA under the same conditions. In some embodiments, the IL15 mRNA exhibits increased stability including resistance to nucleases, thermal stability, and/or increased stabilization of secondary structure. In some embodiments, increased stability exhibited by the IL15 mRNA is measured by determining the half-life of the mRNA (e.g., in a plasma, cell, or tissue sample) and/or determining the area under the curve (AUC) of the protein expression by the mRNA over time (e.g., in vitro or in vivo). An mRNA is identified as having increased stability if the half-life and/or the AUC is greater than the half-life and/or the AUC of a corresponding wild-type mRNA under the same conditions.

[1929] In some embodiments, the IL15 mRNA of the present disclosure induces a detectably lower immune response (e.g., innate or acquired) relative to the immune response induced by a corresponding wild-type mRNA under the same conditions. In other embodiments, the mRNA of the present disclosure induces a detectably lower immune response (e.g., innate or acquired) relative to the immune response induced by an mRNA that encodes for an IL15 polypeptide, IL15Rα polypeptide, or both IL15 and IL15Rα polypeptides but does not comprise 5-methoxyuracil under the same conditions, or relative to the immune response induced by an mRNA that encodes for an IL15Rα polypeptide, IL15 polypeptide, or both IL15Rα and IL15 polypeptides and that comprises 5-methoxyuracil but that does not have adjusted uracil content under the same conditions. The innate immune response can be manifested by increased expression of pro-inflammatory cytokines, activation of intracellular PRRs (RIG-I, MDA5, etc), cell death, and/or termination or reduction in protein translation. In some embodiments, a reduction in the innate immune response can be measured by expression or activity level of Type 1 interferons (e.g., IFN-α, IFN-β, IFN-κ, IFN-δ, IFN-ε, IFN-τ, IFN-ω, and IFN-ζ) or the expression of interferon-regulated genes such as the toll-like receptors (e.g., TLR7 and TLR8), and/or by decreased cell death following one or more administrations of the mRNA of the disclosure into a cell.

[1930] In some embodiments, the expression of Type-1 interferons by a mammalian cell in response to the mRNA of the present disclosure is reduced by at least 10%, 20%, 30%, 40%, 50%, 60%, 70%, 80%, 90%, 95%, 99%, 99.9%, or greater than 99.9% relative to a corresponding wild-type mRNA, to an mRNA that encodes an IL15Rα polypeptide, IL15 polypeptide, or both IL15Rα and IL15 polypeptides but does not comprise 5-methoxyuracil, or to an mRNA that encodes an IL15Rα polypeptide, IL15 polypeptide, or both IL15Rα and IL15 polypeptides and that comprises 5-methoxyuracil but that does not have adjusted uracil content. In some embodiments, the interferon is IFN-β. In some embodiments, cell death frequency cased by administration of mRNA of the present disclosure to a mammalian cell is 10%, 25%, 50%, 75%, 85%, 90%, 95%, or over 95% less than the cell death frequency observed with a corresponding wild-type mRNA, an mRNA that encodes for an IL15Rα polypeptide, IL15 polypeptide, or both IL15Rα and IL15 polypeptides but does not comprise 5-methoxyuracil, or an mRNA that encodes for an IL15Rα polypeptide, IL15 polypeptide, or both IL15Rα and IL15 polypeptides and that comprises 5-methoxyuracil but that does not have adjusted uracil content. In some embodiments, the mammalian cell is a BJ fibroblast cell. In other embodiments, the mammalian cell is a splenocyte. In some embodiments, the mammalian cell is that of a mouse or a rat. In other embodiments, the mammalian cell is that of a human. In one embodiment, the mRNA of the present disclosure does not substantially induce an innate immune response of a mammalian cell into which the mRNA is introduced.

[1931] In some embodiments, the IL15 polynucleotide is an mRNA that comprises an ORF that encodes an IL15Rα polypeptide, IL15 polypeptide, or both IL15Rα and IL15 polypeptides, wherein uracil in the mRNA is at least about 95% 5-methoxyuracil, wherein the uracil content of the ORF is between about 115% and about 135% of the theoretical minimum uracil content in the corresponding wild-type ORF, and wherein the uracil content in the ORF encoding the IL15Rα polypeptide, IL15 polypeptide, or both IL15Rα and IL15 polypeptides is less than about 30% of the total nucleobase content in the ORF. In some embodiments, the ORF that encodes the IL15Rα polypeptide, IL15 polypeptide, or both IL15Rα and IL15 polypeptides is further modified to increase G/C content of the ORF (absolute or relative) by at least about 40%, as compared to the corresponding wild-type ORF. In yet other embodiments, the ORF encoding the IL15Rα polypeptide, IL15 polypeptide, or both IL15Rα and IL15 polypeptides contains less than 20 non-phenylalanine uracil pairs and/or triplets.

[1932] In some embodiments, at least one codon in the ORF of the mRNA encoding the IL15Rα polypeptide, IL15 polypeptide, or both IL15Rα and IL15 polypeptides is further substituted with an alternative codon having a codon frequency lower than the codon frequency of the substituted codon in the synonymous codon set. In some embodiments, the expression of the IL15Rα polypeptide, IL15 polypeptide, or both IL15Rα and IL15 polypeptides encoded by an mRNA comprising an ORF wherein uracil in the mRNA is at least about 95% 5-methoxyuracil, and wherein the uracil content of the ORF is between about 115% and about 135% of the theoretical minimum uracil content in the corresponding wild-type ORF, is increased by at least about 10-fold when compared to expression of the IL15Rα polypeptide, IL15 polypeptide, or both IL15Rα and IL15 polypeptides from the corresponding wild-type mRNA. In some embodiments, the mRNA comprises an open ORF wherein uracil in the mRNA is at least about 95% 5-methoxyuracil, and wherein the uracil content of the ORF is between about 115% and about 135% of the theoretical minimum uracil content in the corresponding wild-type ORF, and wherein the mRNA does not substantially induce an innate immune response of a mammalian cell into which the mRNA is introduced.

[1933] Polynucleotide comprising an mRNA encoding an IL15 and/or IL15Rα polypeptide: In certain embodiments, an IL15 polynucleotide of the present disclosure, for example a polynucleotide comprising an mRNA nucleotide sequence encoding an IL15 polypeptide, IL15Rα polypeptide, or both IL15 and IL15Rα polypeptides, comprises from 5′ to 3′ end:
[1934] (i) a 5′ UTR, such as the sequences provided below, comprising a 5′ cap provided below;
[1935] (ii) an open reading frame encoding an IL15 polypeptide, IL15Rα polypeptide, or both IL15 and IL15Rα polypeptides, e.g., a sequence optimized nucleic acid sequence encoding IL15 and/or IL15Rα disclosed herein;
[1936] (iii) at least one stop codon;
[1937] (iv) a 3′ UTR, such as the sequences provided below; and
[1938] (v) a poly-A tail provided below.

[1939] In some embodiments, the IL15 polynucleotide further comprises a miRNA binding site, e.g, a miRNA binding site that binds to miRNA-122. In some embodiments, the 3′UTR comprises the miRNA binding site.

[1940] In some embodiments, an IL15 polynucleotide of the present disclosure comprises a nucleotide sequence encoding a polypeptide sequence at least 70%, at least 80%, at least 81%, at least 82%, at least 83%, at least 84%, at least 85%, at least 86%, at least 87%, at least 88%, at least 89%, at least 90%, at least 91%, at least 92%, at least 93%, at least 94%, at least 95%, at least 96%, at least 97%, at least 98%, at least 99%, or 100% identical to the protein sequence of a wild-type IL15 and/or IL15Rα polypeptide.

[1941] Compositions and formulations for use comprising IL15 polynucleotides: Certain aspects of the present disclosure are directed to compositions or formulations comprising any of the 1115 polynucleotides disclosed above.

[1942] In some embodiments, the composition or formulation comprises:
[1943] (i) an IL15 polynucleotide (e.g., a RNA, e.g., an mRNA) comprising a sequence-optimized nucleotide sequence (e.g., an ORF) encoding an IL15 polypeptide, IL15Rα polypeptide, or both IL15 and IL15Rα polypeptides (e.g., the wild-type sequence, functional fragment, or variant thereof), wherein the IL15 polynucleotide comprises at least one chemically modified nucleobase, e.g., 5-methoxyuracil (e.g., wherein at least about 25%, at least about 30%, at least about 40%, at least about 50%, at least about 60%, at least about 70%, at least about 80%, at least about 90%, at least about 95%, at least about 99%, or 100% of the uracils are 5-methoxyuracils), and wherein the 1115 polynucleotide further comprises a miRNA binding site, e.g., a miRNA binding site that binds to miR-122 (e.g., a miR-122-3p or miR-122-5p binding site); and
[1944] (ii) a delivery agent comprising a compound having Formula (I), e.g., any of Compounds 1-147 (e.g., Compound 18, 25, 26 or 48).

[1945] In some embodiments, the uracil or thymine content of the ORF relative to the theoretical minimum uracil or thymine content of a nucleotide sequence encoding the IL15 polypeptide, IL15Rα polypeptide, or both IL15 and IL15Rα polypeptides (% U_{TM} or % T_{TM}), is between about 100% and about 150%.

[1946] In some embodiments, the IL15 polynucleotides, compositions or formulations above are used to treat and/or prevent cell proliferation-related diseases, disorders or conditions, e.g., cancer.

### F. Interleukin-23 (IL23)

[1947] In some embodiments, the combination therapies disclosed herein comprise one or more IL23 polynucleotides (e.g., mRNAs), i.e., polynucleotides comprising one or more ORFs encoding an IL23 polypeptide.

[1948] Interleukin-23 (IL23) is a pro-inflammatory cytokine that plays an important role in innate and adaptive immunity. Croxford A L et al., Eur. J. Immunol. 42:2263-2273 (2012). It functions primarily as a 60 kDa heterodimeric protein consisting of disulfide-linked p19 (IL23A) and p40 (IL23B) subunits. IL23 is structurally and functionally similar to the pro-inflammatory cytokine IL12. IL23 contains the same p40 subunit as IL12, but includes the p19 subunit (“p19”) rather than IL12's p35. Oppman B et al., Immunity 13(5):715-725 (2000).

[1949] The precursor form of p19 (NP 057668; NM_016584; Q9NPF7; also referred to as IL23A and IL23 subunit alpha) is 189 amino acids in length, while its mature form is 170 amino acids long. The precursor form of the p40 subunit (NM 002187; P29460; also referred to as IL12B, natural killer cell stimulatory factor 2, and cytotoxic lymphocyte maturation factor 2) is 328 amino acids in length, while its mature form is 306 amino acids long.

[1950] Many different immune cells, including dendritic cells and macrophages, produce IL23 upon antigenic stimuli. Vignali D A A and Kuchroo V K, Nat. Immunol. 13(8):722-728 (2014). One difference between IL12 and IL23 is that IL12 is associated with the development and activity of Th1 T cell populations, while IL23 is associated with the development and activity of Th17 T cell populations. Id.

[1951] There has also been interest in the role of IL23 in anti-tumor immunity, as initial studies demonstrated it could play a role similar to that of IL12. Croxford AL et al., Eur. J. Immunol. 42:2263-2273 (2012). Results in such inquiries, however, have provided mixed results, with some studies indicating a potential pro-tumorigenic function for IL23. Id. Therefore, there is a need for an improved therapeutic approach to using IL23 to treat tumors.

[1952] IL23 is composed of a bundle of four alpha helices. It is a heterodimeric cytokine encoded by two separate genes, IL23A (p19) and IL12B (p40). The active heterodimer is formed following protein synthesis. Therefore, in some embodiments, the IL23 polypeptide disclosed herein comprises a single polypeptide chain comprising the IL12B and IL23A fused directly or by a linker. In other embodiments, the IL23 polypeptide comprises two polypeptides, the first polypeptide comprising IL12B and the second polypeptide comprising IL23A.

[1953] In certain embodiments, the present disclosure provides an IL23A polypeptide and an IL12B polypeptide, wherein the IL23A and IL12B polypeptides are on the same chain or different chains. In some embodiments, the IL23A or IL12B polypeptide is a variant, a peptide or a polypeptide containing a substitution, and insertion and/or an addition, a deletion and/or a covalent modification with respect to a wild-type IL23A or IL12B sequence.

[1954] In some embodiments, sequence tags or amino acids, can be added to the sequences encoded by the IL23 polynucleotides disclosed herein (e.g., at the N-terminal or C-terminal ends), e.g., for localization. In some embodiments, amino acid residues located at the carboxy, amino terminal, or internal regions of an IL23 polypeptide of the disclosure can optionally be deleted providing for fragments.

[1955] In some embodiments, the IL23A and/or IL12B polypeptide encoded by the IL23 polynucleotide (e.g., a RNA, e.g., a mRNA) comprises a substitutional variant of an IL23A and/or IL12B sequence, which can comprise one, two, three or more than three substitutions. In some embodiments, the substitutional variant can comprise one or more conservative amino acids substitutions. In other embodiments, the variant is an insertional variant. In other embodiments, the variant is a deletional variant.

[1956] In other embodiments, the IL23A and/or ILT2B polypeptide encoded by the IL23 polynucleotide (e.g., a RNA, e.g., a mRNA) comprises a linker fusing the IL23A and IL2B polypeptides. Non-limiting examples of linkers are disclosed elsewhere herein.

[1957] As recognized by those skilled in the art, ILT2B and/or VL23A protein fragments, functional protein domains, variants, and homologous proteins (orthologs) are also considered to be within the scope of the disclosure. Nonlimiting examples of polypeptides encoded by the IL23 polynucleotides of the present disclosure are shown in TABLE 12 and FIGS. 115A to 116C.

TABLE 12
Sequences of IL23 polypeptides and IL23 polynucleotides

| SEQ | | | |
|---|---|---|---|
| ID | | | |
| NO | Description | Sequence | Comments |
| 979 | IL12B, | MCHQQLVISWFSLVFLASPLVAIWELKKDVYVVELDWYPDAPGEMVVLTCDTPEED | Signal peptide |
| | Interleukin- | GITWTLDQSSEVLGSGKTLTIQVKEFGDAGQYTCHKGGEVLSHSLLLLHKKEDGIW | is underlined. |
| | 12 subunit | STDILKDQKEPKNKTFLRCEAKNYSGRFTCWWLTTISTDLTFSVKSSRGSSDPQGV | |
| | beta, wt. | TCGAATLSAERVRGDNKEYEYSVECQEDSACPAAEESLPIEVMVDAVHKLKYENYT | |
| | Protein | SSFFIRDIIKPDPPKNLQLKPLKNSRQVEVSWEYPDTWSTPHSYFSLTFCVQVQGK | |
| | sequence. | SKREKKDRVFTDKTSATVIC RKNASISVRAQDRYYSSSWSEWASVPCS | |
| 980 | IL12B, | ATGTGTCACCAGCAGTTGGTCATCTCTTGGTTTTCCCTGGTTTTTCTGGCATCTCC | Underlined |
| | Interleukin- | CCTCGTGGCCATATGGGAACTGAAGAAAGATGTTTATGTCGTAGAATTGGATTGGT | nucleobases |
| | 12 subunit | ATCCGGATGCCCCTGGAGAAATGGTGGTCCTCACCTGTGACACCCCTGAAGAAGAT | indicate region |
| | beta, wt. | GGTATCACCTGGACCTTGGACCAGAGCAGTGAGGTCTTAGGCTCTGGCAAAACCCT | encoding the |
| | Nucleic | GACCATCCAAGTCAAAGAGTTTGGAGATGCTGGCCAGTACACCTGTCACAAAGGAG | signal peptide |
| | acid | GCGAGGTTCTAAGCCATTCGCTCCTGCTGCTTCACAAAAAGGAAGATGGAATTTGG | (1-66) |
| | sequence. | TCCACTGATATTTTAAAGGACCAGAAAGAACCCAAAAATAAGACCTTTCTAAGATG | |
| | | CGAGGCCAAGAATTATTCTGGACGTTTCACCTGCTGGTGGCTGACGACAATCAGTA | |
| | | CTGATTTGACATTCAGTGTCAAAAGCAGCAGAGGCTCTTCTGACCCCCAAGGGGTG | |
| | | ACGTGCGGAGCTGCTACACTCTCTGCAGAGAGAGTCAGAGGGGACAACAAGGAGTA | |
| | | TGAGTACTCAGTGGAGTGCCAGGAGGACAGTGCCTGCCCAGCTGCTGAGGAGAGTC | |
| | | TGCCCATTGAGGTCATGGTGGATGCCGTTCACAAGCTCAAGTATGAAAACTACACC | |
| | | AGCAGCTTCTTCATCAGGGACATCATCAAACCTGACCCACCCAAGAACTTGCAGCT | |
| | | GAAGCCATTAAAGAATTCTCGGCAGGTGGAGGTCAGCTGGGAGTACCCTGACACCT | |
| | | GGAGTACTCCACATTCCTACTTCTCCCTGACATTCTGCGTTCAGGTCCAGGGCAAG | |
| | | AGCAAGAGAGAAAAGAAAGATAGAGTCTTCACGGACAAGACCTCAGCCACGGTCAT | |
| | | CTGCCGCAAAAATGCCAGCATTAGCGTGCGGGCCCAGGACCGCTACTATAGCTCAT | |
| | | CTTGGAGCGAATGGGCATCTGTGCCCTGCAGT | |
| 981 | IL23A, | MLGSRAVMLLLLLPWTAQGRAVPGGSSPAWTQCQQLSQKLCTLAWSAHPLVGHMDL | Signal peptide |
| | Interleukin- | REEGDEETTNDVPHIQCGDGCDPQGLRDNSQFCLQRIHQGLIFYEKLLGSDIFTGE | is underlined. |
| | 23 subunit | PSLLPDSPVGQLHASLLGLSQLLQPEGHHWETQQIPSLSPSQPWQRLLLRFKILRS | |
| | alpha, wt. | LQAFVAVAARVFAHGAATLSP | |
| | Protein | | |
| | sequence. | | |
| 982 | IL23A, | ATGCTGGGGAGCAGAGCTGTAATGCTGCTGTTGCTGCTGCCCTGGACAGCTCAGGG | Underlined |
| | Interleukin- | CAGAGCTGTGCCTGGGGGCAGCAGCCCTGCCTGGACTCAGTGCCAGCAGCTTTCAC | nucleobases |
| | 23 subunit | AGAAGCTCTGCACACTGGCCTGGAGTGCACATCCACTAGTGGGACACATGGATCTA | indicate region |
| | alpha, wt. | AGAGAAGAGGGAGATGAAGAGACTACAAATGATGTTCCCCATATCCAGTGTGGAGA | encoding the |
| | Nucleic | TGGCTGTGACCCCCAAGGACTCAGGGACAACAGTCAGTTCTGCTTGCAAAGGATCC | signal peptide |
| | acid | ACCAGGGTCTGATTTTTTATGAGAAGCTGCTAGGATCGGATATTTTCACAGGGGAG | (1-66) |
| | sequence. | CCTTCTCTGCTCCCTGATAGCCCTGTGGGCCAGCTTCATGCCTCCCTACTGGGCCT | |
| | | CAGCCAACTCCTGCAGCCTGAGGGTCACCACTGGGAGACTCAGCAGATTCCAAGCC | |
| | | TCAGTCCCAGCCAGCCATGGCAGCGTCTCCTTCTCCGCTTCAAAATCCTTCGCAGC | |
| | | CTCCAGGCCTTTGTGGCTGTAGCCGCCCGGGTCTTTGCCCATGGAGCAGCAACCCT | |
| | | GAGTCCC | |
| 983 | Human | MCHQQLVISWFSLVFLASPLVAIWELKKDVYVVELDWYPDAPGEMVVLTCDTPEED | Signal peptide |
| | IL12B- | GITWTLDQSSEVLGSGKTLTIQVKEFGDAGQYTCHKGGEVLSHSLLLLHKKEDGIW | (1-22), |
| | Linker- | STDILKDQKEPKNKTFLRCEAKNYSGRFTCWWLTTISTDLTFSVKSSRGSSDPQGV | italicized; |
| | IL23A | TCGAATLSAERVRGDNKEYEYSVECQEDSACPAAEESLPIEVMVDAVHKLKYENYT | IL12B mature |
| | Fusion | SSFFIRDIIKPDPPKNLQLKPLKNSRQVEVSWEYPDTWSTPHSYFSLTFCVQVQGK | chain (23-328), |
| | Protein. | [chemical structure] | underlined; FS |
| | Protein | [chemical structure] | linker (329- |
| | sequence | [chemical structure] | 335), bold; |
| | | [chemical structure] | IL23A mature |
| | | [chemical structure] | chain (336- |
| | | | 505), dotted |
| | | | underline. |
| 984 | Human | ATGTGTCACCAGCAGTTGGTCATCTCTTGGTTTTCCCTGGTTTTTCTGGCATCTCC | Underlined |
| | IL12B- | CCTCGTGGCCATATGGGAACTGAAGAAAGATGTTTATGTCGTAGAATTGGATTGGT | nucleobases |
| | Linker- | ATCCGGATGCCCCTGGAGAAATGGTGGTCCTCACCTGTGACACCCCTGAAGAAGAT | indicate region |
| | IL23A | GGTATCACCTGGACCTTGGACCAGAGCAGTGAGGTCTTAGGCTCTGGCAAAACCCT | encoding the |
| | Fusion | GACCATCCAAGTCAAAGAGTTTGGAGATGCTGGCCAGTACACCTGTCACAAAGGAG | signal peptide |
| | Protein. | GCGAGGTTCTAAGCCATTCGCTCCTGCTGCTTCACAAAAAGGAAGATGGAATTTGG | (1-57) |
| | Nucleic | TCCACTGATATTTTAAAGGACCAGAAAGAACCCAAAAATAAGACCTTTCTAAGATG | |
| | acid | CGAGGCCAAGAATTATTCTGGACGTTTCACCTGCTGGTGGCTGACGACAATCAGTA | |
| | sequence. | CTGATTTGACATTCAGTGTCAAAAGCAGCAGAGGCTCTTCTGACCCCCAAGGGGTG | |
| | | ACGTGCGGAGCTGCTACACTCTCTGCAGAGAGAGTCAGAGGGGACAACAAGGAGTA | |
| | | TGAGTACTCAGTGGAGTGCCAGGAGGACAGTGCCTGCCCAGCTGCTGAGGAGAGTC | |
| | | TGCCCATTGAGGTCATGGTGGATGCCGTTCACAAGCTCAAGTATGAAAACTACACC | |
| | | AGCAGCTTCTTCATCAGGGACATCATCAAACCTGACCCACCCAAGAACTTGCAGCT | |
| | | GAAGCCATTAAAGAATTCTCGGCAGGTGGAGGTCAGCTGGGAGTACCCTGACACCT | |
| | | GGAGTACTCCACATTCCTACTTCTCCCTGACATTCTGCGTTCAGGTCCAGGGCAAG | |
| | | AGCAAGAGAGAAAAGAAAGATAGAGTCTTCACGGACAAGACCTCAGCCACGGTCAT | |
| | | CTGCCGCAAAAATGCCAGCATTAGCGTGCGGGCCCAGGACCGCTACTATAGCTCAT | |
| | | CTTGGAGCGAATGGGCATCTGTGCCCTGCAGTGGCGGCGGCGGCGGCGGAAGCAGA | |
| | | GCTGTGCCTGGGGGCAGCAGCCCTGCCTGGACTCAGTGCCAGCAGCTTTCACAGAA | |
| | | GCTCTGCACACTGGCCTGGAGTGCACATCCACTAGTGGGACACATGGATCTAAGAG | |
| | | AAGAGGGAGATGAAGAGACTACAAATGATGTTCCCCATATCCAGTGTGGAGATGGC | |
| | | TGTGACCCCCAAGGACTCAGGGACAACAGTCAGTTCTGCTTGCAAAGGATCCACCA | |
| | | GGGTCTGATTTTTTATGAGAAGCTGCTAGGATCGGATATTTTCACAGGGGAGCCTT | |
| | | CTCTGCTCCCTGATAGCCCTGTGGGCCAGCTTCATGCCTCCCTACTGGGCCTCAGC | |
| | | CAACTCCTGCAGCCTGAGGGTCACCACTGGGAGACTCAGCAGATTCCAAGCCTCAG | |
| | | TCCCAGCCAGCCATGGCAGCGTCTCCTTCTCCGCTTCAAAATCCTTCGCAGCCTCC | |
| | | AGGCCTTTGTGGCTGTAGCCGCCCGGGTCTTTGCCCATGGAGCAGCAACCCTGAGT | |
| | | CCC | |

[1958] IL23 polynucleotides and open reading frames (ORFs): In some embodiments, the present disclosure provides IL23 polynucleotides (e.g., a RNA, e.g., a mRNA) that comprise a nucleotide sequence (e.g., an ORE) encoding one or more ILT2B and/or IL23A polypeptides. In some embodiments, the IL23 polynucleotide (e.g., a RNA, e.g., a mRNA) encodes a single IL23 polypeptide chain comprising an ILT2B polypeptide and a IL23A polypeptide, which are fused directly or by a linker, wherein the ILT2B polypeptide is selected from:
[1959] (i) the full-length ILT2B polypeptide (e.g., having the same or essentially the same length as wild-type ILT2B3);
[1960] (ii) a functional fragment of the IL12B polypeptide (e.g., a truncated (e.g., deletion of carboxy, amino terminal, or internal regions) sequence shorter than an IL12B wild-type; but still retaining IL12B activity);
[1961] (iii) a variant thereof (e.g., full length or truncated IL12B polypeptide in which one or more amino acids have been replaced, e.g., variants that retain all or most of the IL12B activity of the polypeptide with respect to the wild-type IL12B); or
[1962] (iv) a fusion protein comprising (i) a full-length 12B wild-type, a functional fragment or a variant thereof, and (ii) a heterologous protein; and/or wherein the IL23A is selected from:
[1963] (i) the full-length IL23A polypeptide (e.g., having the same or essentially the same length as wild-type IL23A);
[1964] (ii) a functional fragment of the IL23A polypeptide (e.g., a truncated (e.g., deletion of carboxy, amino terminal, or internal regions) sequence shorter than a IL23A wild-type; but still retaining IL23A activity);
[1965] (iii) a variant thereof (e.g., full length or truncated IL23A polypeptide in which one or more amino acids have been replaced, e.g., variants that retain all or most of the IL23A activity of the polypeptide with respect to the wild-type IL23A); or
[1966] (iv) a fusion protein comprising (i) a full-length IL23A wild-type, a functional fragment or a variant thereof, and (ii) a heterologous protein.

[1967] In other embodiments, the IL23 polynucleotide (e.g., a RNA, e.g., a mRNA) encodes two polypeptide chains, the first chain comprising an IL12B polypeptide and the second chain comprising a IL23A polypeptide, wherein the IL12B polypeptide is selected from:
[1968] (i) the full-length IL12B polypeptide (e.g., having the same or essentially the same length as wild-type IL12B);
[1969] (ii) a functional fragment of the IL12B polypeptide (e.g., a truncated (e.g., deletion of carboxy, amino terminal, or internal regions) sequence shorter than an IL12B wild-type; but still retaining IL12B activity);
[1970] (iii) a variant thereof (e.g., full length or truncated IL12B polypeptide in which one or more amino acids have been replaced, e.g., variants that retain all or most of the IL12B activity of the polypeptide with respect to the wild-type IL12B); or
[1971] (iv) a fusion protein comprising (i) a full-length 12B wild-type, a functional fragment or a variant thereof, and (ii) a heterologous protein; and/or wherein the IL23A is selected from:
[1972] (i) the full-length IL23A polypeptide (e.g., having the same or essentially the same length as wild-type IL23A);
[1973] (ii) a functional fragment of the IL23A polypeptide (e.g., a truncated (e.g., deletion of carboxy, amino terminal, or internal regions) sequence shorter than a IL23A wild-type; but still retaining IL23A activity);
[1974] (iii) a variant thereof (e.g., full length or truncated IL23A polypeptide in which one or more amino acids have been replaced, e.g., variants that retain all or most of the IL23A activity of the polypeptide with respect to the wild-type IL23A); or
[1975] (iv) a fusion protein comprising (i) a full-length IL23A wild-type, a functional fragment or a variant thereof, and (ii) a heterologous protein.

[1976] In certain embodiments, the IL23 polynucleotide (e.g., a RNA, e.g., a mRNA) encodes a mammalian IL23 polypeptide, such as human IL23 polypeptide, a functional fragment or a variant thereof.

[1977] In some embodiments, the IL23 polynucleotide (e.g., a RNA, e.g., a mRNA) increases IL12B, IL23A, and/or IL23 protein expression levels and/or activity in cells when introduced in those cells, e.g., by at least 10%, at least 15%, at least 20%, at least 25%, at least 30%, at least 35%, at least 40%, at least 45%, at least 50%, at least 55%, at least 60%, at least 65%, at least 70%, at least 75%, at least 80%, at least 85%, at least 90%, at least 95%, or at least 100%, compared to IL12B, IL23A, and/or IL23 protein expression levels and/or activity in the cells prior to the administration of the IL23 polynucleotide. IL12B, IL23A, and/or IL23 protein expression levels and/or activity can be measured according to methods known in the art. In some embodiments, the IL23 polynucleotide is introduced to the cells in vitro. In some embodiments, the IL23 polynucleotide is introduced to the cells in vivo.

[1978] In some embodiments, the IL23 polynucleotide (e.g., a RNA, e.g., a mRNA) comprises a nucleotide sequence (e.g., an ORF) that encodes a wild-type human IL12B polypeptide (SEQ ID NO: 979), a wild-type human IL23A polypeptide (SEQ ID NO: 981), or a wild-type human single-chain IL23 polypeptide (SEQ ID NO: 983).

[1979] In some embodiments, the IL23 polynucleotide (e.g., a RNA, e.g., a mRNA) comprises a sequence optimized nucleic acid sequence, wherein the open reading frame (ORF) of the sequence optimized nucleic sequence is derived from a wild-type IL12B or a wild-type IL23A sequence.

[1980] In some embodiments, the IL23 polynucleotide (e.g., a RNA, e.g., a mRNA) comprises a nucleotide sequence encoding an IL12B polypeptide and/or an IL23A polypeptide having the full length sequence of human IL12B and/or IL23A polypeptide IL23 (i.e., including the initiator methionine). In mature human IL12B and/or IL23A, the initiator methionine and/or signal peptide can be removed to yield a “mature IL12B” and/or “mature IL23A” comprising amino acid residues of SEQ ID NO: 979 and SEQ ID NO: 981, respectively. The teachings of the present disclosure directed to the full sequence of human IL12B and/or IL23A are also applicable to the mature form of human IL12B and/or IL23A lacking the initiator methionine and/or signal peptide. Thus, in some embodiments, the IL23 polynucleotide (e.g., a RNA, e.g., a mRNA) comprises a nucleotide sequence (e.g., ORF) encoding IL12B and/or IL23A having the mature sequence of human IL12B and/or IL23A. In some embodiments, the IL23 polynucleotide (e.g., a RNA, e.g., a mRNA) comprising a nucleotide sequence (e.g., ORF) encoding IL12B and/or IL23A is sequence optimized.

[1981] In some embodiments, the IL23 polynucleotide (e.g., a RNA, e.g., a mRNA) comprises a nucleotide sequence (e.g., an ORF) encoding a mutant IL12B and/or IL23A polypeptide. In some embodiments, the IL23 polynucleotide (e.g., a RNA, e.g., a mRNA) comprises an ORF encoding an IL12B and/or IL23A polypeptide that comprises at least one point mutation in the IL12B and/or IL23A sequence and retains IL12B and/or IL23A activity. In some embodiments, the mutant IL12B and/or IL23A polypeptide has an IL12B and/or IL23A activity which is at least 10%, at least 15%, at least 20%, at least 25%, at least 30%, at least 35%, at least 40%, at least 45%, at least 50%, at least 55%, at least 60%, at least 65%, at least 70%, at least 75%, at least 80%, at least 85%, at least 90%, at least 95%, or at least 100% of the IL12B and/or IL23A activity of the corresponding wild-type IL12B and/or IL23A (i.e., the same IL12B and/or IL23A isoform but without the mutation(s)). In some embodiments, the IL23 polynucleotide (e.g., a RNA, e.g., a mRNA) comprising an ORF encoding a mutant IL12B and/or IL23A polypeptide is sequence optimized.

[1982] In some embodiments, the IL23 polynucleotide (e.g., a RNA, e.g., a mRNA) comprises a nucleotide sequence (e.g., an ORF) that encodes an IL12B and/or IL23A polypeptide with mutations that do not alter IL12B and/or IL23A activity. Such mutant IL12B and/or IL23A polypeptides can be referred to as function-neutral. In some embodiments, the IL23 polynucleotide comprises an ORF that encodes a mutant IL12B and/or IL23A polypeptide comprising one or more function-neutral point mutations.

[1983] In some embodiments, the mutant IL12B and/or IL23A polypeptide has higher IL12B and/or IL23A activity than the corresponding wild-type IL12B and/or IL23A. In some embodiments, the mutant IL12B and/or IL23A polypeptide has an IL12B and/or IL23A activity that is at least 10%, at least 15%, at least 20%, at least 25%, at least 30%, at least 35%, at least 40%, at least 45%, at least 50%, at least 55%, at least 60%, at least 65%, at least 70%, at least 75%, at least 80%, at least 85%, at least 90%, at least 95%, or at least 100% higher than the activity of the corresponding wild-type IL12B and/or IL23A (i.e., the same IL12B and/or IL23A isoform but without the mutation(s)).

[1984] In some embodiments, the IL23 polynucleotide (e.g., a RNA, e.g., a mRNA) comprises a nucleotide sequence (e.g., an ORF) encoding a functional IL12B and/or IL23A fragment, e.g., where one or more fragments correspond to a polypeptide subsequence of a wild type IL12B and/or IL23A polypeptide and retain IL12B and/or IL23A activity. In some embodiments, the IL12B and/or IL23A fragment has an IL12B and/or IL23A activity which is at least 10%, at least 15%, at least 20%, at least 25%, at least 30%, at least 35%, at least 40%, at least 45%, at least 50%, at least 55%, at least 60%, at least 65%, at least 70%, at least 75%, at least 80%, at least 85%, at least 90%, at least 95%, or at least 100% of the IL12B and/or IL23A activity of the corresponding full length IL12B and/or IL23A. In some embodiments, the IL23 polynucleotide (e.g., a RNA, e.g., a mRNA) comprising an ORF encoding a functional IL12B and/or IL23A fragment is sequence optimized.

[1985] In some embodiments, the IL23 polynucleotide (e.g., a RNA, e.g., a mRNA) comprises a nucleotide sequence (e.g., an ORF) encoding an IL12B and/or IL23A fragment that has higher IL12B and/or IL23A enzymatic activity than the corresponding full length IL23. Thus, in some embodiments the IL12B and/or IL23A fragment has an IL12B and/or IL23A activity which is at least 10%, at least 15%, at least 20%, at least 25%, at least 30%, at least 35%, at least 40%, at least 45%, at least 50%, at least 55%, at least 60%, at least 65%, at least 70%, at least 75%, at least 80%, at least 85%, at least 90%, at least 95%, or at least 100% higher than the IL12B and/or IL23A activity of the corresponding full length IL12B and/or IL23A polypeptide.

[1986] In some embodiments, the IL 23 polynucleotide (e.g., a RNA, e.g., a mRNA) comprises a nucleotide sequence (e.g., an ORF) encoding an IL12B and/or IL23A fragment that is at least 1%, 2%, 3%, 4%, 5%, 6%, 7%, 8%, 9%, 10, 1%, 12%, 13%, 14%, 15%, 16%, 17%, 18%, 19%, 20%, 21%, 22%, 23%, 24% or 25% shorter than wild-type isoform 1, 2, 3, or 4 of IL12B and/or IL23A.

[1987] In some embodiments, the ORF encoding a IL23A polypeptide has: (i) at least 91%, at least 92%, at least 93%, at least 94%, at least 95%, at least 96%, at least 97%, at least 98%, at least 99%, or 100% sequence identity to nucleotides 1006 to 1515 of IL23-CO05, IL23-CO18, IL23-CO07, IL23-CO15, IL23-CO20, or IL23-CO17; (ii) at least 90%, at least 91%, at least 92%, at least 93%, at least 94%, at least 95%, at least 96%, at least 97%, at least 98%, at least 99%, or 100% sequence identity to nucleotides 1006 to 1515 of IL23-CO02, IL23-CO06, IL23-CO10, IL23-CO23, IL23-CO16, or IL23-CO21; (iii) at least 89%, at least 90%, at least 91%, at least 92%, at least 93%, at least 94%, at least 95%, at least 96%, at least 97%, at least 98%, at least 99%, or 100% sequence identity to nucleotides 1006 to 1515 of IL23-CO01, IL23-CO24, IL23-CO13, or IL23-CO14; (iv) at least 88%, at least 89%, at least 90%, at least 91%, at least 92%, at least 93%, at least 94%, at least 95%, at least 96%, at least 97%, at least 98%, at least 99%, or 100% sequence identity to nucleotides 1006 to 1515 of IL23-CO03, IL23-CO1 1, IL23-CO12, IL23-CO04, IL23-CO25, or IL23-CO22; or (v) at least 87%, at least 88%, at least 89%, at least 90%, at least 91%, at least 92%, at least 93%, at least 94%, at least 95%, at least 96%, at least 97%, at least 98%, at least 99%, or 100% sequence identity to nucleotides 1006 to 1515 of IL23-CO09, IL23-CO19, or IL23-CO08;

[1988] In some embodiments, the ORF encoding an IL12B polypeptide has:
[1989] (i) at least 91%, at least 92%, at least 93%, at least 94%, at least 95%, at least 96%, at least 97%, at least 98%, at least 99%, or 100% sequence identity to nucleotides 67 to 984 of IL23-CO04, IL23-CO05, IL23-CO10, IL23-CO12, IL23-CO18, IL23-CO19, IL23-CO22, IL23-CO24, or IL23-CO25;
[1990] (ii) at least 90%, at least 91%, at least 92%, at least 93%, at least 94%, at least 95%, at least 96%, at least 97%, at least 98%, at least 99%, or 100% sequence identity to nucleotides 67 to 984 of IL23-CO01, IL23-CO02, IL23-CO20, IL23-CO21, or IL23-CO23;
[1991] (iii) at least 89%, at least 90%, at least 91%, at least 92%, at least 93%, at least 94%, at least 95%, at least 96%, at least 97%, at least 98%, at least 99%, or 100% sequence identity to nucleotides 67 to 984 of IL23-CO03, IL23-CO06, IL23-CO08, IL23-CO09, IL23-CO11, IL23-CO14, IL23-CO16, or IL23-CO17; or
[1992] (iv) at least 88%, at least 89%, at least 90%, at least 91%, at least 92%, at least 93%, at least 94%, at least 95%, at least 96%, at least 97%, at least 98%, at least 99%, or 100% sequence identity to nucleotides 67 to 984 of IL23-CO07, IL23-CO13, or IL23-CO15.

[1993] In some embodiments, the IL23 polynucleotide (e.g., a RNA, e.g., a mRNA) comprises a nucleotide sequence (e.g., an ORF) encoding an IL12B and/or IL23A polypeptide (e.g., the wild-type sequence, functional fragment, or variant thereof), wherein the % U_{TM} or % T_{TM} of the nucleotide sequence is between about 100% and about 190% or any one of the ranges disclosed herein and wherein the nucleotide sequence has at least 70%, at least 71%, at least 72%, at least 73%, at least 74%, at least 75%, at least 76%, at least 77%, at least 78%, at least 79%, at least 80%, at least 81%, at least 82%, at least 83%, at least 84%, at least 85%, at least 86%, at least 87%, at least 88%, at least 89%, at least 90%, at least 91%, at least 92%, at least 93%, at least 94%, at least 95%, at least 96%, at least 97%, at least 98%, at least 99%, or 100% sequence identity to a sequence selected from the group consisting of SEQ ID NOs: 985-1009. See TABLE 13.

[1994] In some embodiments, the IL23 polynucleotide (e.g., a RNA, e.g., a mRNA) comprises a nucleotide sequence (e.g., an ORF) encoding an IL12B and/or IL23A polypeptide (e.g., the wild-type sequence, functional fragment, or variant thereof), wherein the % U_{TM} or % T_{TM} of the nucleotide sequence is between about 100% and about 190% or any one of the ranges disclosed herein and wherein the nucleotide sequence has 70% to 100%, 75% to 100%, 80% to 100%, 85% to 100%, 70% to 95%, 80% to 95%, 70% to 85%, 75% to 90%, 80% to 95%, 70% to 75%, 75% to 80%, 80% to 85%, 85% to 90%, 90% to 95%, or 95% to 100%, sequence identity to a sequence selected from the group consisting of SEQ ID NOs: 985-1009. See TABLE 13.

[1995] In some embodiments, the IL23 polynucleotide (e.g., a RNA, e.g., a mRNA) comprises a nucleotide sequence (e.g., an ORF) encoding an IL12B and/or IL23A polypeptide (e.g., the wild-type sequence, functional fragment, or variant thereof), wherein the % U_{TM} or % T_{TM} of the nucleotide sequence is between about 100% and about 190% or any one of the ranges disclosed herein and wherein the nucleotide sequence encodes an amino acid sequence having at least 75%, at least 76%, at least 77%, at least 78%, at least 79%, least 80%, at least 81%, at least 82%, at least 83%, at least 84%, at least 85%, at least 86%, at least 87%, at least 88%, at least 89%, at least 90%, at least 91%, at least 92%, at least 93%, at least 94%, at least 95%, at least 96%, at least 97%, at least 98%, at least 99%, or 100% sequence identity to the sequence of SEQ ID NOs: 979, 981, or 983.

[1996] In some embodiments, the IL23 polynucleotide (e.g., a RNA, e.g., a mRNA) comprises from about 400 to about 100,000 nucleotides (e.g., from 400 to 1,000, from 400 to 1,100, from 400 to 1,200, from 400 to 1,300, from 400 to 1,400, from 400 to 1,500, from 500 to 1,100, from 500 to 1,100, from 500 to 1,200, from 500 to 1,300, from 500 to 1,400, from 500 to 1,500, from 567 to 1,200, from 567 to 1,400, from 567 to 1,600, from 567 to 1,800, from 567 to 2,000, from 567 to 3,000, from 567 to 5,000, from 567 to 7,000, from 567 to 10,000, from 567 to 25,000, from 567 to 50,000, from 567 to 70,000, or from 567 to 100,000).

[1997] In some embodiments, the IL23 polynucleotide (e.g., a RNA, e.g., a mRNA) comprises a nucleotide sequence (e.g., an ORF) encoding an IL12B and/or IL23A polypeptide (e.g., the wild-type sequence, functional fragment, or variant thereof), wherein the length of the nucleotide sequence (e.g., an ORF) is at least 400 nucleotides in length (e.g., at least or greater than about 400, 500, 600, 700, 80, 900, 1,000, 1,050, 1,083, 1,100, 1,200, 1,300, 1,400, 1,500, 1,600, 1,700, 1,800, 1,900, 2,000, 2,100, 2,200, 2,300, 2,400, 2,500, 2,600, 2,700, 2,800, 2,900, 3,000, 3,100, 3,200, 3,300, 3,400, 3,500, 3,600, 3,700, 3,800, 3,900, 4,000, 4,100, 4,200, 4,300, 4,400, 4,500, 4,600, 4,700, 4,800, 4,900, 5,000, 5,100, 5,200, 5,300, 5,400, 5,500, 5,600, 5,700, 5,800, 5,900, 6,000, 7,000, 8,000, 9,000, 10,000, 20,000, 30,000, 40,000, 50,000, 60,000, 70,000, 80,000, 90,000 or up to and including 100,000 nucleotides).

[1998] In some embodiments, the IL23 polynucleotide (e.g., a RNA, e.g., a mRNA) comprises a nucleotide sequence (e.g., an ORF) encoding an IL12B and/or IL23A polypeptide (e.g., the wild-type sequence, functional fragment, or variant thereof) further comprises at least one nucleic acid sequence that is noncoding, e.g., a miRNA binding site.

[1999] In some embodiments, the IL23 polynucleotide (e.g., a RNA, e.g., a mRNA) comprises a nucleotide sequence (e.g., an ORF) encoding an IL12B and/or IL23A polypeptide is single stranded or double stranded.

[2000] In some embodiments, the 1123 polynucleotide comprising a nucleotide sequence (e.g., an ORF) encoding an IL12B and/or IL23A polypeptide (e.g., the wild-type sequence, functional fragment, or variant thereof) is DNA or RNA. In some embodiments, the IL23 polynucleotide is RNA. In some embodiments, the polynucleotide of the disclosure is, or functions as, a messenger RNA (mRNA). In some embodiments, the mRNA comprises a nucleotide sequence (e.g., an ORF) that encodes at least one IL12B and/or IL23A polypeptide, and is capable of being translated to produce the encoded IL12B and/or IL23A polypeptide in vitro, in vivo, in situ or ex vivo.

[2001] In some embodiments, the IL23 polynucleotide (e.g., a RNA, e.g., a mRNA) comprises a sequence-optimized nucleotide sequence (e.g., an ORF) encoding an IL12B and/or IL23A polypeptide (e.g., the wild-type sequence, functional fragment, or variant thereof), wherein the polynucleotide comprises at least one chemically modified nucleobase, e.g., 5-methoxyuracil. In some embodiments, the polynucleotide further comprises a miRNA binding site, e.g., a miRNA binding site that binds to miR-122. In some embodiments, the polynucleotide disclosed herein is formulated with a delivery agent, e.g., a compound having Formula (I), e.g., any of Compounds 1-147.

[2002] The IL23 polynucleotide (e.g., a RNA, e.g., a mRNA) can also comprise nucleotide sequences that encode additional features that facilitate trafficking of the encoded polypeptides to therapeutically relevant sites. One such feature that aids in protein trafficking is the signal sequence, or targeting sequence. The peptides encoded by these signal sequences are known by a variety of names, including targeting peptides, transit peptides, and signal peptides. In some embodiments, the IL23 polynucleotide (e.g., a RNA, e.g., a mRNA) comprises a nucleotide sequence (e.g., an ORF) that encodes a signal peptide operably linked a nucleotide sequence that encodes an IL12B and/or IL23A polypeptide described herein.

[2003] In some embodiments, the “signal sequence” or “signal peptide” is a polynucleotide or polypeptide, respectively, which is from about 9 to 200 nucleotides (3-70 amino acids) in length that, optionally, is incorporated at the 5′ (or N-terminus) of the coding region or the IL23 polypeptide, respectively. Addition of these sequences results in trafficking the encoded IL23 polypeptide to a desired site, such as the endoplasmic reticulum or the mitochondria through one or more targeting pathways. Some signal peptides are cleaved from the protein, for example by a signal peptidase after the proteins are transported to the desired site.

[2004] In some embodiments, the IL23 polynucleotide comprises a nucleotide sequence encoding an IL12B and/or IL23A polypeptide, wherein the nucleotide sequence further comprises a 5′ nucleic acid sequence encoding a native signal peptide. In another embodiment, the polynucleotide of the disclosure comprises a nucleotide sequence encoding an IL12B and/or IL23A polypeptide, wherein the nucleotide sequence lacks the nucleic acid sequence encoding a native signal peptide. In some embodiments, the IL23 polynucleotide comprises a nucleotide sequence encoding an IL12B and/or IL23A polypeptide, wherein the nucleotide sequence further comprises a 5′ nucleic acid sequence encoding a heterologous signal peptide.

[2005] Chimeric IL23 polypeptides: In some embodiments, the IL23 polynucleotide (e.g., a RNA, e.g., a mRNA) can comprise more than one nucleic acid sequence (e.g., an ORF) encoding a polypeptide of interest. In some embodiments, the IL23 polynucleotide comprises a single ORF encoding an IL12B and/or IL23A polypeptide, a functional fragment, or a variant thereof. However, in some embodiments, the IL23 polynucleotide can comprise more than one ORF, for example, a first ORF encoding an IL12B polypeptide (a first polypeptide of interest), a functional fragment, or a variant thereof, a second ORF encoding a IL23A polypeptide (a second polypeptide of interest), a functional fragment, or a variant thereof, and a third ORF expressing a third polypeptide of interest (e.g., a polypeptide heterologous to IL12B and/of IL23A). In one embodiment, the third polypeptide of interest can be fused to the IL12B polypeptide directly or by a linker. In another embodiment, the third polypeptide of interest can be fused to the IL23A polypeptide directly or by a linker. In other embodiments, the third polypeptide of interest can be fused to both the IL12B polypeptide and the IL23A polypeptide directly or by a linker.

[2006] In further embodiments, the IL23 polynucleotide can comprise more than three ORFs, for example, a first ORF encoding an IL12B polypeptide (a first polypeptide of interest), a functional fragment, or a variant thereof, a second ORF encoding a IL23A polypeptide (a second polypeptide of interest), a functional fragment, or a variant thereof, a third ORF expressing a third polypeptide of interest, and a fourth ORF expressing a fourth polypeptide of interest. In other embodiments, the third polypeptide of interest is fused to the IL23A polypeptide directly or by a linker, and the fourth polypeptide of interest is fused to the IL12B polypeptide directly or by a linker.

[2007] In some embodiments, two or more polypeptides of interest can be genetically fused, i.e., two or more polypeptides can be encoded by the same ORF. In some embodiments, the IL23 polynucleotide can comprise a nucleic acid sequence encoding a linker (e.g., a G₄S peptide linker or another linker known in the art) between two or more polypeptides of interest.

[2008] In some embodiments, the IL23 polynucleotide (e.g., a RNA, e.g., a mRNA) can comprise two, three, four, or more ORFs, each expressing a polypeptide of interest.

[2009] In some embodiments, the IL23 polynucleotide (e.g., a RNA, e.g., a mRNA) can comprise a first nucleic acid sequence (e.g., a first ORF) encoding an IL12B polypeptide, IL23A polypeptide, both IL12B and IL23A polypeptides and a second nucleic acid sequence (e.g., a second ORF) encoding a second polypeptide of interest.

[2010] Linkers in IL23 polypeptides: In some embodiments, the IL12B and/or IL23A in an IL23 polypeptide can be fused directly or by a linker. In other embodiments, the IL12B and/or IL23A can be fused directly to by a linker to a heterologous polypeptide. The linkers suitable for fusing the IL12B to IL23A or the IL12B and/or IL23A to a heterologous polypeptide can be a polypeptide (or peptide) moiety or a non-polypeptide moiety. In some embodiments, the linker is a peptide linker, including from one amino acid to about 200 amino acids. In some embodiments, the linker comprises at least 1, at least 2, at least 3, at least 4, at least 5, at least 6, at least 7, at least 8, at least 9, at least 10, at least 11, at least 12, at least 13, at least 14, at least 15, at least 16, at least 17, at least 18, at least 19, at least 20, at least 21, at least 22, at least 23, at least 24, at least 25, at least 26, at least 27, at least 28, at least 29, at least 30, at least 31, at least 32, at least 33, at least 34, at least 35, at least 36, at least 37, at least 38, at least 39, or at least 40 amino acids.

[2011] In some embodiments, the linker can be GS (Gly/Ser) linkers, for example, comprising (GₙS)ₘ, wherein n is an integer from 1 to 20 and m is an integer from 1 to 20. In some embodiments, the GS linker can comprise (GGGGS)ₒ(SEQ ID NO: 1010), wherein o is an integer from 1 to 5. In some embodiments, the GS linker can comprise GGSGGGGSGG (SEQ ID NO: 1011), GGSGGGGG (SEQ ID NO: 1012), or GSGSGSGS (SEQ ID NO: 1013). In a particular embodiment, the linker is G₆S (GGGGGGS) (SEQ ID NO: 1014).

[2012] In some embodiments, the linker can be a Gly-rich linker, for example, comprising (Gly)ₚ, wherein p is an integer from 1 to 40. In some embodiments, a Gly-rich linker can comprise GGGGG (SEQ ID NO:1015), GGGGGG (SEQ ID NO:1016), GGGGGGG (SEQ ID NO:1017) or GGGGGGGG (SEQ ID NO:1018).

[2013] In some embodiments, the linker can comprise (EAAAK)_{q} (SEQ ID NO:1019), wherein q is an integer from 1 to 5. In one embodiment, the linker can comprise (EAAAK)₃, i.e., EAAAKEAAAKEAAAK (SEQ ID NO:1020).

[2014] Further exemplary linkers include, but not limited to, GGGGSLVPRGSGGGGS (SEQ ID NO:1021), GSGSGS (SEQ ID NO:1022), GGGGSLVPRGSGGGG (SEQ ID NO:1023), GGSGGHMGSGG (SEQ ID NO:1024), GGSGGSGGSGG (SEQ ID NO:1025), GGSGG (SEQ ID NO:1026), GSGSGSGS (SEQ ID NO:1027), GGGSEGGGSEGGGSEGGG (SEQ ID NO:1028), AAGAATAA (SEQ ID NO:1029), GGSSG (SEQ ID NO:1030), GSGGGTGGGSG (SEQ ID NO:1031), GSGSGSGSGGSG (SEQ ID NO:1032), GSGGSGSGGSGGSG (SEQ ID NO:1033), and GSGGSGGSGGSGGS (SEQ ID NO:1034).

[2015] Nucleotides encoding the linkers disclosed herein can be constructed to fuse the ORF or ORFs of an IL23 polynucleotide disclosed herein.

[2016] Sequence-optimized nucleotide sequences encoding IL12B polypeptide, IL23A polypeptide, or a single-chain IL23 polypeptide: In some embodiments, the IL23 polynucleotide (e.g., a RNA, e.g., a mRNA) is sequence optimized. In some embodiments, the 1123 polynucleotide (e.g., a RNA, e.g., a mRNA) comprises a nucleotide sequence (e.g., an ORF) encoding an IL12B and/or IL23A polypeptide, a nucleotide sequence (e.g, an ORF) encoding another polypeptide of interest, a 5′-UTR, a 3′-UTR, a miRNA, a nucleotide sequence encoding a linker, or any combination thereof) that is sequence optimized.

[2017] A sequence-optimized nucleotide sequence, e.g., an codon-optimized mRNA sequence encoding an IL12B and/or IL23A polypeptide, is a sequence comprising at least one synonymous nucleobase substitution with respect to a reference sequence (e.g., a wild type nucleotide sequence encoding an IL12B and/or IL23A polypeptide).

[2018] In some embodiments, the IL23 polynucleotide comprises a sequence-optimized nucleotide sequence encoding an IL12B and/or IL23A polypeptide disclosed herein. In some embodiments, the IL23 polynucleotide comprises an open reading frame (ORF) encoding an IL12B and/or IL23A polypeptide, wherein the ORF has been sequence optimized.

[2019] In some embodiments, the IL23 polynucleotide comprises a sequence-optimized nucleotide sequence encoding a single-chain IL23 polypeptide disclosed herein. In some embodiments, the IL23 polynucleotide comprises an open reading frame (ORF) encoding a single-chain IL23 polypeptide, wherein the ORF has been sequence optimized.

[2020] Exemplary sequence-optimized nucleotide sequences encoding human IL12B and/or IL23A polypeptide are shown in TABLE 13. In some embodiments, the sequence optimized IL12B and/or IL23A sequences in TABLE 13, fragments, and variants thereof are used to practice the methods disclosed herein. In some embodiments, the sequence optimized IL12B and/or IL23A sequences in TABLE 13, fragments and variants thereof are combined with or alternatives to the wild-type sequence disclosed in TABLE 12.

TABLE 13
Sequence optimized sequences for human IL23 single-chain polypeptide

| SEQ ID | | |
|---|---|---|
| NO | Name | Sequence |
| 985 | IL23-CO01 | ATGTGCCACCAGCAGCTCGTCATCAGCTGGTTCAGCCTCGTCTTCCTCGCCTCCCCGCTCGTCG |
| | | CCATCTGGGAGCTCAAGAAAGACGTGTACGTCGTAGAGCTCGACTGGTACCCCGACGCCCCCGG |
| | | GGAGATGGTCGTCCTCACCTGCGATACCCCCGAGGAGGACGGCATCACCTGGACCCTCGACCAG |
| | | AGCAGCGAGGTTTTGGGGTCAGGCAAGACCCTCACGATCCAGGTAAAGGAGTTCGGCGACGCGG |
| | | GCCAGTACACCTGCCACAAGGGGGGAGAGGTTCTCTCCCACTCCCTGCTGCTGCTGCACAAGAA |
| | | GGAGGACGGCATCTGGTCCACCGATATCCTGAAGGACCAGAAAGAGCCCAAGAACAAGACCTTT |
| | | CTGAGGTGCGAGGCCAAGAACTACAGCGGCAGGTTCACCTGTTGGTGGCTGACCACTATCAGCA |
| | | CCGACCTGACCTTCTCGGTGAAAAGCTCGAGGGGCAGCAGCGACCCCCAGGGGGTCACGTGCGG |
| | | CGCCGCGACACTCTCCGCCGAGAGGGTGAGGGGCGACAATAAAGAGTACGAGTACAGCGTGGAG |
| | | TGCCAGGAGGACTCCGCCTGTCCGGCCGCGGAGGAGAGCCTGCCCATAGAGGTGATGGTGGACG |
| | | CCGTGCACAAGCTGAAGTACGAAAACTACACCAGCAGCTTCTTCATTCGGGACATCATCAAGCC |
| | | CGACCCGCCCAAGAACCTGCAGCTGAAACCCCTGAAGAACAGCCGGCAGGTGGAGGTGAGCTGG |
| | | GAGTACCCCGACACCTGGAGCACCCCCCACAGCTACTTCTCCCTGACATTCTGCGTCCAGGTGC |
| | | AGGGGAAGTCAAAAAGGGAGAAGAAAGACCGGGTGTTCACCGACAAGACCAGCGCCACCGTGAT |
| | | ATGCAGGAAGAACGCCAGCATAAGCGTGAGGGCCCAGGATAGGTATTACAGCTCCAGCTGGAGC |
| | | GAATGGGCCTCCGTCCCCTGCTCAGGCGGCGGCGGCGGCGGAAGCAGGGCGGTGCCCGGAGGCA |
| | | GCTCTCCCGCGTGGACCCAGTGTCAGCAGCTGTCCCAGAAGCTGTGCACCCTGGCCTGGAGCGC |
| | | TCACCCCCTGGTCGGGCACATGGACCTGCGCGAAGAGGGGGACGAGGAGACTACCAATGATGTG |
| | | CCCCACATCCAGTGCGGCGACGGCTGCGACCCCCAGGGGCTTCGGGACAACTCCCAATTTTGTC |
| | | TTCAGAGGATCCACCAGGGGCTCATATTCTACGAGAAACTGCTGGGGAGCGACATATTCACCGG |
| | | AGAACCCAGCCTGCTGCCAGACAGCCCCGTGGGCCAGCTGCATGCTAGCCTGCTGGGGCTGAGC |
| | | CAGCTGCTGCAGCCGGAGGGGCACCACTGGGAGACGCAGCAGATCCCCAGCCTGTCGCCCAGCC |
| | | AGCCCTGGCAGAGGCTTCTGCTGCGCTTCAAGATCCTGCGAAGCCTGCAGGCCTTCGTGGCGGT |
| | | GGCCGCGAGGGTGTTCGCGCACGGCGCCGCCACCCTGAGCCCG |
| 986 | IL23-CO02 | ATGTGCCATCAGCAGTTGGTAATCAGCTGGTTCTCCCTTGTCTTCCTCGCCAGCCCGCTCGTCG |
| | | CCATCTGGGAGCTCAAGAAGGACGTGTACGTTGTCGAGCTCGATTGGTACCCCGACGCCCCCGG |
| | | CGAGATGGTCGTCCTCACTTGCGACACCCCCGAGGAGGACGGGATCACCTGGACGCTTGACCAG |
| | | TCCTCCGAGGTCCTCGGGAGCGGCAAGACCCTCACCATCCAGGTCAAGGAGTTCGGGGACGCGG |
| | | GGCAATACACCTGCCACAAAGGGGGCGAGGTTCTCAGCCACAGCCTGCTGCTGCTGCATAAGAA |
| | | GGAGGACGGCATCTGGTCCACGGACATCCTGAAGGACCAGAAAGAGCCCAAGAACAAGACTTTC |
| | | CTCAGGTGCGAGGCCAAGAACTACAGCGGCCGGTTTACCTGCTGGTGGCTGACCACCATCTCAA |
| | | CCGACCTCACCTTCAGCGTGAAAAGCAGCCGGGGCTCATCCGACCCCCAGGGCGTGACCTGCGG |
| | | CGCCGCCACCCTGAGCGCCGAAAGGGTGCGGGGCGACAACAAAGAGTACGAGTACAGCGTCGAG |
| | | TGCCAGGAAGACTCCGCCTGTCCCGCCGCCGAAGAGAGCCTGCCCATCGAGGTGATGGTGGACG |
| | | CGGTCCACAAGCTGAAGTACGAGAACTACACCTCGAGCTTCTTCATTCGGGATATCATCAAGCC |
| | | CGATCCCCCTAAGAACCTGCAGCTGAAGCCCCTGAAGAACAGCCGCCAGGTGGAGGTGTCCTGG |
| | | GAGTACCCGGACACATGGTCCACGCCCCACTCCTATTTCAGCCTGACCTTCTGCGTGCAGGTGC |
| | | AGGGAAAGAGCAAGAGGGAGAAAAAGGACAGGGTGTTCACCGACAAGACCAGCGCCACCGTGAT |
| | | CTGCCGGAAGAACGCCTCGATCAGCGTGCGCGCCCAGGACCGGTACTACTCCTCCAGCTGGAGC |
| | | GAGTGGGCCAGCGTGCCGTGCTCAGGGGGCGGCGGGGGCGGGAGCAGGGCCGTTCCAGGCGGTA |
| | | GCTCACCAGCGTGGACCCAGTGCCAGCAGCTGTCCCAGAAGCTGTGCACCCTGGCCTGGAGCGC |
| | | CCACCCCCTGGTCGGGCACATGGACCTGAGGGAGGAGGGCGACGAGGAGACTACCAACGACGTG |
| | | CCCCACATTCAGTGCGGCGACGGGTGCGACCCCCAGGGCTTGCGTGACAACTCCCAGTTCTGCC |
| | | TGCAGAGGATCCACCAGGGCCTGATCTTTTACGAGAAGCTGCTGGGCTCCGACATCTTCACCGG |
| | | GGAGCCCTCACTGCTGCCGGACAGCCCCGTCGGCCAGCTGCACGCCAGCCTCCTCGGTCTGAGC |
| | | CAACTGCTGCAGCCAGAGGGGCACCACTGGGAGACTCAGCAGATCCCCAGCCTGAGCCCCTCCC |
| | | AGCCCTGGCAGCGGCTGCTCCTGCGCTTCAAGATCCTGAGGAGCCTGCAGGCCTTCGTGGCCGT |
| | | GGCTGCCCGCGTGTTCGCGCACGGGGCCGCCACCCTGTCCCCC |
| 987 | IL23-CO03 | ATGTGCCACCAGCAGCTCGTTATAAGCTGGTTCAGCCTCGTCTTCCTCGCCTCCCCGTTGGTCG |
| | | CCATCTGGGAGCTCAAGAAAGACGTATACGTCGTCGAGTTGGACTGGTACCCCGACGCCCCCGG |
| | | CGAGATGGTCGTCCTCACGTGTGACACACCCGAAGAGGACGGCATCACGTGGACGCTCGACCAG |
| | | TCGAGCGAGGTCCTCGGCTCCGGCAAGACCCTCACCATCCAGGTCAAGGAGTTCGGCGACGCAG |
| | | GCCAGTATACCTGCCACAAGGGCGGGGAGGTCCTTAGCCACAGCCTGCTGCTGCTGCACAAGAA |
| | | GGAGGACGGGATCTGGTCCACCGACATTCTGAAGGACCAGAAGGAGCCTAAAAACAAGACCTTC |
| | | CTCCGGTGCGAGGCCAAGAATTACTCCGGGAGGTTCACCTGCTGGTGGTTGACCACCATCAGCA |
| | | CCGACCTGACCTTCTCCGTCAAGAGCTCAAGGGGCAGCTCCGACCCCCAGGGCGTGACCTGCGG |
| | | GGCCGCCACCCTGTCTGCGGAGAGGGTGCGCGGGGACAACAAAGAGTACGAGTACAGCGTGGAG |
| | | TGCCAGGAGGACTCCGCCTGTCCCGCCGCCGAAGAGAGCCTGCCCATCGAGGTGATGGTGGACG |
| | | CCGTGCATAAGCTGAAGTACGAAAATTACACCAGCAGCTTTTTCATAAGGGATATAATCAAGCC |
| | | CGATCCGCCCAAGAACCTCCAGCTGAAGCCGCTGAAGAACAGCAGGCAGGTGGAGGTCAGTTGG |
| | | GAGTATCCAGATACCTGGTCCACCCCCCACAGCTACTTCAGCCTGACCTTCTGCGTGCAGGTGC |
| | | AGGGCAAAAGCAAGAGGGAAAAGAAGGACAGGGTGTTCACCGACAAGACCAGCGCGACGGTCAT |
| | | CTGTAGGAAGAATGCCTCCATCAGCGTCCGCGCGCAGGACCGGTACTACAGCAGCAGCTGGTCA |
| | | GAGTGGGCCAGCGTGCCCTGCAGTGGCGGCGGAGGGGGAGGGAGTCGGGCCGTGCCGGGGGGCA |
| | | GTAGCCCCGCCTGGACACAGTGCCAGCAGCTGTCCCAAAAGCTGTGTACGCTGGCCTGGTCCGC |
| | | ACACCCCCTCGTGGGGCATATGGACCTGAGGGAGGAGGGGGACGAGGAGACTACCAACGATGTG |
| | | CCCCACATACAGTGCGGGGATGGCTGCGACCCGCAGGGCCTTCGCGACAATAGCCAGTTCTGCC |
| | | TGCAACGCATCCACCAGGGCCTGATCTTCTACGAGAAGCTGCTGGGATCGGACATCTTCACCGG |
| | | GGAGCCCAGCCTGCTGCCGGACTCCCCCGTGGGGCAACTGCACGCCAGCCTGCTGGGCCTGTCA |
| | | CAACTGCTCCAGCCCGAGGGGCACCATTGGGAGACTCAACAGATCCCCAGCCTGAGCCCCAGCC |
| | | AGCCCTGGCAGAGGCTCCTGCTGAGGTTCAAAATCCTGCGTAGCCTGCAGGCCTTCGTGGCCGT |
| | | GGCCGCCAGGGTCTTCGCCCACGGCGCCGCCACCCTGTCCCCA |
| 988 | IL23-CO04 | ATGTGCCACCAGCAGCTCGTAATCAGCTGGTTTTCCCTAGTCTTCCTCGCCAGCCCGCTAGTCG |
| | | CCATTTGGGAGCTCAAGAAGGACGTCTACGTAGTCGAGCTCGATTGGTATCCCGACGCTCCGGG |
| | | CGAGATGGTCGTGCTCACTTGTGACACTCCCGAGGAGGACGGCATCACCTGGACTCTCGATCAG |
| | | AGCTCCGAAGTCCTTGGGAGCGGCAAGACCCTTACCATCCAGGTCAAGGAGTTCGGCGACGCCG |
| | | GCCAGTACACCTGCCACAAAGGGGGCGAGGTCCTCAGCCACAGCCTGCTGCTGCTCCATAAGAA |
| | | GGAGGACGGCATCTGGTCCACCGACATCCTGAAGGACCAGAAGGAACCCAAGAACAAGACCTTC |
| | | CTGAGGTGCGAAGCCAAGAACTACAGCGGCCGGTTCACCTGCTGGTGGCTGACCACCATCTCTA |
| | | CGGACCTGACCTTCTCCGTGAAAAGCAGCAGGGGCTCCTCCGACCCGCAGGGCGTGACCTGCGG |
| | | CGCCGCCACCCTCAGCGCCGAGAGGGTGAGGGGCGACAACAAAGAGTACGAGTACAGCGTGGAA |
| | | TGCCAGGAGGACAGCGCCTGCCCCGCCGCCGAGGAGAGCCTGCCGATCGAGGTGATGGTGGACG |
| | | CCGTGCACAAGCTGAAGTACGAAAACTACACCTCCTCCTTCTTCATCAGGGACATCATCAAACC |
| | | CGACCCGCCCAAGAACCTGCAACTCAAGCCCCTGAAGAACTCCAGGCAGGTGGAGGTGTCATGG |
| | | GAGTACCCCGACACCTGGAGCACCCCCCACAGCTACTTCAGCCTCACGTTTTGCGTGCAGGTAC |
| | | AGGGCAAAAGCAAGAGGGAGAAGAAGGATAGGGTGTTCACCGATAAAACCTCCGCCACCGTGAT |
| | | CTGCAGAAAGAACGCCAGCATAAGCGTGCGGGCCCAGGACAGGTACTACAGCTCCAGCTGGAGC |
| | | GAGTGGGCCAGCGTGCCCTGCAGCGGGGGCGGAGGGGGTGGGTCCCGCGCCGTGCCAGGTGGGA |
| | | GCAGCCCCGCTTGGACTCAGTGCCAGCAGCTGAGCCAAAAGCTGTGCACCCTCGCGTGGTCCGC |
| | | CCACCCGCTGGTGGGCCATATGGATCTGAGGGAGGAGGGGGACGAAGAGACTACCAACGACGTC |
| | | CCCCACATCCAATGCGGTGATGGGTGCGACCCCCAGGGCCTGCGGGACAACTCCCAGTTCTGCC |
| | | TTCAGAGGATCCACCAGGGCTTGATCTTTTACGAGAAACTGCTGGGAAGCGACATCTTCACCGG |
| | | CGAACCCAGCCTGCTGCCCGACTCCCCCGTGGGGCAGCTGCACGCGAGCCTGCTGGGGCTGAGC |
| | | CAGCTGCTGCAGCCCGAGGGCCACCATTGGGAGACTCAGCAGATCCCCAGCCTGAGTCCCAGCC |
| | | AGCCGTGGCAGCGGCTGCTGCTGCGATTCAAGATCCTGAGGTCGCTACAGGCCTTTGTGGCCGT |
| | | GGCGGCCAGGGTGTTCGCCCATGGCGCAGCCACCCTCTCCCCC |
| 989 | IL23-CO05 | ATGTGCCACCAGCAATTGGTCATCTCCTGGTTCAGCCTCGTCTTCCTCGCGAGCCCCCTCGTAG |
| | | CCATCTGGGAGCTAAAGAAGGACGTCTACGTCGTCGAGCTCGACTGGTACCCCGACGCCCCCGG |
| | | GGAGATGGTCGTCCTCACCTGCGACACCCCGGAGGAGGACGGCATCACGTGGACCCTCGACCAA |
| | | TCGTCCGAGGTTCTCGGGTCCGGCAAGACCCTCACCATCCAAGTCAAGGAGTTCGGCGACGCGG |
| | | GCCAGTACACCTGCCACAAGGGCGGGGAGGTCCTCAGCCACTCGCTCCTGCTGCTCCACAAGAA |
| | | AGAGGACGGCATCTGGAGCACGGACATCCTGAAGGACCAGAAGGAGCCCAAGAACAAGACCTTC |
| | | CTGCGCTGCGAGGCCAAGAACTACAGCGGGAGGTTCACCTGCTGGTGGCTCACCACAATCAGCA |
| | | CCGACCTCACCTTCAGCGTGAAAAGCAGCCGCGGCAGCAGCGATCCACAGGGGGTGACCTGCGG |
| | | CGCCGCCACCCTGAGCGCCGAGAGGGTGCGGGGAGACAACAAGGAGTACGAGTACAGCGTGGAG |
| | | TGCCAGGAGGACAGCGCCTGTCCGGCGGCCGAGGAGAGCCTGCCCATCGAGGTGATGGTGGACG |
| | | CCGTCCACAAGCTGAAGTACGAAAACTACACTTCCAGCTTCTTCATCCGGGATATCATCAAGCC |
| | | CGACCCGCCCAAAAACCTGCAGCTGAAGCCGCTGAAGAACAGCCGCCAGGTGGAGGTCAGCTGG |
| | | GAGTACCCCGACACCTGGAGCACCCCCCATAGCTACTTCTCCCTGACCTTCTGCGTGCAGGTGC |
| | | AGGGGAAGTCCAAGAGGGAGAAGAAGGACAGGGTGTTCACCGACAAAACCAGCGCCACGGTGAT |
| | | CTGCCGAAAGAACGCCAGCATCAGCGTGAGGGCCCAGGACCGCTACTATTCCTCCAGCTGGTCC |
| | | GAATGGGCGAGCGTGCCCTGCAGTGGCGGAGGAGGAGGCGGCAGCAGGGCCGTGCCCGGCGGCT |
| | | CCAGCCCCGCATGGACTCAGTGCCAGCAGCTGAGCCAGAAACTGTGCACGCTGGCCTGGAGCGC |
| | | CCATCCCCTGGTCGGGCATATGGACCTGAGGGAGGAGGGCGACGAAGAGACGACTAACGATGTG |
| | | CCCCACATCCAGTGCGGGGACGGTTGCGACCCCCAGGGCCTGCGGGACAACAGCCAGTTTTGCC |
| | | TCCAGCGGATCCACCAGGGCCTGATTTTTTACGAAAAGCTGCTGGGCAGCGACATCTTCACCGG |
| | | CGAGCCCAGCCTGCTGCCCGACAGCCCAGTGGGCCAACTGCACGCCTCCCTGCTCGGCCTGAGC |
| | | CAGCTGCTGCAGCCCGAGGGCCATCACTGGGAGACGCAGCAGATCCCCTCCCTGAGCCCCTCCC |
| | | AGCCCTGGCAGAGGCTCCTGCTGCGCTTCAAGATCCTGAGGAGCCTGCAGGCCTTCGTCGCCGT |
| | | GGCCGCCCGGGTGTTCGCCCACGGGGCCGCCACACTGAGCCCG |
| 990 | IL23-CO06 | ATGTGTCATCAGCAGCTCGTCATCAGCTGGTTCAGCCTTGTCTTCCTCGCGAGTCCCCTCGTAG |
| | | CCATCTGGGAACTCAAGAAGGACGTCTACGTCGTCGAGCTCGACTGGTACCCCGACGCCCCCGG |
| | | GGAGATGGTTGTCCTCACCTGCGACACGCCCGAGGAGGACGGCATCACGTGGACCCTCGACCAA |
| | | AGCTCCGAGGTCCTCGGGAGCGGCAAGACCCTCACAATCCAGGTCAAGGAGTTCGGCGACGCCG |
| | | GGCAGTACACGTGCCACAAGGGGGGCGAAGTCCTCAGCCACTCCCTGCTGCTGCTCCATAAGAA |
| | | GGAGGACGGGATATGGAGCACCGACATCCTAAAGGATCAGAAGGAGCCCAAAAACAAGACCTTC |
| | | CTCAGGTGTGAGGCCAAGAACTACAGCGGCCGTTTCACCTGCTGGTGGCTGACCACCATATCTA |
| | | CCGACCTGACCTTCAGCGTGAAAAGCAGCAGGGGCTCGAGCGACCCCCAGGGCGTGACGTGCGG |
| | | CGCCGCGACGCTGAGCGCCGAGCGCGTGCGGGGCGACAACAAGGAGTATGAATACTCCGTGGAA |
| | | TGCCAGGAGGATAGCGCCTGCCCGGCCGCGGAGGAGTCCCTCCCCATCGAGGTGATGGTGGACG |
| | | CCGTCCACAAGCTGAAGTATGAGAATTACACCAGCAGCTTCTTCATCCGCGACATCATCAAGCC |
| | | GGACCCACCCAAGAATCTGCAGCTGAAACCGCTCAAGAACTCCAGGCAGGTGGAGGTGTCCTGG |
| | | GAGTATCCCGACACATGGTCCACGCCCCACAGCTACTTCTCCCTGACGTTCTGTGTACAAGTGC |
| | | AGGGCAAGTCCAAAAGGGAGAAAAAGGACAGGGTGTTCACCGACAAGACCTCCGCCACCGTGAT |
| | | CTGCAGGAAGAACGCCAGCATCAGCGTTCGCGCCCAGGACCGCTACTACTCCAGCTCATGGAGT |
| | | GAATGGGCCTCCGTCCCCTGCAGCGGAGGCGGAGGCGGCGGAAGCCGAGCCGTGCCCGGCGGGT |
| | | CCAGTCCCGCCTGGACCCAGTGCCAGCAACTGAGCCAAAAGCTGTGCACCCTGGCGTGGTCCGC |
| | | CCACCCCCTGGTGGGCCACATGGACCTGCGGGAGGAGGGTGACGAGGAGACGACCAACGACGTG |
| | | CCTCACATCCAGTGCGGTGACGGCTGTGACCCCCAGGGCCTGAGGGACAACAGCCAGTTCTGCC |
| | | TGCAGAGGATCCACCAAGGGCTGATCTTCTACGAGAAATTGCTGGGCAGCGACATCTTCACCGG |
| | | GGAACCCAGCCTGCTGCCCGACTCGCCCGTGGGCCAGCTGCATGCGTCCCTCCTGGGCCTGTCC |
| | | CAGCTGCTACAGCCCGAGGGCCATCATTGGGAGACGCAGCAGATCCCCTCCCTGAGCCCGAGCC |
| | | AACCCTGGCAGAGGCTGCTGCTCCGGTTCAAGATCCTGCGGTCCCTGCAGGCCTTCGTCGCCGT |
| | | GGCCGCCCGCGTGTTCGCCCACGGGGCCGCCACCCTGAGCCCC |
| 991 | IL23-CO07 | ATGTGCCACCAGCAGCTCGTAATCAGCTGGTTCTCGCTTGTATTCCTCGCCAGCCCCCTCGTTG |
| | | CCATCTGGGAGCTCAAGAAGGACGTATACGTCGTAGAGCTCGACTGGTATCCCGACGCCCCCGG |
| | | GGAGATGGTGGTCCTCACCTGTGACACCCCCGAGGAGGACGGCATCACCTGGACCCTCGACCAA |
| | | AGCTCCGAGGTCCTCGGGTCCGGCAAGACCCTCACCATCCAGGTCAAGGAATTCGGAGACGCCG |
| | | GCCAGTACACCTGCCACAAAGGCGGCGAGGTACTCTCCCATTCCCTGCTCCTGCTGCATAAGAA |
| | | GGAGGACGGGATCTGGAGCACCGATATTCTGAAGGATCAGAAGGAGCCCAAGAATAAGACCTTC |
| | | CTGAGGTGCGAGGCCAAGAACTACTCAGGCCGCTTCACCTGCTGGTGGCTCACCACGATCAGCA |
| | | CCGACCTCACCTTCAGCGTGAAATCCAGCAGGGGTAGCTCGGATCCTCAGGGCGTGACATGCGG |
| | | GGCCGCCACCCTGAGCGCCGAGAGGGTGCGGGGCGACAACAAGGAGTACGAATACAGCGTGGAG |
| | | TGCCAGGAGGACTCCGCGTGCCCCGCCGCGGAAGAGAGCCTGCCCATCGAGGTAATGGTGGACG |
| | | CCGTGCACAAGCTCAAGTACGAGAATTACACCAGCTCTTTCTTCATCCGGGATATCATCAAGCC |
| | | CGACCCTCCCAAGAACCTGCAGCTGAAACCCCTGAAGAACAGCCGTCAGGTAGAGGTGAGCTGG |
| | | GAGTACCCCGATACGTGGAGCACCCCCCATAGCTACTTTTCCCTGACCTTTTGTGTGCAGGTGC |
| | | AGGGCAAGTCCAAGAGGGAGAAGAAGGACAGGGTGTTCACCGACAAGACGTCCGCCACCGTGAT |
| | | CTGCAGGAAGAATGCCTCCATCTCCGTGAGGGCCCAGGACCGCTACTACAGCAGCTCCTGGTCC |
| | | GAGTGGGCCTCTGTCCCCTGCTCCGGCGGGGGCGGAGGCGGCAGCAGAGCCGTGCCCGGCGGCA |
| | | GCAGCCCCGCATGGACCCAATGCCAACAGCTGAGCCAAAAACTGTGCACGCTCGCATGGAGCGC |
| | | CCACCCGCTGGTGGGGCACATGGACCTGAGGGAGGAAGGCGATGAGGAGACGACAAACGACGTG |
| | | CCCCACATCCAGTGCGGCGATGGCTGCGACCCGCAGGGCCTGCGCGACAACAGCCAGTTCTGTC |
| | | TGCAGCGTATCCACCAGGGCCTCATATTCTATGAGAAGCTGCTGGGCTCCGACATCTTCACCGG |
| | | CGAGCCCAGCCTGCTGCCCGACTCCCCCGTGGGACAGCTCCACGCCAGTCTGCTGGGCCTGAGC |
| | | CAGCTGCTGCAGCCCGAGGGCCACCACTGGGAGACTCAGCAGATCCCGAGCCTGAGCCCCAGCC |
| | | AGCCATGGCAAAGGCTGCTGCTCAGGTTCAAGATCCTGAGGAGCCTGCAGGCCTTCGTGGCCGT |
| | | GGCCGCCAGGGTCTTTGCCCACGGGGCCGCCACCCTCTCCCCG |
| 992 | IL23-CO08 | ATGTGCCACCAGCAGTTGGTCATCTCGTGGTTCAGCCTCGTCTTTCTTGCCTCCCCCTTGGTCG |
| | | CCATCTGGGAGCTCAAGAAAGACGTCTACGTTGTCGAGCTCGATTGGTATCCCGACGCGCCGGG |
| | | CGAAATGGTCGTCCTTACGTGCGACACGCCAGAAGAGGACGGTATCACGTGGACCCTCGATCAG |
| | | TCCTCGGAGGTCCTCGGCAGCGGCAAGACCCTCACCATCCAGGTCAAGGAGTTCGGGGACGCCG |
| | | GCCAGTACACCTGCCACAAGGGCGGGGAAGTACTCAGCCATTCCCTGCTGCTGCTGCACAAGAA |
| | | GGAGGACGGGATCTGGTCCACCGACATCCTGAAGGACCAGAAGGAACCCAAGAACAAGACCTTT |
| | | CTGCGCTGTGAGGCAAAGAACTACTCTGGGCGGTTCACCTGTTGGTGGCTGACCACCATCAGTA |
| | | CCGACCTGACCTTCTCTGTGAAAAGCAGCAGGGGCAGCAGCGACCCCCAAGGCGTGACCTGCGG |
| | | CGCCGCCACTCTGTCCGCCGAGCGCGTAAGGGGGGACAACAAAGAGTACGAATATAGCGTGGAA |
| | | TGCCAGGAGGACAGCGCCTGCCCCGCCGCGGAGGAGAGCCTGCCCATCGAAGTGATGGTGGACG |
| | | CGGTCCACAAGCTCAAGTACGAAAACTACACCAGCTCCTTCTTCATCAGGGACATCATTAAGCC |
| | | GGACCCCCCGAAGAACCTGCAGCTGAAGCCGCTGAAAAACAGCCGTCAGGTCGAGGTGAGCTGG |
| | | GAGTACCCCGACACCTGGTCCACCCCGCACTCCTATTTCAGCCTGACTTTCTGCGTGCAGGTCC |
| | | AGGGCAAGAGCAAGCGGGAGAAGAAGGACCGGGTGTTCACCGATAAGACCAGCGCCACCGTCAT |
| | | CTGCCGAAAGAACGCCTCCATCAGCGTGAGGGCCCAGGACAGGTACTACAGCAGCAGCTGGAGC |
| | | GAGTGGGCCTCTGTGCCCTGCAGCGGGGGAGGCGGGGGCGGCAGCAGAGCGGTGCCGGGGGGTA |
| | | GCTCTCCCGCCTGGACCCAGTGTCAACAGCTCAGCCAGAAGCTGTGCACCCTGGCCTGGTCCGC |
| | | CCACCCGCTGGTGGGCCACATGGACCTGAGGGAGGAAGGCGATGAGGAAACCACGAACGATGTG |
| | | CCGCACATCCAGTGCGGCGACGGGTGCGACCCGCAGGGCTTGCGTGATAATAGCCAGTTCTGCC |
| | | TCCAGCGGATCCACCAGGGACTGATCTTCTACGAGAAACTGTTGGGCTCGGACATCTTTACCGG |
| | | CGAGCCCAGCCTCCTGCCCGACAGCCCCGTGGGTCAGCTGCACGCGAGCCTGCTGGGCCTCAGC |
| | | CAGCTCCTGCAGCCCGAAGGGCACCACTGGGAAACCCAGCAAATTCCAAGCCTGAGCCCCTCGC |
| | | AGCCCTGGCAGCGGCTGCTGCTGCGGTTCAAGATCCTCAGGTCCCTGCAGGCCTTCGTGGCGGT |
| | | GGCTGCCCGGGTCTTCGCCCACGGCGCGGCAACGCTGAGCCCC |
| 993 | IL23-CO09 | ATGTGTCACCAGCAGCTCGTCATAAGCTGGTTCTCACTCGTCTTCTTGGCCAGCCCACTAGTCG |
| | | CCATCTGGGAGCTCAAAAAGGACGTCTACGTGGTTGAGCTAGACTGGTACCCCGACGCCCCCGG |
| | | GGAGATGGTTGTCCTCACCTGCGATACGCCCGAAGAGGACGGCATCACCTGGACCCTCGACCAG |
| | | TCCAGCGAGGTCCTCGGGTCCGGCAAAACCCTCACCATCCAGGTCAAGGAGTTCGGGGACGCCG |
| | | GCCAGTACACCTGTCACAAGGGAGGCGAGGTCCTATCCCATAGCCTCCTGCTGCTGCATAAGAA |
| | | GGAGGATGGTATCTGGAGCACCGACATCCTGAAGGACCAAAAGGAGCCGAAGAACAAGACGTTC |
| | | CTCCGGTGCGAGGCCAAGAACTACAGCGGGCGATTCACGTGCTGGTGGCTCACCACCATCTCCA |
| | | CCGACCTGACCTTCTCCGTGAAAAGCAGCCGCGGCTCCAGCGACCCCCAGGGGGTGACCTGCGG |
| | | CGCCGCCACCCTGTCCGCTGAGCGCGTGCGGGGCGACAACAAGGAGTACGAATACAGCGTGGAG |
| | | TGCCAGGAGGACTCCGCCTGCCCCGCCGCCGAGGAGAGCCTGCCCATTGAGGTGATGGTGGACG |
| | | CTGTGCATAAACTGAAGTACGAGAACTACACCTCCAGTTTCTTCATCAGGGACATCATCAAGCC |
| | | TGACCCGCCCAAGAACCTCCAGCTGAAGCCCTTGAAGAACTCGAGGCAGGTGGAAGTCTCGTGG |
| | | GAATACCCCGACACCTGGAGCACGCCCCACAGCTACTTCTCCCTGACCTTCTGCGTGCAGGTGC |
| | | AGGGCAAAAGCAAGAGGGAGAAGAAGGACAGGGTGTTCACCGACAAGACAAGCGCGACCGTGAT |
| | | CTGCAGGAAGAACGCCAGCATATCCGTGCGCGCCCAAGACCGCTACTACAGCAGCTCGTGGTCG |
| | | GAGTGGGCAAGCGTGCCATGCTCAGGCGGCGGCGGCGGGGGCTCCAGGGCCGTGCCCGGGGGCA |
| | | GCAGCCCCGCTTGGACCCAATGTCAGCAGCTGTCCCAGAAGCTGTGCACTCTGGCCTGGAGCGC |
| | | CCACCCCCTGGTGGGTCATATGGACCTGCGGGAGGAGGGCGATGAAGAGACGACCAACGACGTG |
| | | CCCCATATCCAGTGCGGGGACGGGTGTGACCCCCAGGGCCTGAGGGACAACTCGCAGTTTTGCC |
| | | TGCAGAGGATCCACCAGGGCCTGATCTTTTATGAAAAACTACTGGGGAGCGACATCTTCACCGG |
| | | CGAGCCCTCCCTCCTGCCCGACTCCCCCGTGGGGCAACTGCATGCCAGCCTGCTGGGCCTGAGC |
| | | CAGCTGCTGCAGCCGGAGGGGCATCACTGGGAGACGCAGCAGATCCCCTCGTTGTCCCCCTCCC |
| | | AGCCCTGGCAGAGGCTGCTCCTCAGGTTTAAGATCCTGCGGAGCCTGCAGGCCTTCGTGGCCGT |
| | | GGCAGCCCGGGTGTTCGCCCACGGGGCGGCCACCCTCTCGCCC |
| 994 | IL23-CO10 | ATGTGTCACCAGCAGCTCGTCATCAGCTGGTTCTCCCTCGTATTTCTCGCCAGCCCCCTCGTCG |
| | | CCATCTGGGAGCTCAAGAAGGACGTGTACGTTGTAGAGCTCGACTGGTATCCCGACGCCCCCGG |
| | | CGAGATGGTGGTGCTCACCTGCGACACCCCCGAGGAAGACGGCATAACCTGGACCCTCGACCAG |
| | | TCCTCCGAGGTACTAGGGTCGGGTAAAACCCTCACCATCCAGGTCAAGGAATTCGGCGACGCCG |
| | | GGCAGTACACCTGCCACAAGGGCGGCGAGGTCCTCTCGCACAGCCTGCTTCTGCTCCACAAGAA |
| | | GGAAGACGGCATCTGGAGCACGGACATCCTGAAGGACCAGAAGGAGCCGAAGAACAAAACGTTC |
| | | CTGAGGTGCGAGGCTAAGAACTACAGCGGCCGGTTCACCTGCTGGTGGCTGACGACCATCAGCA |
| | | CGGACCTCACCTTCAGCGTGAAAAGCAGCAGGGGGAGCAGCGATCCCCAGGGGGTGACGTGCGG |
| | | CGCCGCCACCCTGAGCGCCGAGCGCGTGCGGGGCGATAACAAAGAGTACGAGTACAGCGTGGAA |
| | | TGTCAGGAGGACAGCGCCTGCCCCGCCGCCGAAGAGAGCCTCCCCATAGAGGTGATGGTGGACG |
| | | CCGTCCACAAGCTGAAGTACGAAAACTACACTAGCTCCTTTTTCATCAGGGACATAATCAAGCC |
| | | CGACCCACCCAAGAACCTGCAGCTGAAGCCCCTCAAGAACAGCAGGCAGGTGGAGGTGTCCTGG |
| | | GAGTACCCCGACACTTGGAGCACCCCCCACAGCTACTTTAGCCTGACCTTCTGCGTGCAGGTGC |
| | | AGGGAAAGTCCAAGCGAGAGAAGAAGGACAGGGTGTTCACCGACAAGACCTCCGCCACCGTAAT |
| | | CTGCCGGAAGAACGCCAGCATCTCCGTGAGGGCCCAGGATAGGTACTACAGCTCCAGCTGGAGC |
| | | GAGTGGGCCTCCGTGCCCTGTAGCGGAGGCGGCGGCGGGGGCTCCAGGGCTGTGCCCGGCGGCT |
| | | CATCCCCCGCCTGGACACAGTGCCAGCAGCTGAGCCAAAAGCTGTGCACACTGGCGTGGAGCGC |
| | | CCACCCGCTCGTGGGCCACATGGACCTGCGGGAGGAAGGGGACGAGGAGACAACGAACGACGTC |
| | | CCTCACATCCAATGCGGTGATGGCTGTGATCCGCAGGGCCTCAGGGACAACAGCCAGTTCTGTC |
| | | TGCAGAGGATCCACCAGGGCCTCATCTTCTACGAGAAGCTGCTGGGCAGCGACATCTTCACCGG |
| | | GGAGCCCAGCCTGCTGCCCGACAGCCCGGTGGGCCAACTGCACGCCAGCCTGCTGGGGCTCAGC |
| | | CAGCTGCTGCAGCCGGAGGGACACCACTGGGAAACCCAGCAGATCCCGTCCCTGAGCCCCAGCC |
| | | AGCCCTGGCAGCGCCTGCTCCTGAGGTTCAAGATCCTGCGCTCCCTGCAGGCCTTCGTTGCCGT |
| | | GGCGGCTCGCGTGTTTGCCCACGGGGCCGCCACCCTGAGCCCC |
| 995 | IL23-CO11 | ATGTGCCACCAGCAGCTCGTTATCAGCTGGTTCAGTCTCGTCTTCCTCGCCTCCCCCCTCGTCG |
| | | CCATCTGGGAACTAAAGAAGGACGTCTACGTCGTAGAGCTCGACTGGTACCCCGACGCCCCCGG |
| | | CGAGATGGTCGTCCTCACCTGCGACACTCCAGAGGAGGACGGAATCACCTGGACCCTCGACCAG |
| | | AGCAGCGAGGTCCTCGGCAGCGGCAAGACCCTCACCATCCAGGTCAAAGAATTCGGCGACGCCG |
| | | GCCAGTACACCTGCCATAAGGGGGGAGAGGTACTCAGCCACAGCCTGCTGCTACTCCACAAGAA |
| | | GGAGGACGGCATCTGGTCCACCGACATCCTGAAGGACCAGAAGGAACCCAAGAACAAGACTTTC |
| | | CTGAGGTGCGAGGCCAAGAATTATAGCGGCAGGTTCACCTGCTGGTGGCTGACCACCATCAGCA |
| | | CCGACCTGACCTTCTCCGTGAAATCCAGCAGGGGGAGCTCCGACCCACAGGGCGTCACGTGCGG |
| | | CGCCGCCACGCTGTCCGCCGAGCGAGTGCGCGGCGACAACAAGGAGTACGAGTACTCCGTCGAG |
| | | TGCCAGGAGGACAGCGCGTGCCCCGCCGCCGAAGAGTCGCTGCCCATAGAGGTGATGGTGGATG |
| | | CCGTCCACAAGCTGAAGTATGAAAACTACACCTCCAGCTTCTTCATCCGCGACATCATCAAGCC |
| | | CGACCCTCCCAAGAACCTGCAGCTGAAACCGTTAAAGAACTCCAGGCAGGTGGAGGTCAGCTGG |
| | | GAGTACCCCGACACCTGGTCCACCCCGCACAGCTACTTCAGCCTCACCTTCTGCGTGCAGGTGC |
| | | AAGGCAAAAGCAAGCGGGAGAAGAAAGACCGGGTCTTCACCGATAAGACCTCAGCCACCGTGAT |
| | | CTGCCGCAAGAATGCCTCCATTTCAGTGCGGGCGCAGGACCGCTACTATTCCAGCTCCTGGAGC |
| | | GAGTGGGCCAGCGTCCCTTGCTCCGGCGGGGGAGGAGGCGGCTCGAGGGCCGTGCCCGGAGGAT |
| | | CGAGCCCCGCCTGGACTCAGTGCCAGCAGCTGTCCCAGAAACTGTGCACCCTGGCCTGGTCCGC |
| | | CCACCCCCTGGTGGGCCACATGGACCTGCGCGAGGAGGGGGACGAGGAGACGACCAACGACGTG |
| | | CCCCACATCCAGTGCGGGGACGGGTGCGACCCCCAGGGGCTCAGAGACAACTCCCAGTTCTGTC |
| | | TGCAGCGGATCCATCAAGGGCTGATCTTCTACGAGAAGCTGCTGGGGTCAGACATCTTTACCGG |
| | | CGAGCCCAGTCTTCTGCCCGACAGCCCCGTGGGGCAGCTCCATGCCAGCCTGCTGGGGCTGAGC |
| | | CAGCTGCTGCAGCCCGAGGGCCACCACTGGGAGACTCAACAGATCCCCAGCCTGTCGCCCTCCC |
| | | AGCCCTGGCAGAGGCTGCTGCTGCGGTTCAAAATCCTCAGGAGCCTGCAGGCCTTCGTCGCCGT |
| | | GGCCGCCAGAGTGTTCGCGCACGGCGCCGCGACGCTCTCGCCC |
| 996 | IL23-CO12 | ATGTGCCATCAGCAGCTCGTCATCAGCTGGTTCAGCCTCGTCTTCTTGGCCAGCCCCCTCGTCG |
| | | CCATCTGGGAGCTCAAGAAAGACGTGTACGTCGTCGAGCTGGACTGGTACCCCGACGCCCCCGG |
| | | CGAGATGGTCGTCCTAACCTGCGACACCCCCGAGGAGGACGGCATCACGTGGACCCTCGACCAG |
| | | AGCAGCGAGGTCCTCGGCAGCGGAAAAACCCTAACCATACAGGTTAAGGAGTTCGGCGACGCCG |
| | | GCCAGTACACCTGCCACAAGGGGGGCGAGGTCCTATCCCACAGCCTGCTGCTGCTGCACAAAAA |
| | | AGAGGACGGCATCTGGAGCACCGATATCCTGAAAGACCAGAAGGAACCCAAAAATAAGACCTTC |
| | | CTGAGGTGCGAGGCAAAGAATTACAGCGGCAGGTTCACCTGCTGGTGGCTGACCACCATCTCCA |
| | | CGGACCTGACCTTCAGCGTGAAAAGCTCGAGGGGCAGCAGCGACCCGCAGGGCGTGACCTGTGG |
| | | CGCGGCCACCCTGAGCGCCGAGCGCGTGAGGGGCGACAACAAGGAGTACGAATACTCCGTGGAG |
| | | TGCCAGGAGGATTCGGCCTGCCCCGCCGCCGAGGAGTCCCTCCCCATCGAGGTGATGGTGGACG |
| | | CCGTGCACAAGCTGAAGTATGAGAACTACACCTCAAGCTTCTTCATCAGGGACATCATCAAGCC |
| | | CGACCCGCCCAAAAACCTCCAACTGAAGCCCCTGAAGAACAGCCGGCAGGTGGAGGTGTCCTGG |
| | | GAGTACCCCGATACCTGGTCCACCCCGCACTCCTACTTCAGCCTGACGTTCTGCGTGCAGGTGC |
| | | AGGGCAAGTCCAAGCGAGAGAAAAAGGACCGCGTGTTCACCGACAAGACCAGCGCCACCGTGAT |
| | | CTGTCGCAAAAACGCCTCCATCAGCGTGCGCGCCCAGGACCGGTACTACAGCAGCAGTTGGAGC |
| | | GAGTGGGCCAGCGTGCCATGTAGCGGGGGCGGCGGGGGCGGCTCCAGGGCCGTGCCCGGGGGAT |
| | | CGTCGCCAGCCTGGACCCAGTGCCAGCAACTCAGCCAAAAGCTGTGCACCCTCGCCTGGAGCGC |
| | | GCACCCCCTGGTCGGACACATGGATCTGAGGGAAGAGGGCGATGAGGAGACAACCAACGACGTG |
| | | CCCCACATCCAGTGTGGGGACGGCTGCGATCCCCAGGGCCTGCGAGATAACAGCCAGTTCTGTC |
| | | TCCAGCGAATCCATCAGGGGCTGATCTTCTACGAGAAACTGTTGGGCTCCGACATCTTCACCGG |
| | | CGAGCCCAGCCTGCTGCCCGACAGCCCCGTAGGGCAGCTCCACGCCTCCCTGCTGGGGCTGTCG |
| | | CAGCTGCTGCAGCCCGAGGGGCACCACTGGGAAACGCAGCAGATCCCCAGCCTCAGCCCCAGCC |
| | | AACCCTGGCAGAGGCTGCTGCTGAGGTTCAAGATCCTGCGTTCCCTGCAGGCCTTCGTGGCGGT |
| | | GGCCGCCAGGGTCTTCGCACACGGCGCCGCAACCCTGTCCCCG |
| 997 | IL23-CO13 | ATGTGCCATCAGCAACTCGTCATCTCCTGGTTCTCCCTAGTCTTCCTCGCCAGCCCCCTCGTAG |
| | | CCATCTGGGAGCTCAAGAAAGACGTATACGTCGTAGAGCTCGACTGGTACCCGGACGCCCCCGG |
| | | GGAGATGGTCGTACTCACCTGTGACACCCCGGAGGAAGACGGGATCACGTGGACCCTCGACCAA |
| | | TCCTCCGAGGTCCTTGGGAGCGGCAAAACGCTCACCATCCAAGTCAAGGAGTTCGGCGACGCCG |
| | | GACAGTATACCTGCCACAAAGGGGGAGAGGTCCTTAGCCACAGCCTCCTCCTGCTGCACAAGAA |
| | | GGAGGATGGCATCTGGTCCACCGACATACTGAAGGACCAGAAAGAGCCCAAGAACAAAACGTTC |
| | | CTGCGGTGCGAGGCCAAGAATTACAGCGGACGGTTCACCTGCTGGTGGCTGACGACTATCAGCA |
| | | CCGATCTGACCTTCAGCGTGAAGTCCAGCAGGGGCTCCAGCGACCCACAGGGGGTGACCTGCGG |
| | | CGCCGCCACACTCAGCGCCGAGAGGGTGCGGGGTGACAATAAAGAGTACGAGTATAGCGTGGAG |
| | | TGCCAGGAGGACTCCGCGTGTCCCGCCGCCGAGGAGTCCCTGCCGATCGAGGTGATGGTGGACG |
| | | CCGTGCACAAGCTCAAGTACGAGAACTATACCTCCAGCTTTTTCATCAGGGACATCATCAAGCC |
| | | CGACCCACCCAAAAATCTCCAGCTGAAGCCCCTGAAGAACAGCCGCCAGGTGGAGGTGAGCTGG |
| | | GAGTACCCGGACACGTGGTCCACCCCACACAGCTACTTCTCCCTGACCTTTTGCGTGCAAGTGC |
| | | AGGGCAAGAGCAAGAGGGAGAAGAAGGACAGGGTGTTCACTGATAAGACCAGCGCCACCGTGAT |
| | | CTGCAGAAAGAACGCCAGCATCTCCGTGAGGGCCCAAGACCGGTACTATTCCAGCTCCTGGTCC |
| | | GAATGGGCCTCCGTGCCCTGTAGTGGCGGTGGCGGTGGGGGGAGTAGGGCGGTGCCCGGCGGCA |
| | | GCAGCCCCGCATGGACCCAGTGCCAGCAGCTGTCCCAGAAACTGTGTACCCTGGCCTGGTCCGC |
| | | CCATCCCCTGGTCGGCCACATGGACCTGCGCGAGGAGGGCGACGAGGAGACAACAAATGACGTT |
| | | CCCCACATCCAGTGCGGCGACGGCTGCGACCCACAGGGCCTGAGGGACAACAGCCAGTTCTGCC |
| | | TGCAGCGCATCCACCAGGGCCTCATCTTCTACGAGAAGCTGCTGGGCTCGGACATCTTCACCGG |
| | | GGAGCCCAGCCTTCTGCCCGACTCCCCTGTGGGCCAGCTGCATGCCAGCCTGCTGGGCCTGTCG |
| | | CAGCTCTTGCAGCCCGAGGGCCACCACTGGGAGACGCAACAAATCCCTAGCCTGAGCCCCTCCC |
| | | AGCCCTGGCAGAGGCTGCTGCTCCGCTTCAAAATCCTGAGATCCCTCCAGGCCTTCGTCGCCGT |
| | | CGCCGCCCGGGTGTTTGCCCACGGCGCGGCCACCCTGTCCCCC |
| 998 | IL23-CO14 | ATGTGCCACCAGCAGCTCGTCATCAGCTGGTTCTCCCTCGTCTTCCTTGCCTCCCCACTTGTCG |
| | | CCATCTGGGAGCTCAAAAAGGACGTCTACGTCGTCGAGCTCGACTGGTACCCCGACGCCCCCGG |
| | | GGAGATGGTCGTCCTCACCTGCGACACCCCGGAGGAAGACGGCATTACCTGGACCCTCGACCAG |
| | | AGCAGCGAAGTCCTCGGGTCCGGAAAAACCCTCACCATCCAGGTCAAGGAGTTCGGCGACGCCG |
| | | GGCAGTACACGTGCCACAAAGGGGGAGAGGTTCTCAGCCACTCCCTCCTGCTGCTGCACAAGAA |
| | | GGAGGACGGAATCTGGTCCACCGACATCCTCAAGGACCAGAAGGAGCCCAAAAACAAGACCTTC |
| | | CTCAGGTGCGAGGCCAAGAACTACTCCGGCCGGTTTACCTGCTGGTGGCTGACCACCATCAGCA |
| | | CCGACCTCACCTTTAGCGTCAAGTCCTCCCGGGGCAGCAGCGACCCACAGGGCGTGACCTGTGG |
| | | CGCCGCGACCCTGAGCGCCGAGCGCGTGAGGGGCGACAATAAGGAGTACGAGTACAGCGTGGAG |
| | | TGTCAGGAGGACAGCGCCTGCCCCGCCGCGGAGGAGAGCCTGCCCATCGAGGTGATGGTAGACG |
| | | CCGTGCACAAGCTGAAGTATGAGAATTACACCTCCAGCTTCTTCATCCGCGACATAATCAAGCC |
| | | GGACCCTCCCAAGAACCTGCAGCTGAAGCCGCTGAAGAACAGCAGGCAGGTAGAGGTGAGCTGG |
| | | GAGTACCCCGATACATGGTCCACGCCCCATAGCTACTTCTCCCTGACCTTCTGCGTGCAGGTGC |
| | | AAGGCAAGAGCAAGCGGGAGAAGAAAGACCGGGTGTTCACCGACAAGACCAGCGCCACCGTGAT |
| | | CTGCCGAAAGAACGCCAGCATAAGTGTGCGGGCCCAGGACAGGTACTACTCCTCGTCCTGGTCC |
| | | GAGTGGGCCTCAGTGCCCTGTTCGGGCGGTGGGGGCGGCGGGTCCCGCGCCGTGCCAGGAGGGA |
| | | GCAGCCCAGCTTGGACCCAATGCCAGCAACTGTCCCAGAAGCTGTGTACCCTGGCCTGGAGCGC |
| | | CCACCCACTGGTGGGGCACATGGACCTCAGGGAGGAGGGCGATGAGGAGACTACCAACGATGTG |
| | | CCCCACATCCAGTGCGGCGACGGCTGCGACCCCCAGGGCCTGAGGGACAATTCCCAGTTCTGCC |
| | | TGCAGCGGATCCATCAGGGCCTCATCTTCTACGAGAAACTGCTCGGCTCCGATATCTTTACCGG |
| | | GGAGCCCTCCCTGCTGCCGGACAGCCCGGTGGGCCAACTGCACGCCAGCCTGCTGGGCCTGTCC |
| | | CAGCTGCTGCAGCCCGAGGGCCACCACTGGGAGACGCAACAGATCCCAAGCTTGTCCCCATCAC |
| | | AGCCCTGGCAAAGGCTGCTGCTGAGGTTTAAGATCCTGAGGAGCCTGCAGGCCTTCGTGGCCGT |
| | | GGCCGCCAGGGTGTTCGCCCATGGCGCCGCCACCCTGTCCCCC |
| 999 | IL23-CO15 | ATGTGCCACCAGCAGCTCGTCATTAGCTGGTTTAGCCTCGTCTTCCTCGCCAGCCCACTCGTCG |
| | | CCATCTGGGAGCTCAAGAAGGACGTCTACGTCGTCGAGCTCGACTGGTACCCCGACGCCCCGGG |
| | | CGAAATGGTCGTCCTCACCTGTGATACCCCCGAGGAGGACGGCATCACCTGGACCCTCGACCAG |
| | | TCCAGCGAAGTCCTCGGCAGCGGGAAGACCCTTACCATCCAGGTCAAGGAGTTCGGCGACGCCG |
| | | GGCAGTACACCTGCCATAAGGGCGGCGAGGTCCTCTCCCATAGCCTCCTGCTGCTCCACAAGAA |
| | | GGAGGATGGAATTTGGAGCACCGACATCCTGAAGGATCAGAAGGAACCCAAGAACAAGACCTTC |
| | | CTGCGGTGTGAGGCCAAGAACTACTCGGGCAGGTTCACGTGCTGGTGGCTGACCACAATCAGCA |
| | | CCGATCTCACCTTTAGCGTGAAGTCGAGCAGGGGCAGCAGCGACCCCCAGGGCGTGACCTGTGG |
| | | CGCGGCAACCCTGTCCGCCGAACGCGTGAGGGGGGATAACAAGGAGTATGAGTACTCTGTGGAG |
| | | TGCCAGGAGGACTCCGCCTGCCCCGCCGCCGAGGAGAGCCTGCCCATCGAGGTGATGGTGGACG |
| | | CCGTGCACAAGCTGAAATACGAAAACTACACGAGCTCGTTCTTCATCAGGGACATCATCAAACC |
| | | CGACCCCCCTAAGAACCTGCAGCTCAAGCCCCTCAAGAACAGCAGGCAAGTTGAGGTGTCCTGG |
| | | GAGTACCCCGACACATGGAGCACCCCCCATAGCTACTTCTCGCTGACGTTCTGCGTGCAGGTGC |
| | | AGGGCAAGTCCAAGCGGGAGAAGAAGGATCGAGTCTTTACCGACAAGACCAGCGCCACCGTCAT |
| | | CTGCCGGAAGAACGCCAGCATCAGCGTTAGGGCGCAGGATAGATACTATTCCTCCAGCTGGTCC |
| | | GAATGGGCCAGCGTGCCCTGTAGTGGCGGCGGGGGCGGCGGCAGCAGGGCTGTGCCCGGTGGGA |
| | | GCAGCCCCGCCTGGACGCAGTGCCAGCAACTGTCCCAGAAACTGTGCACCCTGGCGTGGAGCGC |
| | | CCACCCCCTGGTCGGCCATATGGACCTGCGGGAGGAGGGCGACGAGGAGACGACCAACGACGTG |
| | | CCCCACATCCAGTGTGGGGACGGCTGCGACCCCCAGGGGCTAAGGGACAACAGCCAGTTCTGCC |
| | | TGCAGAGGATCCACCAGGGCCTCATCTTCTATGAAAAGCTCCTGGGGAGCGACATCTTCACCGG |
| | | CGAGCCCTCCCTGCTGCCCGACAGCCCAGTGGGGCAGCTGCACGCCTCCCTGCTGGGCCTGAGC |
| | | CAGCTGCTGCAGCCCGAGGGGCATCACTGGGAAACCCAGCAGATCCCCAGCCTCAGCCCCAGCC |
| | | AGCCCTGGCAGCGCCTGCTGCTCCGGTTCAAGATCCTGCGGTCCCTCCAGGCCTTTGTGGCCGT |
| | | GGCCGCGAGGGTGTTCGCCCACGGTGCCGCCACCCTGAGCCCG |
| 1000 | IL23-CO16 | ATGTGCCATCAACAGCTAGTCATCAGCTGGTTCTCCCTAGTATTCCTCGCCAGCCCCCTCGTCG |
| | | CCATCTGGGAACTCAAGAAGGACGTCTACGTCGTCGAGCTCGACTGGTACCCGGACGCCCCCGG |
| | | GGAGATGGTCGTTCTCACCTGCGACACCCCCGAGGAGGACGGCATCACCTGGACCTTAGACCAG |
| | | AGCTCGGAGGTCCTCGGCAGCGGGAAAACCCTCACCATCCAGGTCAAAGAGTTCGGCGACGCCG |
| | | GGCAGTACACGTGCCACAAGGGCGGGGAGGTCCTCAGCCACAGCCTCCTGCTGCTGCATAAGAA |
| | | GGAGGACGGCATCTGGTCCACCGACATCCTCAAGGATCAAAAGGAGCCCAAAAATAAGACCTTC |
| | | CTGAGGTGCGAGGCCAAGAATTATAGCGGCAGGTTCACCTGCTGGTGGCTCACGACCATCAGCA |
| | | CCGACCTGACCTTCTCCGTCAAAAGCTCCCGGGGGAGCAGCGATCCCCAGGGCGTTACCTGCGG |
| | | CGCCGCCACCCTGAGCGCCGAGAGGGTCAGAGGGGATAACAAGGAGTATGAGTACTCCGTCGAA |
| | | TGTCAGGAGGACAGCGCCTGTCCCGCCGCCGAAGAGTCACTTCCCATTGAAGTGATGGTCGACG |
| | | CCGTCCACAAACTGAAGTACGAGAACTACACGTCCAGCTTCTTCATCAGGGACATCATCAAGCC |
| | | GGACCCGCCCAAGAACCTGCAGCTGAAGCCCCTTAAGAATAGCCGACAGGTGGAGGTGAGCTGG |
| | | GAGTATCCCGACACCTGGAGCACTCCTCACAGCTACTTCAGCCTCACCTTCTGCGTGCAAGTGC |
| | | AGGGGAAAAGCAAGCGGGAGAAGAAGGACAGGGTGTTCACTGATAAGACCAGCGCCACCGTTAT |
| | | CTGCCGGAAGAATGCCAGCATCAGCGTGCGCGCCCAGGACCGCTATTACTCCAGCTCCTGGTCC |
| | | GAATGGGCCAGCGTCCCCTGCAGCGGTGGCGGCGGGGGTGGTAGCAGGGCCGTGCCCGGTGGCT |
| | | CCTCACCCGCCTGGACCCAATGCCAGCAGCTCAGCCAGAAGCTTTGCACCCTGGCCTGGAGCGC |
| | | ACACCCCCTGGTGGGCCACATGGACCTGCGCGAAGAGGGGGACGAGGAAACCACCAACGACGTG |
| | | CCCCACATCCAGTGCGGGGACGGCTGTGACCCCCAGGGGCTGAGGGACAACTCCCAGTTCTGCC |
| | | TGCAGCGAATACACCAAGGCCTGATCTTCTACGAGAAGCTCCTGGGCAGCGACATCTTCACCGG |
| | | GGAACCCTCCCTGCTGCCGGACAGCCCCGTGGGCCAGCTCCACGCCAGCCTGCTGGGCCTGAGC |
| | | CAGCTGCTGCAGCCGGAGGGGCACCATTGGGAGACGCAGCAGATCCCGAGCCTGTCCCCCAGCC |
| | | AGCCGTGGCAGCGGCTGCTGCTGAGGTTCAAGATCCTCAGGAGCCTCCAGGCCTTCGTGGCCGT |
| | | AGCCGCGCGGGTGTTCGCCCACGGCGCGGCCACCCTCAGTCCT |
| 1001 | IL23-CO17 | ATGTGCCACCAGCAGCTCGTCATCAGCTGGTTCAGCCTCGTTTTCCTCGCCAGCCCGTTAGTCG |
| | | CCATCTGGGAGCTTAAGAAGGACGTTTACGTTGTCGAACTCGACTGGTACCCCGACGCCCCCGG |
| | | CGAGATGGTCGTCCTCACCTGCGATACCCCCGAGGAAGACGGCATCACGTGGACTCTCGACCAG |
| | | TCTAGCGAGGTCTTGGGGAGCGGCAAAACCCTCACCATTCAGGTAAAGGAGTTCGGCGACGCCG |
| | | GCCAGTACACCTGCCACAAGGGCGGCGAGGTCCTCAGCCACAGCCTGCTGCTGCTCCATAAGAA |
| | | AGAAGACGGTATCTGGTCCACGGACATCCTGAAGGACCAGAAGGAGCCCAAGAACAAGACCTTC |
| | | CTGAGGTGCGAGGCCAAGAACTACTCCGGCCGGTTTACCTGCTGGTGGCTTACCACCATCAGCA |
| | | CGGACCTGACCTTCTCCGTGAAGTCCTCAAGGGGCTCCAGCGACCCGCAGGGTGTGACCTGCGG |
| | | CGCGGCCACCCTCTCCGCCGAGCGTGTGCGGGGCGACAACAAGGAGTACGAGTACAGCGTTGAG |
| | | TGTCAAGAGGATTCCGCCTGCCCCGCCGCCGAAGAGAGCCTGCCGATCGAGGTGATGGTGGACG |
| | | CCGTGCACAAACTGAAGTACGAGAACTATACCAGCAGCTTCTTTATCAGGGACATCATCAAACC |
| | | GGACCCTCCCAAGAACCTGCAGCTGAAGCCCCTGAAGAACTCCCGGCAGGTGGAGGTGTCCTGG |
| | | GAGTATCCGGACACGTGGAGCACCCCCCACTCCTACTTCAGCCTGACTTTCTGCGTGCAGGTGC |
| | | AGGGCAAGAGCAAGCGGGAGAAAAAGGACAGGGTGTTCACGGACAAGACCTCCGCCACGGTAAT |
| | | CTGCCGGAAAAACGCCTCCATCAGCGTGCGGGCCCAGGACAGGTACTATAGCAGCAGCTGGTCC |
| | | GAGTGGGCCAGCGTGCCATGTTCCGGAGGGGGCGGCGGCGGCAGCCGGGCCGTGCCAGGTGGGA |
| | | GCAGTCCCGCCTGGACCCAATGCCAGCAGCTGAGCCAGAAGCTCTGCACCCTCGCCTGGAGCGC |
| | | CCACCCCCTGGTGGGCCACATGGACCTGCGCGAGGAGGGCGATGAGGAGACTACCAACGACGTG |
| | | CCCCACATCCAATGCGGGGACGGCTGTGACCCCCAGGGCCTGAGGGACAACAGCCAATTCTGCC |
| | | TGCAGCGGATCCATCAGGGTCTGATTTTCTACGAGAAGCTGCTGGGCAGCGACATCTTCACCGG |
| | | GGAGCCCAGCCTGCTGCCCGATAGCCCCGTGGGACAGCTGCACGCCAGCCTGCTGGGGCTGAGC |
| | | CAACTGCTGCAGCCCGAGGGCCATCACTGGGAGACACAGCAGATCCCCTCGCTGAGCCCCAGCC |
| | | AGCCCTGGCAGAGGCTGCTCCTCCGCTTCAAGATCCTGAGGTCGCTGCAGGCGTTCGTCGCCGT |
| | | CGCAGCGCGCGTGTTCGCCCATGGGGCCGCCACCCTGAGCCCA |
| 1002 | IL23-CO18 | ATGTGCCATCAGCAGCTCGTCATCAGCTGGTTTAGCCTCGTCTTCCTCGCCAGCCCCCTCGTCG |
| | | CGATCTGGGAGCTTAAGAAGGACGTTTACGTCGTCGAACTCGACTGGTATCCCGACGCCCCCGG |
| | | CGAAATGGTAGTCCTGACCTGCGACACCCCGGAGGAGGACGGCATCACCTGGACCCTCGACCAG |
| | | AGCAGCGAGGTACTCGGGTCCGGCAAGACACTCACGATCCAGGTAAAGGAGTTCGGGGACGCGG |
| | | GCCAGTACACTTGCCACAAGGGCGGCGAGGTTCTCTCCCATAGCCTGCTCCTCCTGCACAAGAA |
| | | GGAGGACGGAATCTGGAGCACCGACATCCTGAAGGACCAGAAGGAGCCGAAGAACAAGACCTTC |
| | | CTACGCTGCGAGGCCAAGAACTACTCCGGCCGATTCACTTGCTGGTGGCTGACCACCATCAGCA |
| | | CCGACCTGACCTTCAGCGTGAAAAGCAGCCGGGGGAGCTCCGACCCGCAGGGCGTGACCTGCGG |
| | | CGCCGCCACCCTGAGCGCGGAACGAGTGAGGGGCGACAACAAGGAGTACGAGTACAGCGTGGAG |
| | | TGCCAGGAGGACAGCGCCTGTCCCGCCGCGGAGGAGAGTCTGCCCATCGAAGTCATGGTGGACG |
| | | CCGTGCACAAACTGAAGTACGAGAATTACACCTCAAGCTTCTTCATCAGGGACATCATCAAGCC |
| | | CGACCCGCCCAAGAACCTGCAGCTGAAGCCCCTGAAGAACAGCCGCCAGGTGGAGGTGAGCTGG |
| | | GAGTACCCCGACACGTGGAGCACCCCTCACTCCTACTTCAGCCTGACGTTCTGCGTGCAGGTGC |
| | | AGGGCAAGTCCAAGCGAGAGAAGAAGGACAGGGTGTTCACCGATAAGACCTCCGCAACAGTGAT |
| | | CTGCCGGAAGAACGCCAGCATCAGCGTGAGGGCCCAGGACAGGTATTACTCCAGCTCCTGGAGC |
| | | GAGTGGGCCTCCGTCCCCTGCAGCGGTGGCGGAGGCGGGGGCAGTAGGGCCGTACCCGGCGGAT |
| | | CCAGCCCGGCCTGGACGCAGTGCCAGCAGCTGTCCCAGAAGCTGTGTACCCTGGCCTGGTCGGC |
| | | CCACCCACTGGTGGGCCACATGGACCTGAGGGAGGAGGGCGACGAGGAGACGACCAATGACGTC |
| | | CCCCACATCCAGTGCGGGGATGGCTGCGACCCCCAGGGGCTGAGGGACAATTCCCAGTTTTGCC |
| | | TCCAGAGGATCCACCAGGGCCTGATCTTCTACGAGAAGCTCCTGGGGAGCGACATCTTCACGGG |
| | | CGAGCCCAGCCTGCTGCCCGATTCCCCCGTAGGCCAGCTGCACGCCAGCCTGCTGGGCCTGAGC |
| | | CAGCTGCTCCAGCCCGAGGGCCATCACTGGGAGACACAGCAGATCCCGAGCCTGAGCCCCAGCC |
| | | AGCCCTGGCAGAGGCTCCTGCTGAGGTTTAAGATCCTGAGGAGCCTGCAGGCCTTCGTGGCCGT |
| | | GGCCGCCCGGGTGTTCGCCCACGGGGCGGCCACCCTCAGCCCC |
| 1003 | IL23-CO19 | ATGTGCCACCAGCAGCTCGTTATAAGCTGGTTCTCCCTCGTCTTCTTGGCCTCACCCCTCGTAG |
| | | CCATCTGGGAGCTCAAGAAAGACGTCTACGTAGTCGAGCTCGACTGGTATCCCGACGCCCCGGG |
| | | AGAGATGGTCGTCCTCACCTGCGATACCCCCGAGGAGGACGGGATAACCTGGACCCTCGATCAG |
| | | TCCAGCGAGGTCCTCGGCAGCGGCAAGACCCTCACCATCCAGGTAAAAGAGTTCGGCGACGCCG |
| | | GCCAGTACACCTGCCACAAGGGCGGCGAAGTTCTCTCCCACTCCCTGCTGCTGCTCCACAAGAA |
| | | GGAGGACGGCATCTGGTCCACGGACATCCTGAAGGACCAAAAGGAGCCCAAAAACAAAACCTTC |
| | | CTGAGGTGCGAAGCCAAGAATTATTCCGGCCGGTTCACCTGCTGGTGGCTCACGACCATCAGCA |
| | | CGGACCTGACGTTCAGCGTCAAGAGCAGCAGGGGCAGCAGCGACCCCCAGGGGGTGACCTGCGG |
| | | GGCCGCCACCCTGAGCGCCGAGAGGGTCAGGGGCGATAACAAGGAGTATGAGTACAGCGTCGAG |
| | | TGCCAGGAAGATAGCGCCTGCCCCGCCGCCGAGGAGAGCCTGCCCATCGAGGTGATGGTGGACG |
| | | CCGTCCACAAGCTGAAATACGAAAACTACACCAGCTCGTTCTTCATCCGGGATATCATCAAGCC |
| | | CGATCCCCCCAAGAACCTCCAGCTGAAACCCCTGAAAAACTCCCGGCAGGTGGAGGTGTCGTGG |
| | | GAGTACCCCGACACCTGGTCCACCCCCCACTCATACTTCAGCCTGACGTTCTGTGTGCAGGTGC |
| | | AGGGAAAGTCCAAGCGGGAGAAGAAGGACCGCGTGTTCACGGATAAAACTAGCGCCACCGTGAT |
| | | CTGCAGGAAGAACGCGAGCATCAGCGTGCGGGCCCAGGATAGGTACTACTCCAGCTCCTGGAGC |
| | | GAGTGGGCCAGCGTGCCGTGTTCCGGGGGCGGAGGCGGAGGAAGCAGGGCCGTGCCCGGCGGCA |
| | | GCTCCCCCGCCTGGACACAGTGCCAACAGCTGAGCCAGAAGCTGTGCACCCTGGCGTGGTCCGC |
| | | CCACCCCCTGGTGGGCCACATGGACCTGAGGGAGGAGGGCGACGAGGAGACAACAAACGATGTG |
| | | CCGCATATCCAGTGCGGCGACGGGTGCGATCCCCAGGGGCTGCGGGACAACTCACAATTCTGCC |
| | | TGCAGAGGATCCATCAGGGGCTAATCTTCTATGAGAAGCTCCTGGGTAGCGACATCTTCACAGG |
| | | CGAGCCCTCCCTGCTGCCCGACAGCCCCGTGGGCCAACTGCACGCCTCGTTGCTGGGGCTGTCC |
| | | CAGCTGCTTCAGCCGGAGGGACACCATTGGGAGACGCAGCAGATCCCCTCCCTGAGCCCCAGCC |
| | | AGCCCTGGCAACGTCTCCTGCTGCGGTTCAAGATCCTCCGGTCGCTGCAGGCATTCGTGGCCGT |
| | | CGCCGCCCGGGTGTTCGCCCACGGCGCCGCCACCCTGTCGCCT |
| 1004 | IL23-CO20 | ATGTGCCACCAGCAGCTCGTAATCAGCTGGTTCTCCCTCGTCTTTCTCGCCAGCCCACTCGTCG |
| | | CCATTTGGGAGCTCAAGAAGGACGTGTACGTCGTCGAACTAGATTGGTACCCCGACGCCCCGGG |
| | | GGAGATGGTCGTCCTTACCTGCGACACCCCAGAGGAGGACGGTATCACCTGGACCCTTGACCAG |
| | | AGCAGCGAGGTCCTCGGGAGCGGGAAGACCCTCACCATCCAGGTCAAGGAGTTCGGCGACGCCG |
| | | GCCAGTACACCTGCCACAAGGGGGGCGAAGTCCTATCCCACAGCCTGCTGCTCCTGCACAAGAA |
| | | GGAGGATGGCATCTGGTCCACCGACATCCTGAAGGACCAGAAAGAGCCAAAAAATAAGACCTTC |
| | | CTGCGGTGTGAGGCCAAAAACTACAGCGGGCGGTTCACCTGCTGGTGGCTCACAACCATCAGCA |
| | | CCGACCTGACCTTCTCCGTCAAGAGCAGCAGGGGGAGCAGCGATCCCCAGGGGGTGACTTGTGG |
| | | TGCCGCCACCCTGAGCGCGGAGAGGGTGAGGGGCGACAACAAGGAATACGAGTACAGCGTGGAG |
| | | TGTCAGGAAGACTCCGCCTGCCCCGCCGCCGAGGAGTCCCTCCCCATCGAGGTGATGGTGGACG |
| | | CCGTGCACAAGCTCAAGTACGAGAACTACACGTCCAGCTTCTTCATCCGGGACATCATCAAACC |
| | | TGATCCCCCGAAGAACCTGCAGCTGAAGCCGCTGAAGAACAGCAGGCAAGTGGAGGTGAGCTGG |
| | | GAGTACCCCGACACGTGGAGCACCCCCCACAGCTACTTCAGCCTGACCTTCTGCGTCCAGGTGC |
| | | AGGGCAAGTCCAAGAGGGAGAAGAAGGACCGCGTGTTTACCGACAAGACAAGCGCTACCGTGAT |
| | | CTGCCGAAAGAACGCCTCCATCTCCGTGAGGGCCCAGGACCGGTACTATAGCAGCTCATGGTCC |
| | | GAGTGGGCCTCCGTGCCATGCTCCGGCGGCGGCGGCGGCGGATCTAGGGCCGTGCCCGGCGGGA |
| | | GTAGCCCCGCGTGGACCCAGTGCCAACAGCTCAGCCAGAAGCTCTGTACCCTGGCCTGGTCAGC |
| | | CCACCCCCTGGTGGGCCACATGGACCTGAGGGAAGAGGGAGACGAGGAAACCACCAACGACGTG |
| | | CCCCACATCCAGTGCGGCGACGGCTGCGACCCCCAGGGCCTCCGGGACAACAGCCAGTTCTGTC |
| | | TGCAGAGGATCCACCAGGGGCTGATCTTCTATGAAAAGCTGCTGGGCTCCGACATCTTCACCGG |
| | | GGAGCCCAGCCTGCTGCCCGATAGCCCCGTGGGCCAGCTGCACGCCTCCTTGCTGGGCCTGTCG |
| | | CAACTGCTGCAGCCCGAGGGTCACCACTGGGAGACTCAGCAGATCCCGAGCCTGTCCCCCAGCC |
| | | AGCCCTGGCAAAGGCTGCTGCTGAGGTTCAAGATCCTCCGGTCACTGCAGGCCTTCGTGGCCGT |
| | | GGCCGCCAGGGTGTTCGCCCACGGTGCCGCGACGCTGAGCCCC |
| 1005 | IL23-CO21 | ATGTGTCACCAGCAACTCGTTATCTCCTGGTTCAGCTTGGTCTTCCTCGCCAGCCCCCTCGTCG |
| | | CCATCTGGGAGCTCAAGAAGGACGTCTACGTCGTCGAGCTTGACTGGTACCCCGACGCCCCCGG |
| | | CGAGATGGTTGTCCTCACGTGCGACACCCCCGAGGAGGACGGGATCACCTGGACCTTGGACCAA |
| | | AGCAGCGAGGTTCTCGGCAGCGGCAAGACCCTCACCATCCAGGTCAAGGAGTTCGGAGACGCCG |
| | | GCCAGTATACCTGCCACAAGGGCGGGGAGGTCCTCAGCCACAGCCTGCTCCTGCTGCACAAGAA |
| | | AGAGGATGGGATATGGTCCACAGACATCCTGAAGGATCAGAAGGAGCCAAAGAATAAGACCTTC |
| | | CTCCGCTGTGAGGCCAAGAACTACTCTGGCCGCTTCACCTGCTGGTGGCTGACCACCATCTCCA |
| | | CCGACCTCACCTTCAGCGTCAAGAGCAGCCGGGGGAGCTCCGACCCTCAAGGAGTGACCTGCGG |
| | | CGCCGCCACCCTGAGCGCCGAAAGGGTGCGGGGCGACAACAAGGAGTACGAGTACAGCGTGGAG |
| | | TGCCAAGAGGACTCCGCGTGCCCCGCCGCCGAAGAGAGCCTGCCCATCGAGGTGATGGTGGACG |
| | | CCGTCCACAAGCTGAAGTACGAGAACTACACCAGCAGCTTTTTCATCCGAGATATCATCAAGCC |
| | | CGACCCTCCCAAGAACCTGCAGCTGAAGCCCCTGAAGAACAGCAGGCAGGTGGAGGTTTCCTGG |
| | | GAATACCCTGACACCTGGTCCACCCCCCACTCCTACTTCAGCCTGACGTTCTGTGTGCAGGTTC |
| | | AGGGTAAAAGCAAAAGGGAAAAGAAGGACAGGGTGTTCACGGACAAGACGAGCGCCACCGTGAT |
| | | CTGTCGAAAGAACGCTTCGATCAGCGTGAGGGCCCAAGATAGGTACTACAGCAGCAGCTGGTCC |
| | | GAATGGGCCTCCGTGCCCTGCAGCGGGGGCGGCGGCGGAGGAAGCCGCGCCGTGCCAGGTGGCA |
| | | GCTCGCCCGCCTGGACCCAATGCCAGCAACTGAGCCAGAAACTGTGTACCCTGGCCTGGTCCGC |
| | | CCACCCCCTGGTGGGCCATATGGACCTGAGGGAGGAGGGCGACGAGGAGACGACCAACGACGTG |
| | | CCGCACATCCAGTGTGGGGACGGCTGCGACCCCCAGGGCCTGCGGGACAACAGCCAGTTCTGCC |
| | | TGCAGAGGATCCACCAGGGGCTCATTTTCTACGAGAAGCTGTTGGGCAGCGACATATTCACGGG |
| | | GGAACCCTCGCTGCTCCCCGATAGCCCCGTCGGCCAGCTGCACGCCAGCCTGCTGGGGCTGAGC |
| | | CAGCTGCTGCAGCCGGAGGGGCACCACTGGGAGACACAGCAGATCCCGAGCCTGAGCCCGAGCC |
| | | AGCCCTGGCAGAGGCTGCTGCTTAGGTTCAAGATCCTGCGGTCCCTGCAGGCCTTCGTGGCCGT |
| | | GGCCGCCCGGGTGTTCGCCCACGGCGCCGCCACCCTGTCACCG |
| 1006 | IL23-CO22 | ATGTGCCACCAACAGCTCGTCATCTCGTGGTTCTCCCTCGTATTCCTCGCGTCCCCCCTCGTCG |
| | | CGATCTGGGAGCTCAAAAAAGACGTGTACGTGGTTGAGCTCGACTGGTACCCCGACGCCCCCGG |
| | | AGAGATGGTCGTCCTCACCTGCGACACCCCCGAGGAGGACGGCATCACCTGGACCCTCGACCAG |
| | | AGCAGCGAGGTCTTAGGGAGCGGCAAGACCCTCACCATCCAGGTCAAAGAGTTCGGCGACGCCG |
| | | GACAGTACACCTGCCACAAAGGGGGCGAGGTCCTCAGCCACAGCCTGCTGCTCCTGCATAAGAA |
| | | AGAGGACGGCATTTGGAGCACGGACATCCTCAAGGACCAGAAGGAGCCCAAGAATAAGACGTTC |
| | | CTGAGGTGCGAGGCCAAGAATTACAGCGGGAGGTTCACCTGCTGGTGGCTGACCACCATCTCCA |
| | | CCGACCTGACCTTCAGCGTGAAGTCGAGCAGGGGCAGCAGCGATCCCCAGGGCGTGACCTGCGG |
| | | GGCCGCCACCCTGAGCGCCGAGCGCGTGAGGGGAGACAACAAGGAATACGAGTACAGCGTGGAA |
| | | TGCCAGGAGGACAGCGCCTGCCCCGCGGCTGAGGAGAGCCTCCCGATCGAGGTTATGGTGGATG |
| | | CGGTGCACAAGCTGAAGTACGAGAACTACACCTCCAGCTTCTTCATCAGGGACATCATCAAGCC |
| | | CGATCCGCCCAAGAATCTGCAGCTCAAGCCCCTGAAGAACTCGCGGCAGGTGGAGGTGAGCTGG |
| | | GAATACCCCGACACCTGGAGCACCCCCCACTCGTATTTCAGCTTAACCTTCTGCGTGCAGGTAC |
| | | AGGGAAAATCCAAGAGGGAGAAGAAGGACAGGGTCTTCACCGACAAGACCAGCGCCACCGTGAT |
| | | CTGCCGGAAGAATGCCAGCATTAGCGTGAGGGCGCAGGACAGGTACTACTCCAGCAGCTGGTCG |
| | | GAGTGGGCCTCAGTGCCCTGCAGCGGCGGGGGCGGCGGCGGCAGCAGGGCCGTCCCAGGCGGCT |
| | | CCAGCCCCGCATGGACTCAATGCCAGCAGCTGTCCCAGAAACTCTGTACCCTGGCGTGGTCCGC |
| | | CCATCCCCTGGTGGGCCACATGGATCTCAGGGAGGAGGGGGACGAGGAGACTACCAACGACGTG |
| | | CCCCACATCCAGTGCGGCGACGGCTGCGACCCCCAGGGCCTGAGGGATAACAGCCAGTTCTGTC |
| | | TGCAAAGGATCCACCAAGGACTGATCTTCTACGAAAAACTGCTGGGCTCCGACATCTTCACCGG |
| | | CGAGCCCAGCCTGCTGCCCGACTCACCCGTGGGCCAGCTGCATGCCAGCCTGCTCGGCCTGAGC |
| | | CAGCTGCTGCAGCCGGAGGGGCACCACTGGGAGACGCAGCAAATCCCCAGCCTCAGTCCCAGCC |
| | | AGCCATGGCAGAGGCTGCTGCTGAGGTTCAAAATCCTCAGGTCGCTGCAGGCCTTCGTGGCAGT |
| | | GGCCGCGCGGGTCTTCGCCCATGGGGCAGCGACCCTGTCCCCC |
| 1007 | IL23-CO23 | ATGTGCCACCAGCAGTTGGTCATCAGCTGGTTTAGCCTCGTCTTTCTCGCCTCCCCCCTTGTCG |
| | | CCATCTGGGAGCTCAAGAAGGACGTCTACGTTGTCGAGCTCGACTGGTACCCGGACGCCCCCGG |
| | | CGAGATGGTCGTCCTCACCTGCGACACCCCCGAGGAGGACGGCATCACCTGGACGCTCGACCAG |
| | | TCCAGCGAGGTCCTCGGGAGCGGTAAGACACTAACCATTCAGGTCAAGGAGTTCGGGGACGCCG |
| | | GCCAGTACACCTGCCACAAGGGGGGAGAGGTACTCAGCCACAGCCTGCTGCTGCTGCACAAAAA |
| | | GGAGGACGGCATCTGGAGCACCGATATCCTGAAGGACCAGAAGGAGCCCAAGAACAAGACCTTC |
| | | CTGCGGTGCGAGGCAAAGAACTACAGCGGCAGGTTCACCTGCTGGTGGCTCACAACCATTAGCA |
| | | CCGACCTGACCTTCAGCGTCAAAAGCTCCCGGGGCAGCTCCGACCCGCAGGGCGTGACCTGTGG |
| | | CGCGGCAACGCTGAGCGCCGAGCGTGTGAGGGGCGACAACAAGGAGTACGAGTACTCCGTGGAG |
| | | TGCCAGGAGGACTCCGCTTGTCCCGCCGCGGAGGAGAGCCTGCCCATCGAAGTGATGGTGGACG |
| | | CCGTGCATAAGCTGAAATACGAGAACTACACCAGCTCCTTTTTCATCCGCGACATCATCAAACC |
| | | TGACCCGCCCAAAAACCTGCAGCTGAAGCCCCTCAAGAACAGCAGGCAAGTGGAGGTCAGCTGG |
| | | GAATACCCAGACACCTGGAGCACACCCCACTCCTACTTTAGCCTGACCTTTTGTGTGCAGGTGC |
| | | AGGGCAAGTCGAAGAGGGAGAAAAAGGATCGTGTGTTCACCGACAAGACCTCCGCCACCGTGAT |
| | | CTGCCGCAAGAACGCCAGCATCAGCGTGCGGGCCCAGGACAGGTACTACAGCTCCAGCTGGTCA |
| | | GAATGGGCCAGCGTGCCCTGTAGCGGCGGCGGCGGAGGCGGCAGCCGTGCAGTTCCGGGGGGCA |
| | | GCAGCCCCGCCTGGACCCAGTGCCAGCAGCTGAGCCAGAAGCTGTGCACTCTGGCATGGTCCGC |
| | | CCACCCCCTGGTGGGCCACATGGACCTGCGAGAGGAGGGCGACGAGGAGACTACCAACGACGTG |
| | | CCCCACATCCAGTGCGGGGACGGCTGCGACCCCCAGGGGCTGCGCGACAACAGCCAGTTCTGCC |
| | | TGCAGAGGATACACCAGGGACTCATATTTTACGAGAAGCTCCTGGGGAGCGACATCTTCACCGG |
| | | CGAGCCGAGCCTCCTGCCGGACTCGCCCGTTGGCCAGCTGCATGCCAGCCTCCTGGGGCTGTCC |
| | | CAACTCCTCCAGCCCGAGGGCCACCATTGGGAAACCCAGCAGATCCCCAGCCTGAGCCCCAGCC |
| | | AGCCCTGGCAGAGGCTGCTGCTGAGGTTCAAAATCCTGCGAAGCCTCCAGGCTTTCGTGGCCGT |
| | | GGCCGCCAGGGTGTTCGCCCACGGGGCCGCCACCCTGTCCCCC |
| 1008 | IL23-CO24 | ATGTGCCATCAGCAACTCGTCATCAGCTGGTTCAGCCTCGTCTTCCTCGCCAGCCCGCTCGTCG |
| | | CCATCTGGGAGCTCAAGAAAGACGTCTACGTCGTCGAGCTCGACTGGTATCCCGACGCCCCCGG |
| | | GGAGATGGTCGTCTTAACCTGCGATACCCCCGAAGAGGACGGGATCACCTGGACCCTCGACCAA |
| | | AGCAGCGAGGTACTCGGCAGCGGCAAGACCCTCACCATCCAGGTCAAAGAGTTCGGGGACGCCG |
| | | GGCAGTACACCTGCCACAAGGGCGGGGAGGTTCTCTCCCACAGCCTGCTCCTGCTGCACAAGAA |
| | | GGAAGACGGCATCTGGTCCACCGACATCCTAAAGGACCAGAAGGAGCCCAAGAACAAGACCTTC |
| | | CTGAGGTGCGAGGCCAAGAACTACAGCGGCCGGTTCACCTGCTGGTGGCTCACGACCATCAGCA |
| | | CCGACCTCACCTTCAGCGTGAAAAGCTCGAGGGGCAGCAGCGACCCCCAGGGCGTGACCTGCGG |
| | | CGCCGCCACCCTGAGCGCGGAGAGGGTGAGGGGCGACAACAAGGAGTACGAGTACTCCGTGGAG |
| | | TGCCAGGAGGACAGCGCCTGCCCCGCCGCCGAGGAATCCCTGCCCATCGAGGTAATGGTGGACG |
| | | CCGTGCACAAGCTGAAATACGAGAACTACACCAGCTCCTTTTTCATCCGCGACATCATCAAGCC |
| | | CGACCCCCCAAAGAACCTGCAGCTGAAGCCACTGAAGAACAGCCGGCAGGTGGAGGTTTCGTGG |
| | | GAGTACCCAGACACCTGGAGCACCCCGCACAGCTACTTCAGCCTGACCTTTTGCGTCCAGGTGC |
| | | AGGGTAAGTCCAAAAGGGAGAAAAAGGACCGGGTTTTCACCGACAAGACCAGCGCCACCGTGAT |
| | | CTGCAGGAAGAACGCCAGCATCTCCGTGAGAGCCCAGGACAGGTACTATAGCTCCTCCTGGAGC |
| | | GAGTGGGCGAGCGTGCCATGCTCGGGCGGCGGCGGGGGAGGTTCGCGCGCCGTTCCCGGTGGCA |
| | | GCAGTCCGGCCTGGACCCAGTGCCAACAGCTGTCCCAGAAGCTTTGCACTCTCGCATGGTCCGC |
| | | CCACCCCCTGGTGGGCCACATGGACCTCCGGGAGGAGGGCGATGAGGAAACCACCAACGATGTG |
| | | CCCCACATCCAGTGCGGCGACGGATGCGACCCCCAGGGTCTGCGGGACAACAGCCAGTTCTGCC |
| | | TCCAGCGCATACACCAAGGCCTGATCTTCTATGAGAAGCTCCTGGGATCCGACATCTTCACCGG |
| | | CGAGCCCTCGCTCCTGCCGGACAGCCCGGTGGGCCAGCTGCACGCCTCCCTCCTGGGACTCAGC |
| | | CAGCTGCTGCAGCCCGAGGGCCACCACTGGGAGACGCAGCAGATCCCCAGCCTGAGCCCCAGCC |
| | | AGCCCTGGCAAAGGCTGCTGCTGAGGTTCAAAATCCTCAGGTCCTTGCAGGCCTTCGTGGCCGT |
| | | GGCCGCGCGAGTGTTCGCCCACGGGGCCGCCACCCTCAGCCCC |
| 1009 | IL23-CO25 | ATGTGCCACCAGCAGCTCGTCATCAGCTGGTTCTCCCTCGTCTTCCTAGCCAGCCCCTTGGTCG |
| | | CAATCTGGGAGCTTAAGAAGGACGTCTACGTTGTCGAGCTGGACTGGTACCCCGACGCCCCCGG |
| | | CGAGATGGTCGTTCTTACCTGCGACACCCCCGAGGAGGACGGGATCACCTGGACCCTCGATCAG |
| | | AGCAGCGAGGTCCTCGGCAGCGGCAAGACCTTGACCATCCAGGTCAAGGAATTCGGCGACGCCG |
| | | GCCAGTACACGTGCCACAAGGGGGGCGAGGTACTCTCGCATTCGCTGCTACTGCTCCACAAGAA |
| | | GGAGGACGGGATCTGGAGCACCGACATCCTAAAGGACCAGAAGGAGCCCAAGAACAAGACCTTC |
| | | CTGCGGTGCGAAGCCAAGAACTACAGCGGGCGGTTTACCTGCTGGTGGCTGACCACCATTAGCA |
| | | CCGACCTGACCTTCTCCGTGAAAAGCTCAAGGGGCAGCAGCGACCCCCAGGGCGTCACCTGCGG |
| | | CGCCGCCACCCTCAGCGCCGAGAGGGTGAGGGGTGATAACAAGGAGTACGAGTACTCCGTGGAA |
| | | TGCCAAGAGGACAGCGCCTGCCCCGCCGCCGAGGAATCCCTCCCCATCGAGGTCATGGTGGATG |
| | | CTGTGCACAAGCTCAAGTACGAGAACTACACCAGCAGCTTCTTCATCCGAGACATCATCAAGCC |
| | | GGATCCCCCCAAGAACCTGCAGCTGAAGCCCCTGAAAAACAGCCGGCAGGTGGAGGTGAGTTGG |
| | | GAGTACCCCGACACCTGGAGCACGCCCCACAGCTATTTCAGCCTGACGTTCTGCGTGCAGGTGC |
| | | AGGGCAAGTCTAAGAGGGAGAAAAAAGACAGGGTGTTCACCGATAAGACCAGCGCCACCGTGAT |
| | | CTGCCGTAAGAACGCCAGCATCAGCGTGAGGGCCCAGGACCGGTACTACTCCAGCTCGTGGAGC |
| | | GAGTGGGCTAGCGTTCCATGCAGCGGAGGCGGCGGCGGGGGATCAAGAGCCGTGCCCGGGGGGT |
| | | CCTCCCCCGCCTGGACCCAATGTCAGCAGCTGTCCCAGAAGCTGTGTACGCTGGCATGGAGCGC |
| | | CCACCCCCTTGTCGGGCACATGGATCTGCGGGAGGAGGGGGACGAGGAAACCACCAACGACGTT |
| | | CCCCATATCCAGTGCGGGGACGGCTGCGACCCCCAGGGCCTCCGGGACAACAGCCAATTCTGCC |
| | | TGCAAAGGATCCACCAGGGCCTGATCTTCTACGAGAAGCTGCTGGGCAGCGACATCTTCACGGG |
| | | CGAGCCTAGCCTGCTCCCGGACTCCCCTGTGGGCCAACTGCACGCCAGCCTGCTCGGGCTGAGC |
| | | CAGTTGCTGCAGCCGGAGGGCCACCACTGGGAGACTCAACAGATCCCCTCCCTGAGCCCCAGCC |
| | | AGCCCTGGCAGAGGCTGCTGCTCCGCTTTAAGATCCTGCGGAGCTTGCAGGCCTTTGTGGCAGT |
| | | GGCCGCGCGCGTGTTCGCCCACGGCGCAGCCACCCTGTCACCC |

[2021] The sequence-optimized IL23 polynucleotide sequences disclosed herein are distinct from the corresponding wild type nucleotide acid sequences and from other known sequence-optimized nucleotide sequences, e.g., these sequence-optimized nucleic acids have unique compositional characteristics. See FIGS. 102A to 103E.

[2022] In some embodiments, the percentage of uracil or thymine nucleobases in a sequence-optimized IL23 polynucleotide sequence (e.g., encoding an IL12B and/or IL23A polypeptide, a functional fragment, or a variant thereof) is modified (e.g., reduced) with respect to the percentage of uracil or thymine nucleobases in the reference wild-type nucleotide sequence. Such a sequence is referred to as a uracil-modified or thymine-modified sequence.

[2023] In some embodiments, the sequence-optimized IL23 polynucleotide sequence has a lower uracil or thymine content than the uracil or thymine content in the reference wild-type sequence. In some embodiments, the uracil or thymine content in a sequence-optimized IL23 polynucleotide sequence disclosed herein is greater than the uracil or thymine content in the reference wild-type sequence and still maintain beneficial effects, e.g., increased expression and/or reduced Toll-Like Receptor (TLR) response when compared to the reference wild-type sequence.

[2024] In some embodiments, the IL23-encoding optimized sequences disclosed herein contain unique ranges of uracils or thymine (if DNA) in the sequence. The uracil or thymine content of the optimized sequences can be expressed in various ways, e.g., uracil or thymine content of optimized sequences relative to the theoretical minimum (% U_{TM} or % T_{TM}), relative to the wild-type (% U_{WT} or % T_{WT}), and relative to the total nucleotide content (% U_{TL} or % T_{TL}). For DNA it is recognized that thymine is present instead of uracil, and one would substitute T where U appears. Thus, all the disclosures related to, e.g., % U_{TM}, % U_{WT}, or % U_{TL}, with respect to RNA are equally applicable to % T_{TM}, % T_{WT}, or % T_{TL} with respect to DNA.

[2025] In some embodiments, the % U_{TM} of a uracil-modified sequence encoding an IL12B polypeptide disclosed herein is below 196%, below 195%, below 190%, below 185%, below 180%, below 175%, below 170%, below 165%, below 160%, below 155%, below 150%, below 145%, below 140%, below 139%, below 138%, below 137%, below 136%, below 135%, below 134%, below 133%, below 132%, below 131%, below 130%, or below 129%.

[2026] In some embodiments, the % U_{TM} of a uracil-modified sequence encoding an IL12B polypeptide disclosed herein is above 100%, above 101%, above 102%, above 103%, above 104%, above 105%, above 106%, above 107%, above 108%, above 109%, above 110%, above 111%, above 112%, above 113%, above 114%, above 115%, above 116%, above 117%, above 118%, above 119%, above 120%, above 121%, above 122%, above 123%, above 124%, above 125%, or above 126%, above 127%, above 128%, above 129%, or above 130%, above 135%, above 130%, above 131%, above 132%, above 133%, above 134%, above 135%, above 136%, above 137%, above 138%, above 139%, above 140%, above 141%, above 142%, above 143%, above 144%, above 145%, above 146%, above 147%, above 148%, above 149%, above 150%, or above 151%.

[2027] In some embodiments, the % U_{TM} of a uracil-modified sequence encoding an IL12B polypeptide disclosed herein is between 139% and 141%, between 138% and 142%, between 137% and 143%, between 136% and 144%, between 135% and 145%, between 134% and 146%, between 133% and 147%, between 132% and 148%, between 131% and 149%, between 130% and 150%, between 129% and 151%, between 128% and 152%, or between 127% and 153%.

[2028] In some embodiments, the % U_{TM} of a uracil-modified sequence encoding an IL12B polypeptide disclosed herein is between about 100% and about 190%, between about 110% and about 160%, between about 120% and about 160%, between about 125% and about 155%, between about 125% and about 160%, between about 120% and about 155%, between about 130% and about 160%, between about 130% and about 155%, between about 130% and about 150%, or between about 130% and about 165%.

[2029] In some embodiments, the % U_{TM} of a uracil-modified sequence encoding an IL12B polypeptide disclosed herein is between (i) 125%, 126%, 127%, 128%, 129%, 130%, 131%, or 132% and (ii) 150%, 151%, 152%, 153%, 154%, 155%, 156%, or 157%.

[2030] In some embodiments, the % U_{TM} of a uracil-modified sequence encoding an IL12B polypeptide disclosed herein is between about 128% and about 152%.

[2031] In some embodiments, the % U_{WT} or % T_{WT} of a uracil- or thymine-modified sequence encoding a IL23A polypeptide disclosed herein is above 50%, above 55%, above 60%, above 65%, above 70%, above 75%, or above 76%,

[2032] In some embodiments, the % U_{WT} or % T_{WT} of a uracil- or thymine-modified sequence encoding a IL23A polypeptide disclosed herein is less than about 95%, less than about 90%, less than about 85%, less than about 80%, less than about 79%, less than about 78%, or less than about 77%.

[2033] In some embodiments, the % U_{WT} or % T_{WT} of a uracil- or thymine modified sequence encoding a IL23A polypeptide disclosed herein is between 55% and 86%, between 56% and 85%, between 57% and 84%, between 58% and 83%, between 59% and 82%, between 60% and 81%, between 61% and 80%, between 62% and 79%, between 63% and 78%, between 64% and 77%, or between 65% and 77%.

[2034] In some embodiments, the % U_{WT} or % T_{WT} of a uracil- or thymine-modified sequence encoding a IL23A polypeptide disclosed herein is between 63% and 79%, between 64% and 78%, or between 65% and 77%.

[2035] In a particular embodiment, the % U_{WT} or % T_{WT} of a uracil- or thymine-modified sequence encoding a IL23A polypeptide disclosed herein is between about 65% and about 77%.

[2036] The uracil or thymine content of wild-type IL12B relative to the total nucleotide content (%) is about 21%. In some embodiments, the uracil or thymine content of a uracil—or thymine-modified sequence encoding an IL12B polypeptide relative to the total nucleotide content (%) (% U_{TL} or % T_{TL}) is less than 21%. In some embodiments, the % U_{TL} or % T_{TL} is less than 21%, less than 20%, less than 19%, less that 18%, less than 17%, less than 16%, less than 15%, less than 14%, or less than 13%. In some embodiments, the % U_{TL} or % T_{TL} is not less than 13%1, 12%1, 1, 10%, 9%, 8%, 7%, 6%, 5%, 4%, 3%, 2%, or 1%.

[2037] In some embodiments, the uracil or thymine content of a uracil- or thymine-modified sequence encoding an IL12B polypeptide disclosed herein relative to the total nucleotide content (% U_{TL} or % T_{TL}) is between 10% and 22%, between 11% and 21%, between 12% and 20%, between 13% and 19%, between 13% and 18%, or between 13% and 17%. In some embodiments, the uracil or thymine content (% U_{TL} or % T_{TL}) of a uracil—or thymine modified sequence encoding an IL12B polypeptide disclosed herein is less than about 30%, less than about 25%, less than about 20%, less than about 19%, less than about 18%, or less than about 17%.

[2038] In a particular embodiment, the uracil or thymine content (% U_{TL} or % T_{TL}) of a uracil- or thymine modified sequence encoding an IL12B polypeptide disclosed herein is between about 13% and about 17%.

[2039] The uracil or thymine content of wild-type IL23A polypeptide relative to the total nucleotide content (%) is about 22%. In some embodiments, the uracil or thymine content of a uracil- or thymine-modified sequence encoding an IL23A polypeptide relative to the total nucleotide content (%) (% U_{TL} or % T_{TL}) is less than 22%. In some embodiments, the % U_{TL} or % T_{TL} is less than 30%, less than 25%, less than 21%, less than 20%, less than 19%, less than 18%, less than 17%, less than 16%, or less than 15%. In some embodiments, the uracil or thymine content is not less than 16%, 15%, 14%, 13%, 12%, 11%, or 10%. In some embodiments, the % U_{TL} or % T_{TL} is not less than 10%, 9%, 8%, 7%, 6%, 5%, 4%, 3%, 2%, or 1%.

[2040] In some embodiments, the uracil or thymine content of a uracil- or thymine-modified sequence encoding an IL23A polypeptide disclosed herein relative to the total nucleotide content (% U_{TL} or % TT) is between 10% and 22%, between 11% and 21%, between 12% and 20%, between 13% and 19%, between 14% and 18%, or between 14% and 17%.

[2041] In a particular embodiment, the uracil or thymine content (% U_{TL} or % T_{TL}) of a uracil- or thymine modified sequence encoding an IL23A polypeptide disclosed herein is between about 14% and about 17%.

[2042] In some embodiments, a uracil-modified sequence encoding an IL12B polypeptide, IL23A polypeptide, or both IL12B and IL23A polypeptides disclosed herein has a reduced number of consecutive uracils with respect to the corresponding wild-type nucleic acid sequence. For example, two consecutive leucines can be encoded by the sequence CUUUUG, which includes a four uracil cluster. Such a subsequence can be substituted, e.g., with CUGCUC, which removes the uracil cluster.

[2043] Phenylalanine can be encoded by UUC or UUU. Thus, even if phenylalanines encoded by UUU are replaced by UUC, the synonymous codon still contains a uracil pair (UU). Accordingly, the number of phenylalanines in a sequence establishes a minimum number of uracil pairs (UU) that cannot be eliminated without altering the number of phenylalanines in the encoded polypeptide.

[2044] In some embodiments, a uracil-modified sequence encoding an IL12B and/or IL23A polypeptide disclosed herein has a reduced number of uracil triplets (UUU) with respect to the wild-type nucleic acid sequence. In some embodiments, a uracil-modified sequence encoding an IL12B polypeptide of the disclosure contains 4, 3, 2, 1, or no uracil triplets (UUU). In some embodiments, a uracil-modified sequence encoding an IL23A polypeptide of the disclosure contains 2, 1, or no uracil triplets (UUU).

[2045] In some embodiments, a uracil-modified sequence encoding an IL12B and/or IL23A polypeptide has a reduced number of uracil pairs (UU) with respect to the number of uracil pairs (UU) in the wild-type nucleic acid sequence. In some embodiments, a uracil-modified sequence encoding an IL12B and/or IL23A polypeptide of the disclosure has a number of uracil pairs (UU) corresponding to the minimum possible number of uracil pairs (UU) in the wild-type nucleic acid sequence.

[2046] In some embodiments, a uracil-modified sequence encoding an IL12B polypeptide disclosed herein has at least 1, 2, 3, 4, 5, 6, 7, 8, 9, 10, 11, 12, 13, 14, 15, 16, or 17 uracil pairs (UU) less than the number of uracil pairs (UU) in the wild-type nucleic acid sequence. In some embodiments, a uracil-modified sequence encoding an IL12B polypeptide of the disclosure has between 7 and 17 uracil pairs (UU).

[2047] In some embodiments, a uracil-modified sequence encoding a IL23A polypeptide disclosed herein has at least 1, 2, 3, or 4uracil pairs (UU) less than the number of uracil pairs (UU) in the wild-type nucleic acid sequence. In some embodiments, a uracil-modified sequence encoding a IL23A polypeptide disclosed herein has between 5 and 9 uracil pairs (UU).

[2048] In some embodiments, a uracil-modified sequence encoding an IL12B or an IL23A polypeptide disclosed herein has a % UU_{wt} less than 90%, less than 85%, less than 80%, less than 75%, less than 70%, less than 65%, less than 60%, less than 65%, less than 60%, less than 55%, less than 50%, less than 40%, or less than 30%.

[2049] In some embodiments, a uracil-modified sequence encoding an IL12B polypeptide has a % UU_{wt} between 24% and 75%. In a particular embodiment, a uracil-modified sequence encoding an IL12B polypeptide disclosed herein has a % UU_{wt} between 29% and 71%.

[2050] In some embodiments, a uracil-modified sequence encoding a IL23A polypeptide has a % UU_{wt} between 50% and 100%. In a particular embodiment, a uracil-modified sequence encoding a IL23A polypeptide disclosed herein has a % UU_{wt} between 55% and 100%.

[2051] In some embodiments, a uracil-modified sequence encoding a IL23A polypeptide has a % UU_{Wt} less than 100%, less than 90%, less than 85%, less than 80%, less than 75%, less than 70%, less than 65%, less than 60%, less than 65%, or less than 60%.

[2052] In some embodiments, the IL23 polynucleotide comprises a uracil-modified sequence encoding an IL12B polypeptide, an IL23A polypeptide, or both IL12B and IL23A polypeptides disclosed herein. In some embodiments, the uracil-modified sequence encoding an IL12B polypeptide, an IL23A polypeptide, or both IL12B and IL23A polypeptides comprises at least one chemically modified nucleobase, e.g., 5-methoxyuracil. In some embodiments, at least 95% of a nucleobase (e.g., uracil) in a uracil-modified sequence encoding an IL12B polypeptide, an IL23A polypeptide, or both IL12B and IL23A polypeptides of the disclosure are modified nucleobases. In some embodiments, at least 95% of uracil in a uracil-modified sequence encoding an IL12B polypeptide, an IL23A polypeptide, or both IL12B and IL23A polypeptides is 5-methoxyuracil. In some embodiments, the IL23 polynucleotide comprising a uracil-modified sequence further comprises a miRNA binding site, e.g., a miRNA binding site that binds to miR-122. In some embodiments, the IL23 polynucleotide comprising a uracil-modified sequence is formulated with a delivery agent, e.g., a compound having Formula (I), e.g., any of Compounds 1-147.

[2053] In some embodiments, the “guanine content of the sequence optimized ORF encoding IL12B with respect to the theoretical maximum guanine content of a nucleotide sequence encoding the IL12B polypeptide,” abbreviated as % G_{TMX} is at least 67%, at least 70%, at least 75%, at least about 80%, at least about 85%, at least about 90%, at least about 95%, or about 100%. In some embodiments, the % G_{TMX} is between about 65% and about 80%, between about 66% and about 79%, between about 67% and about 78%, between about 68% and about 77%, or between about 69% and about 76%. In some embodiments, the % G_{TMX} is between about 65% and about 85%, between about 70% and about 80%, between about 69% and about 80%, or between about 69% and about 76%.

[2054] In some embodiments, the “guanine content of the sequence optimized ORF encoding IL12B with respect to the theoretical maximum guanine content of a nucleotide sequence encoding the IL12B polypeptide,” abbreviated as % G_{TMX} is less than 100%, less than about 90%, less than about 85%, or less than about 80%.

[2055] In some embodiments, the “guanine content of the sequence optimized ORF encoding IL23A with respect to the theoretical maximum guanine content of a nucleotide sequence encoding the IL23A polypeptide,” abbreviated as % G_{TMX} is at least 67%, at least 68%, at least 69%, at least 70%, or at least 75%, In some embodiments, the % G_{TMX} is between about 65% and about 80%, between about 66% and about 79%, between about 67% and about 79%, between about 68% and about 79%, or between about 69% and about 79%. In some embodiments, the % G_{TMX} is between about 65% and about 85%, between about 68% and about 80%, between about 69% and about 80%, or between about 69% and about 79%.

[2056] In some embodiments, the “guanine content of the sequence optimized ORF encoding IL23A with respect to the theoretical maximum guanine content of a nucleotide sequence encoding the IL23A polypeptide,” abbreviated as % G_{TMX} is less than about 95%, less than about 90%, less than about 85%, less than about 80%, less than about 79%, less than about 78%, or less than about 77%.

[2057] In some embodiments, the “cytosine content of the ORF relative to the theoretical maximum cytosine content of a nucleotide sequence encoding the IL12B polypeptide,” abbreviated as % C_{TMX}, is at least 69%, at least 70%, at least 71%, at least 72%, at least 73%, at least 74%, at least 75%, at least about 76%, or at least 77%. In some embodiments, the % C_{TMX} is between about 60% and about 80%, between about 65% and about 80%, between about 70% and about 80%, or between about 71% and about 78%.

[2058] In some embodiments, the “cytosine content of the ORF relative to the theoretical maximum cytosine content of a nucleotide sequence encoding the IL23A polypeptide,” abbreviated as % C_{TMX}, is at least 65%, at least 70%, at least about 75%. In some embodiments, the % C_{TMX} is between about 60% and about 85%, about 65% and about 80%, between about 66% and about 79%, between about 67% and about 78%, or between about 67% and about 77%. In some embodiments, the % C_{TMX} is less than about 95%, less than about 90%, less than about 85%, less than about 80%, less than about 79%, less than about 78%, or less than about 77%.

[2059] In some embodiments, the “guanine and cytosine content (G/C) of the ORF relative to the theoretical maximum G/C content in a nucleotide sequence encoding the IL12B polypeptide,” abbreviated as % G/C_{TMX} is at least about 89%, at least about 90%, at least about 95%, or about 100%. The % G/C_{TMX} is between about 90% and about 100%, between about 91% and about 99%, between about 91% and about 98%, between about 91% and about 97%, or between about 91% and about 96%.

[2060] In some embodiments, the “guanine and cytosine content (G/C) of the ORF relative to the theoretical maximum G/C content in a nucleotide sequence encoding the IL12B polypeptide,” abbreviated as % G/C_{TMX} is less than 100%, less than 99%, less than 98%, less than 97%, or less than 96%. In some embodiments, the % G/C_{TMX} is between about 80% and about 100%, between about 85% and about 99%, between about 90% and about 97%, or between about 91% and about 96%.

[2061] In some embodiments, the “guanine and cytosine content (G/C) of the ORF relative to the theoretical maximum G/C content in a nucleotide sequence encoding the IL23A polypeptide,” abbreviated as % G/C_{TMX} is at least about 89%, at least about 90%, at least about 95%, or about 100%. The % G/C_{TMX} is between about 90% and about 100%, between about 91% and about 99%, between about 91% and about 98%, between about 91% and about 97%, or between about 91% and about 96%.

[2062] In some embodiments, the “guanine and cytosine content (G/C) of the ORF relative to the theoretical maximum G/C content in a nucleotide sequence encoding the IL23A polypeptide,” abbreviated as % G/C_{TMX} is less than 100%, less than 99%, less than 98%, less than 97%, or less than 96%. In some embodiments, the % G/C_{TMX} is between about 80% and about 100%, between about 85% and about 99%, between about 90% and about 97%, or between about 91% and about 96%. In some embodiments, the “G/C content in the ORF encoding the IL12B polypeptide relative to the G/C content in the corresponding wild-type IL12B polynucleotide ORF,” abbreviated as % G/C_{WT} is at least 100%, at least 105%, at least about 110%, at least about 115%, at least about 116%, or at least about 117%.

[2063] In some embodiments, the “G/C content in the ORF encoding the IL23A polypeptide relative to the G/C content in the corresponding wild-type IL23A polynucleotide ORF,” abbreviated as % G/C_{WT} is 100%, at least 105%, at least at least about 110%, at least about 111%, at least about 112%, at least about 113%, at least about 1¹⁴%, or at least about 115%.

[2064] In some embodiments, the average G/C content in the 3rd codon position in the ORF encoding an IL12B polypeptide is at least 20%, at least 21%, at least 22%, at least 23%, at least 24%, at least 25%, at least 26%, at least 27%, at least 28%, at least 29%, at least 30%, at least 31%, or at least 32% higher than the average G/C content in the 3rd codon position in the corresponding wild-type ORF.

[2065] In some embodiments, the average G/C content in the 3rd codon position in the ORF encoding an IL23A polypeptide is at least 20%, at least 25%, at least 26%, at least 27%, at least 28%, at least 29%, at least 30%, at least 31%, at least 32%, at least 33%, at least 34%, or at least 35% higher than the average G/C content in the 3rd codon position in the corresponding wild-type ORF.

[2066] In some embodiments, the IL23 polynucleotide comprises an open reading frame (ORF) encoding an IL12B or IL23A polypeptide, wherein the ORF has been sequence optimized, and wherein each of % U_{TL}, % U_{WT}, % U_{TM}, % G_{TL}, % G_{WT}, % G_{TMX}, % C_{TL}, % C_{WT}, % C_{TMX}, % G/C_{TL}, % G/C_{WT}, or % G/C_{TMX}, alone or in a combination thereof is in a range between (i) a maximum corresponding to the parameter's maximum value (MAX) plus about 0.5, 1, 1.5, 2, 2.5, 3, 3.5, 4, 4.5, 5, 5.5, 6, 6.5, 7, 7.5, 8, 8.5, 9, 9.5, or 10 standard deviations (STD DEV), and (ii) a minimum corresponding to the parameter's minimum value (MIN) less 0.5, 1, 1.5, 2, 2.5, 3, 3.5, 4, 4.5, 5, 5.5, 6, 6.5, 7, 7.5, 8, 8.5, 9, 9.5, or 10 standard deviations (STD DEV).

[2067] Modified nucleotide sequences encoding IL12B and/or IL23A polypeptides: In some embodiments, the IL23 polynucleotide (e.g., a RNA, e.g., a mRNA) comprises a chemically modified nucleobase, e.g., 5-methoxyuracil. In some embodiments, the mRNA is a uracil-modified sequence comprising an ORF encoding an IL12B polypeptide, an IL23A polypeptide, or both IL12B and IL23A polypeptides, wherein the mRNA comprises a chemically modified nucleobase, e.g., 5-methoxyuracil.

[2068] In some embodiments, when the 5-methoxyuracil base is connected to a ribose sugar, as it is in polynucleotides, the resulting modified nucleoside or nucleotide is referred to as 5-methoxyuridine. In some embodiments, uracil in the IL23 polynucleotide is at least about 25%, at least about 30%, at least about 40%, at least about 50%, at least about 60%, at least about 70%, at least about 80%, at least 90%, at least 95%, at least 99%, or about 100% 5-methoxyuracil. In one embodiment, uracil in the IL23 polynucleotide is at least 95% 5-methoxyuracil. In another embodiment, uracil in the IL23 polynucleotide is 100% 5-methoxyuracil.

[2069] In embodiments where uracil in the IL23 polynucleotide is at least 95% 5-methoxyuracil, overall uracil content can be adjusted such that an mRNA provides suitable protein expression levels while inducing little to no immune response. In some embodiments, the uracil content of the ORF (% U_{TM}) is between about 105% and about 145%, about 105% and about 140%, about 110% and about 140%, about 110% and about 145%, about 115% and about 135%, about 105% and about 135%, about 110% and about 135%, about 115% and about 145%, or about 115% and about 140%. In other embodiments, the uracil content of the ORF is between about 117% and about 134% or between 118% and 132% of the % U_{TM}. In some embodiments, the % U_{TM} is about 115%, about 120%, about 125%, about 130%, about 135%, about 140%, about 145%, or about 150%. In this context, the term “uracil” can refer to 5-methoxyuracil and/or naturally occurring uracil.

[2070] In some embodiments, the % U_{TM} of the mRNA encoding an IL12B polypeptide, an IL23A polypeptide, or both IL12B and IL23A polypeptides disclosed herein is less than about 50%, about 40%, about 30%, or about 20% of the total nucleobase content in the ORF. In some embodiments, the uracil content in the ORF is between about 15% and about 25% of the total nucleobase content in the ORF. In other embodiments, the % U_{TM} is between about 20% and about 30% of the total nucleobase content in the ORF. In one embodiment, the uracil content in the ORF of the mRNA encoding an IL12B polypeptide, an IL23A polypeptide, or both IL12B and IL23A polypeptides is less than about 20% of the total nucleobase content in the open reading frame. In this context, the term “uracil” can refer to 5-methoxyuracil and/or naturally occurring uracil.

[2071] In further embodiments, the ORF of the mRNA encoding an IL12B polypeptide, an IL23A polypeptide, or both IL12B and IL23A polypeptides having 5-methoxyuracil and adjusted uracil content has increased Cytosine (C), Guanine (G), or Guanine/Cytosine (G/C) content (absolute or relative). In some embodiments, the overall increase in C, G, or G/C content (absolute or relative) of the ORF is at least about 2%, at least about 3%, at least about 4%, at least about 5%, at least about 6%, at least about 7%, at least about 10%, at least about 15%, at least about 20%, at least about 40%, at least about 50%, at least about 60%, at least about 70%, at least about 80%, at least about 90%, at least about 95%, or at least about 100% relative to the G/C content (absolute or relative) of the wild-type ORF. In some embodiments, the G, the C, or the G/C content in the ORF is less than about 100%, less than about 90%, less than about 85%, or less than about 80% of the theoretical maximum G, C, or G/C content of the corresponding wild type nucleotide sequence encoding the IL12B polypeptide, the IL23A polypeptide, or both the IL12B and IL23A polypeptides (% G_{TMX};% C_{TMX}, or % G/C_{TMX}). In other embodiments, the G, the C, or the G/C content in the ORF is between about 70% and about 80%, between about 71% and about 79%, between about 71% and about 78%, or between about 71% and about 77% of the % G_{TMX}, % C_{TMX}, or % G/C_{TMX}. In some embodiments, the increases in G and/or C content (absolute or relative) described herein can be conducted by replacing synonymous codons with low G, C, or G/C content with synonymous codons having higher G, C, or G/C content. In other embodiments, the increase in G and/or C content (absolute or relative) is conducted by replacing a codon ending with U with a synonymous codon ending with G or C.

[2072] In further embodiments, the ORF of the mRNA encoding an IL12B polypeptide, an IL23A polypeptide, or both IL12B and IL23A polypeptides comprises 5-methoxyuracil and has an adjusted uracil content containing less uracil pairs (UU) and/or uracil triplets (UUU) and/or uracil quadruplets (UUUU) than the corresponding wild-type nucleotide sequence encoding the IL12B polypeptide, the IL23A polypeptide, or both the IL12B and IL23A polypeptides. In some embodiments, the ORF of the mRNA encoding an IL12B polypeptide, an IL23A polypeptide, or both IL12B and IL23A polypeptides contain no uracil pairs and/or uracil triplets and/or uracil quadruplets. In some embodiments, uracil pairs and/or uracil triplets and/or uracil quadruplets are reduced below a certain threshold, e.g., no more than 1, 2, 3, 4, 5, 6, 7, 8, 9, 10, 11, 12, 13, 14, 15, 16, 17, 18, 19, or 20 occurrences in the ORF of the mRNA encoding the IL12B polypeptide, the IL23A polypeptide, or both the IL12B and IL23A polypeptides. In a particular embodiment, the ORF of the mRNA encoding the IL12B polypeptide, the IL23A polypeptide, or both the IL12B and IL23A polypeptides contain less than 20, 19, 18, 17, 16, 15, 14, 13, 12, 11, 10, 9, 8, 7, 6, 5, 4, 3, 2, or 1 non-phenylalanine uracil pairs and/or triplets. In another embodiment, the ORF of the mRNA encoding the IL12B polypeptide, the IL23A polypeptide, or both the IL12B and IL23A polypeptides contains no non-phenylalanine uracil pairs and/or triplets. In further embodiments, the ORF of the mRNA encoding an IL12B polypeptide, an IL23A polypeptide, or both IL12B and IL23A polypeptides comprise 5-methoxyuracil and has an adjusted uracil content containing less uracil-rich clusters than the corresponding wild-type nucleotide sequence encoding the IL12B polypeptide, the IL23A polypeptide, or both the IL12B and IL23A polypeptides. In some embodiments, the ORF of the mRNA encoding the IL12B polypeptide, the IL23A polypeptide, or both the IL12B and IL23A polypeptides contain uracil-rich clusters that are shorter in length than corresponding uracil-rich clusters in the corresponding wild-type nucleotide sequence encoding the IL12B polypeptide, the IL23A polypeptide, or both the IL12B and IL23A polypeptides.

[2073] In further embodiments, alternative lower frequency codons are employed. At least about 5%, at least about 10%, at least about 15%, at least about 20%, at least about 25%, at least about 30%, at least about 35%, at least about 40%, at least about 45%, at least about 50%, at least about 55%, at least about 60%, at least about 65%, at least about 70%, at least about 75%, at least about 80%, at least about 85%, at least about 90%, at least about 95%, at least about 99%, or 100% of the codons in the IL12B polypeptide, the IL23A polypeptide, or both the IL12B and IL23A polypeptides-encoding ORF of the 5-methoxyuracil-comprising mRNA are substituted with alternative codons, each alternative codon having a codon frequency lower than the codon frequency of the substituted codon in the synonymous codon set. The ORF also has adjusted uracil content, as described above. In some embodiments, at least one codon in the ORF of the mRNA encoding the IL12B polypeptide, the IL23A polypeptide, or both the IL12B and IL23A polypeptides is substituted with an alternative codon having a codon frequency lower than the codon frequency of the substituted codon in the synonymous codon set.

[2074] In some embodiments, the adjusted uracil content, IL12B polypeptide, an IL23A polypeptide, or both IL12B and IL23A polypeptides-encoding ORF of the 5-methoxyuracil-comprising mRNA exhibits expression levels of IL23 when administered to a mammalian cell that are higher than expression levels of IL23 from the corresponding wild-type mRNA. In other embodiments, the expression levels of IL23 when administered to a mammalian cell are increased relative to a corresponding mRNA containing at least 95% 5-methoxyuracil and having a uracil content of about 160%, about 170%, about 180%, about 190%, or about 200% of the theoretical minimum. In yet other embodiments, the expression levels of IL23 when administered to a mammalian cell are increased relative to a corresponding mRNA, wherein at least about 50%, at least about 60%, at least about 70%, at least about 80%, at least about 90%, or about 100% of uracils are 1-methylpseudouracil or pseudouracils. In some embodiments, the mammalian cell is a mouse cell, a rat cell, or a rabbit cell. In other embodiments, the mammalian cell is a monkey cell or a human cell. In some embodiments, the human cell is a HeLa cell, a BJ fibroblast cell, or a peripheral blood mononuclear cell (PBMC). In some embodiments, IL23 is expressed when the mRNA is administered to a mammalian cell in vivo. In some embodiments, the mRNA is administered to mice, rabbits, rats, monkeys, or humans. In one embodiment, mice are null mice. In some embodiments, the mRNA is administered to mice in an amount of about 0.01 mg/kg, about 0.05 mg/kg, about 0.1 mg/kg, or about 0.15 mg/kg. In some embodiments, the mRNA is administered intravenously or intramuscularly. In other embodiments, the IL23 polypeptide is expressed when the mRNA is administered to a mammalian cell in vitro. In some embodiments, the expression is increased by at least about 2-fold, at least about 5-fold, at least about 10-fold, at least about 50-fold, at least about 500-fold, at least about 1500-fold, or at least about 3000-fold. In other embodiments, the expression is increased by at least about 10%, about 20%, about 30%, about 40%, about 50%, 60%, about 70%, about 80%, about 90%, or about 100%.

[2075] In some embodiments, adjusted uracil content, IL12B polypeptide, IL23A polypeptide, or both IL12B and IL23A polypeptides-encoding ORF of the 5-methoxyuracil-comprising mRNA exhibits increased stability. In some embodiments, the mRNA exhibits increased stability in a cell relative to the stability of a corresponding wild-type mRNA under the same conditions. In some embodiments, the mRNA exhibits increased stability including resistance to nucleases, thermal stability, and/or increased stabilization of secondary structure. In some embodiments, increased stability exhibited by the mRNA is measured by determining the half-life of the mRNA (e.g., in a plasma, cell, or tissue sample) and/or determining the area under the curve (AUC) of the protein expression by the mRNA over time (e.g., in vitro or in vivo). An mRNA is identified as having increased stability if the half-life and/or the AUC is greater than the half-life and/or the AUC of a corresponding wild-type mRNA under the same conditions.

[2076] In some embodiments, the IL23 mRNA disclosed herein induces a detectably lower immune response (e.g., innate or acquired) relative to the immune response induced by a corresponding wild-type IL23 mRNA under the same conditions. In other embodiments, the mRNA of the present disclosure induces a detectably lower immune response (e.g., innate or acquired) relative to the immune response induced by an mRNA that encodes for an IL12B polypeptide, an IL23A polypeptide, or both IL12B and IL23A polypeptides but does not comprise 5-methoxyuracil under the same conditions, or relative to the immune response induced by an mRNA that encodes for an IL12B polypeptide, an IL23A polypeptide, or both IL12B and IL23A polypeptides and that comprises 5-methoxyuracil but that does not have adjusted uracil content under the same conditions. The innate immune response can be manifested by increased expression of pro-inflammatory cytokines, activation of intracellular PRRs (RIG-I, MDA5, etc), cell death, and/or termination or reduction in protein translation. In some embodiments, a reduction in the innate immune response can be measured by expression or activity level of Type 1 interferons (e.g., IFN-α, IFN-β, IFN-κ, IFN-δ, IFN-ε, IFN-τ, IFN-ω, and IFN-ζ) or the expression of interferon-regulated genes such as the toll-like receptors (e.g., TLR7 and TLR8), and/or by decreased cell death following one or more administrations of an IL23 mRNA disclosed herein into a cell.

[2077] In some embodiments, the expression of Type-1 interferons by a mammalian cell in response to an 1123 mRNA disclosed herein is reduced by at least 10%, 20%, 30%, 40%, 50%, 60%, 70%, 80%, 90%, 95%, 99%, or greater than 99% relative to a corresponding wild-type mRNA, to an mRNA that encodes an IL12B polypeptide, an IL23A polypeptide, or both IL12B and IL23A polypeptides but does not comprise 5-methoxyuracil, or to an mRNA that encodes an IL12B polypeptide, an IL23A polypeptide, or both IL12B and IL23A polypeptides and that comprises 5-methoxyuracil but that does not have adjusted uracil content. In some embodiments, the interferon is IFN-β. In some embodiments, cell death frequency cased by administration of an IL23 mRNA disclosed herein to a mammalian cell is 10%, 25%, 50%, 75%, 85%, 90%, 95%, or over 95% less than the cell death frequency observed with a corresponding wild-type mRNA, an mRNA that encodes for an IL12B polypeptide, an IL23A polypeptide, or both IL12B and IL23A polypeptides but does not comprise 5-methoxyuracil, or an mRNA that encodes for an IL12B polypeptide, an IL23A polypeptide, or both IL12B and IL23A polypeptides and that comprises 5-methoxyuracil but that does not have adjusted uracil content. In some embodiments, the mammalian cell is a BJ fibroblast cell. In other embodiments, the mammalian cell is a splenocyte. In some embodiments, the mammalian cell is that of a mouse or a rat. In other embodiments, the mammalian cell is that of a human. In one embodiment, the mRNA of the present disclosure does not substantially induce an innate immune response of a mammalian cell into which the mRNA is introduced.

[2078] In some embodiments, the IL23 polynucleotide is an mRNA that comprises an ORF that encodes an IL12B polypeptide, an IL23A polypeptide, or both IL12B and IL23A polypeptides, wherein uracil in the mRNA is at least about 95% 5-methoxyuracil, wherein the uracil content of the ORF is between about 115% and about 135% of the theoretical minimum uracil content in the corresponding wild-type ORF, and wherein the uracil content in the ORF encoding the IL12B polypeptide, the IL23A polypeptide, or both the IL12B and IL23A polypeptides is less than about 30% of the total nucleobase content in the ORF. In some embodiments, the ORF that encodes the IL12B polypeptide, the IL23A polypeptide, or both the IL12B and IL23A polypeptides is further modified to increase G/C content of the ORF (absolute or relative) by at least about 40%, as compared to the corresponding wild-type ORF. In yet other embodiments, the ORF encoding the IL12B polypeptide, the IL23A polypeptide, or both the IL12B and IL23A polypeptides contains less than 20 non-phenylalanine uracil pairs and/or triplets. In some embodiments, at least one codon in the ORF of the mRNA encoding the IL12B polypeptide, the IL23A polypeptide, or both the IL12B and IL23A polypeptides is further substituted with an alternative codon having a codon frequency lower than the codon frequency of the substituted codon in the synonymous codon set. In some embodiments, the expression of the IL12B polypeptide, the IL23A polypeptide, or both the IL12B and IL23A polypeptides encoded by an mRNA comprising an ORF wherein uracil in the mRNA is at least about 95% 5-methoxyuracil, and wherein the uracil content of the ORF is between about 115% and about 135% of the theoretical minimum uracil content in the corresponding wild-type ORF, is increased by at least about 10-fold when compared to expression of the IL12B polypeptide, the IL23A polypeptide, or both the IL12B and IL23A polypeptides from the corresponding wild-type mRNA. In some embodiments, the mRNA comprises an open ORF wherein uracil in the mRNA is at least about 95% 5-methoxyuracil, and wherein the uracil content of the ORF is between about 115% and about 135% of the theoretical minimum uracil content in the corresponding wild-type ORF, and wherein the mRNA does not substantially induce an innate immune response of a mammalian cell into which the mRNA is introduced.

[2079] Polynucleotide comprising an mRNA encoding an IL12B polypeptide, an IL23A polypeptide, or both IL12B and IL23A polypeptides: In certain embodiments, an IL23 polynucleotide of the present disclosure, for example an IL23polynucleotide comprising an mRNA nucleotide sequence encoding an IL12B polypeptide, an IL23A polypeptide, or both IL12B and IL23A polypeptides, comprises from 5′ to 3′ end:
[2080] (i) a 5′ UTR, such as the sequences provided below, comprising a 5′ cap provided below;
[2081] (ii) an open reading frame encoding an IL12B polypeptide, an IL23A polypeptide, or both IL12B and IL23A polypeptides, e.g., a sequence optimized nucleic acid sequence encoding an IL12B polypeptide, an IL23A polypeptide, or both IL12B and IL23A polypeptides disclosed herein;
[2082] (iii) at least one stop codon;
[2083] (iv) a 3′ UTR, such as the sequences provided below; and
[2084] (v) a poly-A tail provided below.

[2085] In some embodiments, the IL23 polynucleotide further comprises a miRNA binding site, e.g, a miRNA binding site that binds to miRNA-122. In some embodiments, the 3′UTR comprises the miRNA binding site.

[2086] In some embodiments, an IL23 polynucleotide of the present disclosure comprises a nucleotide sequence encoding a polypeptide sequence at least 70%, at least 80%, at least 81%, at least 82%, at least 83%, at least 84%, at least 85%, at least 86%, at least 87%, at least 88%, at least 89%, at least 90%, at least 91%, at least 92%, at least 93%, at least 94%, at least 95%, at least 96%, at least 97%, at least 98%, at least 99%, or 100% identical to the protein sequence of a wild type IL12B and/or IL23A.

[2087] Compositions and formulations for use comprising IL23 polynucleotides: Certain aspects of the disclosure are directed to compositions or formulations comprising an IL23 polynucleotide disclosed above.

[2088] In some embodiments, the composition or formulation comprises:
[2089] (i) an IL23 polynucleotide (e.g., a RNA, e.g., a mRNA) comprising a sequence-optimized nucleotide sequence (e.g., an ORF) encoding an IL12B polypeptide, an IL23A polypeptide, or both IL12B and IL23A polypeptides (e.g., the wild-type sequence, functional fragment, or variant thereof), wherein the IL23 polynucleotide comprises at least one chemically modified nucleobase, e.g., 5-methoxyuracil (e.g., wherein at least about 25%, at least about 30%, at least about 40%, at least about 50%, at least about 60%, at least about 70%, at least about 80%, at least about 90%, at least about 95%, at least about 99%, or 100% of the uracils are 5-methoxyuracils), and wherein the IL23 polynucleotide further comprises a miRNA binding site, e.g., a miRNA binding site that binds to miR-122 (e.g., a miR-122-3p or miR-122-5p binding site); and
[2090] (ii) a delivery agent comprising a compound having Formula (I), e.g., any of Compounds 1-147 (e.g., Compound 18, 25, 26 or 48).

[2091] In some embodiments, the uracil or thymine content of the ORF relative to the theoretical minimum uracil or thymine content of a nucleotide sequence encoding the IL12B polypeptide, the IL23A polypeptide, or both the IL12B and IL23A polypeptides (% U_{TM} or % T_{TM}), is between about 100% and about 160%.

[2092] In some embodiments, the polynucleotides, compositions or formulations above are used to treat and/or prevent proliferative diseases, disorders or conditions, e.g., cancer.

### G. Interleukin-12 (IL12)

[2093] Interleukin-12 (IL12. also shown as IL12) is a pleiotropic cytokine, the actions of which create an interconnection between innate and adaptive immunity. IL12 functions primarily as a 70 kDa heterodimeric protein consisting of two disulfide-linked p35 and p40 subunits. The precursor form of the IL12 p40 subunit (NM_002187; P29460; also referred to as IL12B, natural killer cell stimulatory factor 2, cytotoxic lymphocyte maturation factor 2) is 328 amino acids in length, while its mature form is 306 amino acids long.

[2094] The precursor form of the IL12 p35 subunit (NM 000882; P29459; also referred to as IL12A, natural killer cell stimulatory factor 1, cytotoxic lymphocyte maturation factor 1) is 219 amino acids in length and the mature form is 197 amino acids long. Id. The genes for the IL12 p35 and p40 subunits reside on different chromosomes and are regulated independently of each other. Gately, M K et al., Annu Rev Immunol. 16: 495-521 (1998). Many different immune cells (e.g., dendritic cells, macrophages, monocytes, neutrophils, and B cells) produce IL12 upon antigenic stimuli. The active IL12 heterodimer is formed following protein synthesis. Id.

[2095] IL12 is composed of a bundle of four alpha helices. It is a heterodimeric cytokine encoded by two separate genes, IL12A (p35) and IL12B (p40). The active heterodimer (referred to as ‘p70’), and a homodimer of p40 are formed following protein synthesis.

[2096] Due to its ability to activate both NK cells and cytotoxic T cells, IL12 protein has been studied as a promising anti-cancer therapeutic since 1994. See Nastala, C. L. et al., J Immunol 153: 1697-1706 (1994). But despite high expectations, early clinical studies did not yield satisfactory results. Lasek W. et al., Cancer Immunol Immunother 63: 419-435, 424 (2014). Repeated administration of IL12, in most patients, led to adaptive response and a progressive decline of IL12-induced IFN-γ levels in blood. Id. Moreover, while it was recognized that IL12-induced anti-cancer activity is largely mediated by the secondary secretion of IFNγ, the concomitant induction of IFN-γ along with other cytokines (e.g., TNF-α) or chemokines (IP-10 or MIG) by IL12 caused severe toxicity. Id.

[2097] In addition to the negative feedback and toxicity, the marginal efficacy of the IL12 therapy in clinical settings may be caused by the strong immunosuppressive environment in humans. Id. To minimize IFN-γ toxicity and improve IL12 efficacy, scientists tried different approaches, such as different dose and time protocols for IL12 therapy. See Sacco, S. et al., Blood 90: 4473-4479 (1997); Leonard, J. P. et al., Blood 90: 2541-2548 (1997); Coughlin, C. M. et al., Cancer Res. 57: 2460-2467 (1997); Asselin-Paturel, C. et al., Cancer 91: 113-122 (2001); and Saudemont, A. et al., Leukemia 16: 1637-1644 (2002). Nonetheless, these approaches have not significantly impacted patient survival. Kang, W. K., et al., Human Gene Therapy 12: 671-684 (2001).

[2098] Currently, a number of IL12 clinical trials are on-going. Though these multiple clinical trials have been on-going for nearly 20 years since the first human clinical trial of IL12 in 1996, an FDA-approved IL12 product is still not available.

[2099] Therefore, in some embodiments, the IL12 polypeptide of the present disclosure comprises a single polypeptide chain comprising the IL12B and IL12A fused directly or by a linker. In other embodiments, the IL12 polypeptide of the present disclosure comprises two polypeptides, the first polypeptide comprising IL12B and the second polypeptide comprising IL12A. In certain aspects, the disclosure provides an IL12A polypeptide and an IL12B polypeptide, wherein the IL12A and IL12B polypeptides are on the same chain or different chains.

[2100] In some embodiments, the IL12A or IL12B polypeptide of the disclosure is a variant, a peptide or a polypeptide containing a substitution, and insertion and/or an addition, a deletion and/or a covalent modification with respect to a wild-type IL12A or IL12B sequence. In some embodiments, sequence tags or amino acids, can be added to the sequences encoded by the polynucleotides of the disclosure (e.g., at the N-terminal or C-terminal ends), e.g., for localization. In some embodiments, amino acid residues located at the carboxy, amino terminal, or internal regions of a polypeptide of the disclosure can optionally be deleted providing for fragments.

[2101] In some embodiments, the IL12A and/or IL12B polypeptide encoded by the polynucleotide (e.g., a RNA, e.g., an mRNA) comprises a substitutional variant of an IL12A and/or IL12B sequence, which can comprise one, two, three or more than three substitutions. In some embodiments, the substitutional variant can comprise one or more conservative amino acids substitutions. In other embodiments, the variant is an insertional variant. In other embodiments, the variant is a deletional variant.

[2102] In other embodiments, the IL12A and/or IL12B polypeptide encoded the polynucleotide (e.g., a RNA, e.g., an mRNA) comprises a linker fusing the IL12A and IL12B polypeptides. Non-limiting examples of linkers are disclosed elsewhere herein.

[2103] As recognized by those skilled in the art, IL12 protein fragments, functional protein domains, variants, and homologous proteins (orthologs) are also considered to be within the scope of the IL12 polypeptides of the disclosure. Nonlimiting examples of IL12 polypeptides encoded by the polynucleotides of the disclosure are, e.g., SEQ ID NO:1035 and 1037. For example, FIG. 109A shows the amino acid sequence of human wild type IL12 (mature IL12A, and mature IL12B).

[2104] Polynucleotides and Open Reading Frames (ORFs): In certain aspects, the disclosure provides IL12polynucleotides (e.g., a RNA, e.g., an mRNA) that comprise a nucleotide sequence (e.g., an ORF) encoding one or more IL12 polypeptides. In some embodiments, the IL12 polynucleotide (e.g., a RNA, e.g., an mRNA) of the disclosure encodes a single IL12 polypeptide chain comprising an IL12B polypeptide and an IL12A polypeptide, which are fused directly or by a linker,

[2105] wherein the IL12B polypeptide is selected from:
[2106] (i) the full-length IL12B polypeptide (e.g., having the same or essentially the same length as wild-type IL12B);
[2107] (ii) a functional fragment of the full-length IL12B polypeptide (e.g., a truncated (e.g., deletion of carboxy, amino terminal, or internal regions) sequence shorter than an IL12B wild-type; but still retaining IL12B enzymatic activity);
[2108] (iii) a variant thereof (e.g., full length or truncated IL12B proteins in which one or more amino acids have been replaced, e.g., variants that retain all or most of the IL12B activity of the polypeptide with respect to the wild type IL12B polypeptide (such as, e.g., V331, V298F, or any other natural or artificial variants known in the art); or
[2109] (iv) a fusion protein comprising (i) a full length IL12B wild-type, a functional fragment or a variant thereof, and (ii) a heterologous protein;

[2110] and/or

[2111] wherein the IL12A polypeptide is selected from:
[2112] (i) the full-length IL12A polypeptide (e.g., having the same or essentially the same length as wild-type IL12A);
[2113] (ii) a functional fragment of the full-length IL12A polypeptide (e.g., a truncated (e.g., deletion of carboxy, amino terminal, or internal regions) sequence shorter than an IL12A wild-type; but still retaining IL12A enzymatic activity);
[2114] (iii) a variant thereof (e.g., full length or truncated IL12A proteins in which one or more amino acids have been replaced, e.g., variants that retain all or most of the IL12A activity of the polypeptide with respect to the wtIL12A polypeptide (such as natural or artificial variants known in the art); or (iv) a fusion protein comprising (i) a full length IL12A wild-type, a functional fragment or a variant thereof, and (ii) a heterologous protein.

[2115] In other embodiments, the IL12 polynucleotide (e.g., a RNA, e.g., an mRNA) of the disclosure encodes two polypeptide chains, the first chain comprising an IL12B polypeptide and the second chain comprising an IL12A polypeptide, wherein the IL12B polypeptide is selected from:
[2116] (i) the mature IL12B polypeptide (e.g., having the same or essentially the same length as wild-type IL12B) with or without a signal peptide;
[2117] (ii) a functional fragment of any of the mature IL12B polypeptide (e.g., a truncated (e.g., deletion of carboxy, amino terminal, or internal regions) sequence shorter than an IL12B wild-type; but still retaining IL12B enzymatic activity);
[2118] (iii) a variant thereof (e.g., full length, mature, or truncated IL12B proteins in which one or more amino acids have been replaced, e.g., variants that retain all or most of the IL12B activity of the polypeptide with respect to the wild type IL12B polypeptide (such as, e.g., V33I, V298F, or any other natural or artificial variants known in the art); or
[2119] (iv) a fusion protein comprising (i) a mature IL12B wild-type, a functional fragment or a variant thereof, with or without a signal peptide and (ii) a heterologous protein;

[2120] and/or,

[2121] wherein the IL12A polypeptide is selected from:
[2122] (i) the mature IL12A polypeptide (e.g., having the same or essentially the same length as wild-type IL12A) with or without a signal peptide;
[2123] (ii) a functional fragment of any of the wild-type IL12A polypeptide (e.g., a truncated (e.g., deletion of carboxy, amino terminal, or internal regions) sequence shorter than an IL12A wild-type; but still retaining IL12A enzymatic activity);
[2124] (iii) a variant thereof (e.g., full length, mature, or truncated IL12A proteins in which one or more amino acids have been replaced, e.g., variants that retain all or most of the IL12A activity of the polypeptide with respect to a reference isoform (such as natural or artificial variants known in the art); or
[2125] (iv) a fusion protein comprising (i) a mature IL12A wild-type, a functional fragment or a variant thereof, with or without a signal peptide and (ii) a heterologous protein.

[2126] In certain embodiments, the IL12 polynucleotide (e.g., a RNA, e.g., an mRNA) of the disclosure encodes a mammalian IL12 polypeptide, such as a human IL12 polypeptide, a functional fragment or a variant thereof.

[2127] In some embodiments, the IL12 polynucleotide (e.g., a RNA, e.g., an mRNA) of the disclosure increases IL12B and/or IL12A protein expression levels and/or detectable IL12 enzymatic activity levels in cells when introduced in those cells, e.g., by at least 10%, at least 15%, at least 20%, at least 25%, at least 30%, at least 35%, at least 40%, at least 45%, at least 50%, at least 55%, at least 60%, at least 65%, at least 70%, at least 75%, at least 80%, at least 85%, at least 90%, at least 95%, or at least 100%, compared to IL12B and/or IL12A protein expression levels and/or detectable IL12 enzymatic activity levels in the cells prior to the administration of the polynucleotide of the disclosure. IL12B and/or IL12A protein expression levels and/or IL12 enzymatic activity can be measured according to methods know in the art. In some embodiments, the polynucleotide is introduced to the cells in vitro. In some embodiments, the polynucleotide is introduced to the cells in vivo.

[2128] In some embodiments, the IL12 polynucleotide (e.g., a RNA, e.g., an mRNA) comprises a nucleotide sequence (e.g., an ORF) that encodes a wild-type human IL12B and/or IL12A, (SEQ ID NO: 1035 and SEQ ID NO: 1037).

[2129] In some embodiments, the IL12 polynucleotide (e.g., a RNA, e.g., an mRNA) of the disclosure comprises a codon optimized nucleic acid sequence, wherein the open reading frame (ORF) of the codon optimized nucleic sequence is derived from a wild-type IL12A and/or IL12B sequence.

[2130] In some embodiments, the IL12 polynucleotide (e.g., a RNA, e.g., an mRNA) comprises a nucleotide sequence encoding IL12B and/or IL12A having the full length sequence of human IL12B and/or IL12A (i.e., including the initiator methionine and the signal peptides). In mature human IL12B and/or IL12A, the initiator methionine and/or signal peptides can be removed to yield a “mature IL12B” and/or “mature IL12A” comprising amino acid residues of SEQ ID NO: 1035 and SEQ ID NO: 1037, respectively. SEQ ID NO: 1035 corresponds to amino acids 23 to 328 of SEQ ID NO: 1259, and SEQ ID NO: 1037 corresponds to amino acids 336 to 532 of SEQ ID NO: 1259.

>hIL12AB_001
(SEQ ID NO: 1259)
MCHQQLVISWFSLVFLASPLVAIWELKKDVYVVELDWYPDAPGEMVVLTC
DTPEEDGITWTLDQSSEVLGSGKTLTIQVKEFGDAGQYTCHKGGEVLSHS
LLLLHKKEDGIWSTDILKDQKEPKNKTFLRCEAKNYSGRFTCWWLTTIST
DLTFSVKSSRGSSDPQGVTCGAATLSAERVRGDNKEYEYSVECQEDSACP
AAEESLPIEVMVDAVHKLKYENYTSSFFIRDIIKPDPPKNLQLKPLKNSR
QVEVSWEYPDTWSTPHSYFSLTFCVQVQGKSKREKKDRVFTDKTSATVIC
RKNASISVRAQDRYYSSSWSEWASVPCSGGGGGGSRNLPVATPDPGMFPC
LHHSQNLLRAVSNMLQKARQTLEFYPCTSEEIDHEDITKDKTSTVEACLP
LELTKNESCLNSRETSFITNGSCLASRKTSFMMALCLSSIYEDLKMYQVE
EKTMNAKLLMDPKRQIELDQNMLAVIDELMQALNFNSETVPQKSSLEEPD
FYKTKIKLCILLHAFRIRAVTIDRVMSYLNAS

[2131] The teachings of the present disclosure directed to the full sequence of human IL12B and/or IL12A are also applicable to the mature form of human IL12B and/or IL12A lacking the initiator methionine and/or the signal peptide. Thus, in some embodiments, the IL12 polynucleotide (e.g., a RNA, e.g., an mRNA) comprises a nucleotide sequence encoding IL12B and/or IL12A having the mature sequence of human IL12B and/or IL12A. In some embodiments, the polynucleotide (e.g., a RNA, e.g., an mRNA) of the disclosure comprising a nucleotide sequence encoding IL12B and/or IL12A is sequence optimized.

[2132] In some embodiments, the IL12 polynucleotide (e.g., a RNA, e.g., an mRNA) comprises a nucleotide sequence (e.g., an ORF) encoding a mutant IL12B and/or IL12A polypeptide. In some embodiments, the IL12 polynucleotide (e.g., a RNA, e.g., an mRNA) comprises an ORF encoding an IL12B and/or IL12A polypeptide that comprises at least one point mutation in the IL12B and/or IL12A sequence and retains IL12B and/or IL12A enzymatic activity. In some embodiments, the mutant IL12B and/or IL12A polypeptide has an IL12B and/or IL12A activity which is at least 10%, at least 15%, at least 20%, at least 25%, at least 30%, at least 35%, at least 40%, at least 45%, at least 50%, at least 55%, at least 60%, at least 65%, at least 70%, at least 75%, at least 80%, at least 85%, at least 90%, at least 95%, or at least 100% of the IL12B and/or IL12A activity of the corresponding wild-type IL12B and/or IL12A (i.e., the same IL12B and/or IL12A but without the mutation(s)). In some embodiments, the IL12 polynucleotide (e.g., a RNA, e.g., an mRNA) comprising an ORF encoding a mutant IL12B and/or IL12A polypeptide is sequence optimized.

[2133] In some embodiments, the IL12 polynucleotide (e.g., a RNA, e.g., an mRNA) comprises a nucleotide sequence (e.g., an ORF) that encodes an IL12B and/or IL12A polypeptide with mutations that do not alter IL12B and/or IL12A enzymatic activity. Such mutant IL12B and/or IL12A polypeptides can be referred to as function-neutral. In some embodiments, the IL12 polynucleotide comprises an ORF that encodes a mutant IL12B and/or IL12A polypeptide comprising one or more function-neutral point mutations.

[2134] In some embodiments, the mutant IL12B and/or IL12A polypeptide has higher IL12B and/or IL12A enzymatic activity than the corresponding wild-type IL12B and/or IL12A. In some embodiments, the mutant IL12B and/or IL12A polypeptide has an IL12B and/or IL12A activity that is at least 10%, at least 15%, at least 20%, at least 25%, at least 30%, at least 35%, at least 40%, at least 45%, at least 50%, at least 55%, at least 60%, at least 65%, at least 70%, at least 75%, at least 80%, at least 85%, at least 90%, at least 95%, or at least 100% higher than the activity of the corresponding wild-type IL12B and/or IL12A (i.e., the same IL12B and/or IL12A but without the mutation(s)).

[2135] In some embodiments, the IL12 polynucleotide (e.g., a RNA, e.g., an mRNA) comprises a nucleotide sequence (e.g., an ORF) encoding a functional IL12B and/or IL12A fragment, e.g., where one or more fragments correspond to a polypeptide subsequence of a wild type IL12B and/or IL12A polypeptide and retain IL12B and/or IL12A enzymatic activity. In some embodiments, the IL12B and/or IL12A fragment has an IL12B and/or IL12A activity which is at least 10%, at least 15%, at least 20%, at least 25%, at least 30%, at least 35%, at least 40%, at least 45%, at least 50%, at least 55%, at least 60%, at least 65%, at least 70%, at least 75%, at least 80%, at least 85%, at least 90%, at least 95%, or at least 100% of the IL12 activity of the corresponding full length IL12B and/or IL12A. In some embodiments, the IL12 polynucleotide (e.g., a RNA, e.g., an mRNA) comprising an ORF encoding a functional IL12B and/or IL12A fragment is sequence optimized.

[2136] In some embodiments, the IL12 polynucleotide (e.g., a RNA, e.g., an mRNA) of the disclosure comprises a nucleotide sequence (e.g., an ORF) encoding an IL12B and/or IL12A fragment that has higher IL12B and/or IL12A enzymatic activity than the corresponding full length IL12B and/or IL12A. Thus, in some embodiments the IL12B and/or IL12A fragment has an IL12B and/or IL12A activity which is at least 10%, at least 15%, at least 20%, at least 25%, at least 30%, at least 35%, at least 40%, at least 45%, at least 50%, at least 55%, at least 60%, at least 65%, at least 70%, at least 75%, at least 80%, at least 85%, at least 90%, at least 95%, or at least 100% higher than the IL12B and/or IL12A activity of the corresponding full length IL12B and/or IL12A.

[2137] In some embodiments, the IL12 polynucleotide (e.g., a RNA, e.g., an mRNA) of the disclosure comprises a nucleotide sequence (e.g., an ORF) encoding an IL12B and/or IL12A fragment that is at least 1%, 2%, 3%, 4%, 5%, 6%, 7%, 8%, 9%, 10%, 11%, 12%, 13%1, 4%1, 5%1, 6%1, 7%1, 8%, 19%, 20%, 21%, 22%, 23%, 24% or 25% shorter than wild-type IL12B and/or IL12A.

[2138] In other embodiments, the IL12 polynucleotide (e.g., a RNA, e.g., an mRNA) of the disclosure comprises a nucleotide sequence (e.g., an ORF) encoding an IL12B polypeptide, which has:
[2139] (i) at least 83%, at least 84%, at least 85%, at least 86%, at least 87%, at least 88%, at least 89%, at least 90%, at least 91%, at least 92%, at least 93%, at least 94%, at least 95%, at least 96%, at least 97%, at least 98%, at least 99%, or 100% sequence identity to nucleotides 67-984 of hIL12AB_007, hIL12AB_010, or hIL12AB_012;
[2140] (ii) at least 84%, at least 85%, at least 86%, at least 87%, at least 88%, at least 89%, at least 90%, at least 91%, at least 92%, at least 93%, at least 94%, at least 95%, at least 96%, at least 97%, at least 98%, at least 99%, or 100% sequence identity to nucleotides 67-984 of hIL12AB_018 or hIL12AB_019;
[2141] (iii) at least 86%, at least 87%, at least 88%, at least 89%, at least 90%, at least 91%, at least 92%, at least 93%, at least 94%, at least 95%, at least 96%, at least 97%, at least 98%, at least 99%, or 100% sequence identity to nucleotides 67-984 of hIL12AB_008;
[2142] (iv) at least 87%, at least 88%, at least 89%, at least 90%, at least 91%, at least 92%, at least 93%, at least 94%, at least 95%, at least 96%, at least 97%, at least 98%, at least 99%, or 100% sequence identity to nucleotides 67-984 of hIL12AB_005, hIL12AB_013, or hIL12AB_017 or nucleotides 70-987 of hIL12AB_004;
[2143] (v) at least 88%, at least 89%, at least 90%, at least 91%, at least 92%, at least 93%, at least 94%, at least 95%, at least 96%, at least 97%, at least 98%, at least 99%, or 100% sequence identity to nucleotides 67-984 of hIL12AB_001 or hIL12AB_009;
[2144] (vi) at least 85%, at least 86%, at least 87%, at least 88%, at least 89%, at least 90%, at least 91%, at least 92%, at least 93%, at least 94%, at least 95%, at least 96%, at least 97%, at least 98%, at least 99%, or 100% sequence identity to nucleotides 67-984 of hIL12AB_012 or hIL12AB_005;
[2145] (vii) at least 89%, at least 90%, at least 91%, at least 92%, at least 93%, at least 94%, at least 95%, at least 96%, at least 97%, at least 98%, at least 99%, or 100% sequence identity to nucleotides 67-984 of hIL12AB_022 or hIL12AB_038;
[2146] (viii) at least 90%, at least 91%, at least 92%, at least 93%, at least 94%, at least 95%, at least 96%, at least 97%, at least 98%, at least 99%, or 100% sequence identity to nucleotides 67-984 of hIL12AB_024, hIL12AB_031, hIL12AB_032, or hIL12AB_036;
[2147] (ix) at least 91%, at least 92%, at least 93%, at least 94%, at least 95%, at least 96%, at least 97%, at least 98%, at least 99%, or 100% sequence identity to nucleotides 67-984 of hIL12AB_021, hIL12AB 023, hIL12AB_025, hIL12AB 026, hIL12AB_027, hIL12AB_029, hIL12AB 030, hIL12AB_034, hIL12AB 039, or hIL12AB_040;
[2148] (x) at least 92%, at least 93%, at least 94%, at least 95%, at least 96%, at least 97%, at least 98%, at least 99%, or 100% sequence identity to nucleotides 67-984 of hIL12AB_016, hIL12AB 035, or hIL12AB_037;
[2149] (xi) at least 93%, at least 94%, at least 95%, at least 96%, at least 97%, at least 98%, at least 99%, or 100% sequence identity to nucleotides 67-984 of hIL12AB_011, hIL12AB_028, or hIL12AB_033;
[2150] (xii) at least 94%, at least 95%, at least 96%, at least 97%, at least 98%, at least 99%, or 100% sequence identity to nucleotides 67-984 of hIL12AB_015;
[2151] (xiii) at least 95%, at least 96%, at least 97%, at least 98%, at least 99%, or 100% sequence identity to nucleotides 67-984 of hIL12AB_020; or
[2152] (xiv) 100% sequence identity to nucleotides 67-984 of hIL12AB_006.

[2153] In other embodiments, the IL12 polynucleotide (e.g., a RNA, e.g., an mRNA) of the disclosure comprises a nucleotide sequence (e.g., an ORF) encoding an IL12A polypeptide, which has:
[2154] (i) at least 77%, at least 78%, at least 79%, at least 80%, at least 81%, at least 82%, at least 83%, at least 84%, at least 85%, at least 86%, at least 87%, at least 88%, at least 89%, at least 90%, at least 91%, at least 92%, at least 93%, at least 94%, at least 95%, at least 96%, at least 97%, at least 98%, at least 99%, or 100% sequence identity to nucleotides 1006-1596 of hIL12AB_010;
[2155] (ii) at least 79%, at least 80%, at least 81%, at least 82%, at least 83%, at least 84%, at least 85%, at least 86%, at least 87%, at least 88%, at least 89%, at least 90%, at least 91%, at least 92%, at least 93%, at least 94%, at least 95%, at least 96%, at least 97%, at least 98%, at least 99%, or 100% sequence identity to nucleotides 1006-1596 of hIL12AB_019;
[2156] (iii) at least 81%, at least 82%, at least 83%, at least 84%, at least 85%, at least 86%, at least 87%, at least 88%, at least 89%, at least 90%, at least 91%, at least 92%, at least 93%, at least 94%, at least 95%, at least 96%, at least 97%, at least 98%, at least 99%, or 100% sequence identity to nucleotides 1006-1596 of hIL12AB_013;
[2157] (iv) at least 82%, at least 83%, at least 84%, at least 85%, at least 86%, at least 87%, at least 88%, at least 89%, at least 90%, at least 91%, at least 92%, at least 93%, at least 94%, at least 95%, at least 96%, at least 97%, at least 98%, at least 99%, or 100% sequence identity to nucleotides 1006-1596 of hIL12AB_007 or hIL12AB_014;
[2158] (v) at least 83%, at least 84%, at least 85%, at least 86%, at least 87%, at least 88%, at least 89%, at least 90%, at least 91%, at least 92%, at least 93%, at least 94%, at least 95%, at least 96%, at least 97%, at least 98%, at least 99%, or 100% sequence identity to nucleotides 1006-1596 of hIL12AB_002, hIL12AB_008;
[2159] (vi) at least 85%, at least 86%, at least 87%, at least 88%, at least 89%, at least 90%, at least 91%, at least 92%, at least 93%, at least 94%, at least 95%, at least 96%, at least 97%, at least 98%, at least 99%, or 100% sequence identity to nucleotides 1006-1596 of hIL12AB_012 or hIL12AB_005;
[2160] (vii) at least 86%, at least 87%, at least 88%, at least 89%, at least 90%, at least 91%, at least 92%, at least 93%, at least 94%, at least 95%, at least 96%, at least 97%, at least 98%, at least 99%, or 100% sequence identity to nucleotides 1006-1596 of hIL12AB_001, or hIL12AB_009 or nucleotides 1009-1589 of hIL12AB_004;
[2161] (viii) at least 88%, at least 89%, at least 90%, at least 91%, at least 92%, at least 93%, at least 94%, at least 95%, at least 96%, at least 97%, at least 98%, at least 99%, or 100% sequence identity to nucleotides 1006-1596 of hIL12AB_17;
[2162] (ix) at least 89%, at least 90%, at least 91%, at least 92%, at least 93%, at least 94%, at least 95%, at least 96%, at least 97%, at least 98%, at least 99%, or 100% sequence identity to nucleotides 1006-1596 of hIL12AB_029 or hIL12AB_027;
[2163] (x) at least 90%, at least 91%, at least 92%, at least 93%, at least 94%, at least 95%, at least 96%, at least 97%, at least 98%, at least 99%, or 100% sequence identity to nucleotides 1006-1596 of hIL12AB 039 or hIL12AB 040;
[2164] (xi) at least 91%, at least 92%, at least 93%, at least 94%, at least 95%, at least 96%, at least 97%, at least 98%, at least 99%, or 100% sequence identity to nucleotides 1006-1596 of hIL12AB_036, hIL12AB 034, hIL12AB_016, hIL12AB_023, hIL12AB_030, hIL12AB 031, hIL12AB_025, or hIL12AB_035;
[2165] (xii) at least 92%, at least 93%, at least 94%, at least 95%, at least 96%, at least 97%, at least 98%, at least 99%, or 100% sequence identity to hIL12AB_021, hIL12AB_024, hIL12AB 032, hIL12AB_033, hIL12AB 037, or hIL12AB_022;
[2166] (xiii) at least 93%, at least 94%, at least 95%, at least 96%, at least 97%, at least 98%, at least 99%, or 100% sequence identity to nucleotides 1006-1596 of hIL12AB_020, hIL12AB 026, or hIL12AB_038;
[2167] (xiv) at least 94%, at least 95%, at least 96%, at least 97%, at least 98%, at least 99%, or 100% sequence identity to nucleotides 1006-1596 of hIL12AB_015, hIL12AB_011, or hIL12AB 028; or
[2168] (xv) 100% sequence identity to nucleotides 1006-1596 of hIL12AB_003.

[2169] In certain embodiments, the IL12 polynucleotide (e.g., a RNA, e.g., an mRNA) of the disclosure comprises a first ORF encoding IL12B and a second ORF encoding IL12A, wherein the first ORF comprises a sequence that has:
[2170] (i) at least 83%, at least 84%, at least 85%, at least 86%, at least 87%, at least 88%, at least 89%, at least 90%, at least 91%, at least 92%, at least 93%, at least 94%, at least 95%, at least 96%, at least 97%, at least 98%, at least 99%, or 100% sequence identity to nucleotides 67-984 of hIL12AB_007, hIL12AB_010, or hIL12AB_012;
[2171] (ii) at least 84%, at least 85%, at least 86%, at least 87%, at least 88%, at least 89%, at least 90%, at least 91%, at least 92%, at least 93%, at least 94%, at least 95%, at least 96%, at least 97%, at least 98%, at least 99%, or 100% sequence identity to nucleotides 67-984 of hIL12AB_018 or hIL12AB_019;
[2172] (iii) at least 86%, at least 87%, at least 88%, at least 89%, at least 90%, at least 91%, at least 92%, at least 93%, at least 94%, at least 95%, at least 96%, at least 97%, at least 98%, at least 99%, or 100% sequence identity to nucleotides 67-984 of hIL12AB_008;
[2173] (iv) at least 87%, at least 88%, at least 89%, at least 90%, at least 91%, at least 92%, at least 93%, at least 94%, at least 95%, at least 96%, at least 97%, at least 98%, at least 99%, or 100% sequence identity to nucleotides 67-984 of hIL12AB_005, hIL12AB_013, or hIL12AB_017 or nucleotides 70-987 of hIL12AB_004;
[2174] (v) at least 88%, at least 89%, at least 90%, at least 91%, at least 92%, at least 93%, at least 94%, at least 95%, at least 96%, at least 97%, at least 98%, at least 99%, or 100% sequence identity to nucleotides 67-984 of hIL12AB_001 or hIL12AB_009;
[2175] (vi) at least 85%, at least 86%, at least 87%, at least 88%, at least 89%, at least 90%, at least 91%, at least 92%, at least 93%, at least 94%, at least 95%, at least 96%, at least 97%, at least 98%, at least 99%, or 100% sequence identity to nucleotides 67-984 of hIL12AB 012 or hIL12AB 005;
[2176] (vii) at least 89%, at least 90%, at least 91%, at least 92%, at least 93%, at least 94%, at least 95%, at least 96%, at least 97%, at least 98%, at least 99%, or 100% sequence identity to nucleotides 67-984 of hIL12AB_022 or hIL12AB_038;
[2177] (viii) at least 90%, at least 91%, at least 92%, at least 93%, at least 94%, at least 95%, at least 96%, at least 97%, at least 98%, at least 99%, or 100% sequence identity to nucleotides 67-984 of hIL12AB_024, hIL12AB_031, hIL12AB_032, or hIL12AB_036;
[2178] (ix) at least 91%, at least 92%, at least 93%, at least 94%, at least 95%, at least 96%, at least 97%, at least 98%, at least 99%, or 100% sequence identity to nucleotides 67-984 of hIL12AB_021, hIL12AB 023, hIL12AB_025, hIL12AB 026, hIL12AB_027, hIL12AB_029, hIL12AB 030, hIL12AB_034, hIL12AB 039, or hIL12AB_040;
[2179] (x) at least 92%, at least 93%, at least 94%, at least 95%, at least 96%, at least 97%, at least 98%, at least 99%, or 100% sequence identity to nucleotides 67-984 of hIL12AB_016, hIL12AB 035, or hIL12AB_037;
[2180] (xi) at least 93%, at least 94%, at least 95%, at least 96%, at least 97%, at least 98%, at least 99%, or 100% sequence identity to nucleotides 67-984 of hIL12AB_011, hIL12AB_028, or hIL12AB_033;
[2181] (xii) at least 94%, at least 95%, at least 96%, at least 97%, at least 98%, at least 99%, or 100% sequence identity to nucleotides 67-984 of hIL12AB_015;
[2182] (xiii) at least 95%, at least 96%, at least 97%, at least 98%, at least 99%, or 100% sequence identity to nucleotides 67-984 of hIL12AB_020; or
[2183] (xiv) 100% sequence identity to nucleotides 67-984 of hIL12AB_006 and/or wherein the second ORF comprises a sequence that has:
[2184] (i) at least 77%, at least 78%, at least 79%, at least 80%, at least 81%, at least 82%, at least 83%, at least 84%, at least 85%, at least 86%, at least 87%, at least 88%, at least 89%, at least 90%, at least 91%, at least 92%, at least 93%, at least 94%, at least 95%, at least 96%, at least 97%, at least 98%, at least 99%, or 100% sequence identity to nucleotides 1006-1596 of hIL12AB_010;
[2185] (ii) at least 79%, at least 80%, at least 81%, at least 82%, at least 83%, at least 84%, at least 85%, at least 86%, at least 87%, at least 88%, at least 89%, at least 90%, at least 91%, at least 92%, at least 93%, at least 94%, at least 95%, at least 96%, at least 97%, at least 98%, at least 99%, or 100% sequence identity to nucleotides 1006-1596 of hIL12AB_019;
[2186] (iii) at least 81%, at least 82%, at least 83%, at least 84%, at least 85%, at least 86%, at least 87%, at least 88%, at least 89%, at least 90%, at least 91%, at least 92%, at least 93%, at least 94%, at least 95%, at least 96%, at least 97%, at least 98%, at least 99%, or 100% sequence identity to nucleotides 1006-1596 of hIL12AB_013;
[2187] (iv) at least 82%, at least 83%, at least 84%, at least 85%, at least 86%, at least 87%, at least 88%, at least 89%, at least 90%, at least 91%, at least 92%, at least 93%, at least 94%, at least 95%, at least 96%, at least 97%, at least 98%, at least 99%, or 100% sequence identity to nucleotides 1006-1596 of hIL12AB_007 or hIL12AB_014;
[2188] (v) at least 83%, at least 84%, at least 85%, at least 86%, at least 87%, at least 88%, at least 89%, at least 90%, at least 91%, at least 92%, at least 93%, at least 94%, at least 95%, at least 96%, at least 97%, at least 98%, at least 99%, or 100% sequence identity to nucleotides 1006-1596 of hIL12AB_002, hIL12AB_008;
[2189] (vi) at least 85%, at least 86%, at least 87%, at least 88%, at least 89%, at least 90%, at least 91%, at least 92%, at least 93%, at least 94%, at least 95%, at least 96%, at least 97%, at least 98%, at least 99%, or 100% sequence identity to nucleotides 1006-1596 of hIL12AB_012 or hIL12AB_005;
[2190] (vii) at least 86%, at least 87%, at least 88%, at least 89%, at least 90%, at least 91%, at least 92%, at least 93%, at least 94%, at least 95%, at least 96%, at least 97%, at least 98%, at least 99%, or 100% sequence identity to nucleotides 1006-1596 of hIL12AB_001, or hIL12AB_009 or nucleotides 1009-1599 of hIL12AB_004;
[2191] (viii) at least 88%, at least 89%, at least 90%, at least 91%, at least 92%, at least 93%, at least 94%, at least 95%, at least 96%, at least 97%, at least 98%, at least 99%, or 100% sequence identity to nucleotides 1006-1596 of hIL12AB_17;
[2192] (ix) at least 89%, at least 90%, at least 91%, at least 92%, at least 93%, at least 94%, at least 95%, at least 96%, at least 97%, at least 98%, at least 99%, or 100% sequence identity to nucleotides 1006-1596 of hIL12AB_029 or hIL12AB_027;
[2193] (x) at least 90%, at least 91%, at least 92%, at least 93%, at least 94%, at least 95%, at least 96%, at least 97%, at least 98%, at least 99%, or 100% sequence identity to nucleotides 1006-1596 of hIL12AB 039 or hIL12AB 040;
[2194] (xi) at least 91%, at least 92%, at least 93%, at least 94%, at least 95%, at least 96%, at least 97%, at least 98%, at least 99%, or 100% sequence identity to nucleotides 1006-1596 of hIL12AB_036, hIL12AB 034, hIL12AB_016, hIL12AB_023, hIL12AB_030, hIL12AB 031, hIL12AB_025, or hIL12AB_035;
[2195] (xii) at least 92%, at least 93%, at least 94%, at least 95%, at least 96%, at least 97%, at least 98%, at least 99%, or 100% sequence identity to hIL12AB_021, hIL12AB_024, hIL12AB 032, hIL12AB_033, hIL12AB 037, or hIL12AB_022;
[2196] (xiii) at least 93%, at least 94%, at least 95%, at least 96%, at least 97%, at least 98%, at least 99%, or 100% sequence identity to nucleotides 1006-1596 of hIL12AB_020, hIL12AB 026, or hIL12AB_038;
[2197] (xiv) at least 94%, at least 95%, at least 96%, at least 97%, at least 98%, at least 99%, or 100% sequence identity to nucleotides 1006-1596 of hIL12AB_015, hIL12AB_011, or hIL12AB 028; or
[2198] (xv) 100% sequence identity to nucleotides 1006-1596 of hIL12AB_003.

[2199] In one embodiment, the first ORF encoding the IL12B polypeptide and the second ORF encoding the IL12A polypeptide are fused directly or by a linker. In another embodiment, the first ORF encoding the IL12B polypeptide and the second ORF encoding the IL12A polypeptide are not fused to each other.

[2200] In some embodiments, the IL12 polynucleotide (e.g., a RNA, e.g., an mRNA) comprises a nucleotide sequence (e.g., an ORF) encoding an IL12B-IL12A fusion polypeptide (e.g., the wild-type sequence, functional fragment, or variant thereof), wherein the nucleotide sequence has at least 60%, at least 65%, at least 70%, at least 71%, at least 72%, at least 73%, at least 74%, at least 75%, at least 76%, at least 77%, at least 78%, at least 79%, at least 80%, at least 81%, at least 82%, at least 83%, at least 84%, at least 85%, at least 86%, at least 87%, at least 88%, at least 89%, at least 90%, at least 91%, at least 92%, at least 93%, at least 94%, at least 95%, at least 96%, at least 97%, at least 98%, at least 99%, or 100% sequence identity to a sequence selected from the group consisting of SEQ ID NOs: 1041 to 1080. See TABLE 14.

[2201] In some embodiments, the IL12 polynucleotide (e.g., a RNA, e.g., an mRNA) comprises a nucleotide sequence (e.g., an ORF) encoding an IL12B-IL12A fusion polypeptide (e.g., the wild-type sequence, functional fragment, or variant thereof), wherein the nucleotide sequence has 70% to 100%, 75% to 100%, 80% to 100%, 85% to 100%, 70% to 95%, 80% to 95%, 70% to 85%, 75% to 90%, 80% to 95%, 70% to 75%, 75% to 80%, 80% to 85%, 85% to 90%, 90% to 95%, or 95% to 100%, sequence identity to a sequence selected from the group consisting of SEQ ID NOs: 1041 to 1080. See TABLE 14.

[2202] In some embodiments, the IL12 polynucleotide (e.g., a RNA, e.g., an mRNA) comprises from about 900 to about 100,000 nucleotides (e.g., from 900 to 1,000, from 900 to 1,100, from 900 to 1,200, from 900 to 1,300, from 900 to 1,400, from 900 to 1,500, from 1,000 to 1,100, from 1,000 to 1,100, from 1,000 to 1,200, from 1,000 to 1,300, from 1,000 to 1,400, from 1,000 to 1,500, from 1,083 to 1,200, from 1,083 to 1,400, from 1,083 to 1,600, from 1,083 to 1,800, from 1,083 to 2,000, from 1,083 to 3,000, from 1,083 to 5,000, from 1,083 to 7,000, from 1,083 to 10,000, from 1,083 to 25,000, from 1,083 to 50,000, from 1,083 to 70,000, or from 1,083 to 100,000).

[2203] In some embodiments, the IL12 polynucleotide (e.g., a RNA, e.g., an mRNA) comprises a nucleotide sequence (e.g., an ORF) encoding an IL12B-IL12A fusion polypeptide (e.g., the wild-type sequence, functional fragment, or variant thereof), wherein the length of the nucleotide sequence (e.g., an ORF) is at least 500 nucleotides in length (e.g., at least or greater than about 500, 600, 700, 80, 900, 1,000, 1,050, 1,083, 1,100, 1,200, 1,300, 1,400, 1,500, 1,600, 1,700, 1,800, 1,900, 2,000, 2,100, 2,200, 2,300, 2,400, 2,500, 2,600, 2,700, 2,800, 2,900, 3,000, 3,100, 3,200, 3,300, 3,400, 3,500, 3,600, 3,700, 3,800, 3,900, 4,000, 4,100, 4,200, 4,300, 4,400, 4,500, 4,600, 4,700, 4,800, 4,900, 5,000, 5,100, 5,200, 5,300, 5,400, 5,500, 5,600, 5,700, 5,800, 5,900, 6,000, 7,000, 8,000, 9,000, 10,000, 20,000, 30,000, 40,000, 50,000, 60,000, 70,000, 80,000, 90,000 or up to and including 100,000 nucleotides).

[2204] In some embodiments, the IL12 polynucleotide (e.g., a RNA, e.g., an mRNA) comprises a nucleotide sequence (e.g., an ORF) encoding an IL12B and/or IL12A polypeptide (e.g., the wild-type sequence, functional fragment, or variant thereof) further comprises at least one nucleic acid sequence that is noncoding, e.g., a miRNA binding site.

[2205] In some embodiments, the IL12 polynucleotide (e.g., a RNA, e.g., an mRNA) comprises a nucleotide sequence (e.g., an ORF) encoding an IL12B and/or IL12A polypeptide is single stranded or double stranded.

[2206] In some embodiments, the IL12 polynucleotide comprising a nucleotide sequence (e.g., an ORF) encoding an IL12B and/or IL12A polypeptide (e.g., the wild-type sequence, functional fragment, or variant thereof) is DNA or RNA. In some embodiments, the IL12 polynucleotide is RNA. In some embodiments, the IL12 polynucleotide is, or functions as, a messenger RNA (mRNA). In some embodiments, the mRNA comprises a nucleotide sequence (e.g., an ORF) that encodes at least one IL12B and/or IL12A polypeptide, and is capable of being translated to produce the encoded IL12B and/or IL12A polypeptide in vitro, in vivo, in situ or ex vivo.

[2207] In some embodiments, the IL12 polynucleotide (e.g., a RNA, e.g., an mRNA) comprises a sequence-optimized nucleotide sequence (e.g., an ORF) encoding an IL12B and/or IL12A polypeptide (e.g., the wild-type sequence, functional fragment, or variant thereof), wherein the IL12 polynucleotide comprises at least one chemically modified nucleobase, e.g., 5-methoxyuracil. In some embodiments, the IL12 polynucleotide further comprises a miRNA binding site, e.g., a miRNA binding site that binds to miR-122. In some embodiments, the IL12 polynucleotide disclosed herein is formulated with a delivery agent, e.g., a compound having Formula (I), e.g., any of Compounds 1-147.

[2208] The IL12 polynucleotides (e.g., a RNA, e.g., an mRNA) of the disclosure can also comprise nucleotide sequences that encode additional features that facilitate trafficking of the encoded polypeptides to therapeutically relevant sites. One such feature that aids in protein trafficking is the signal sequence, or targeting sequence. The peptides encoded by these signal sequences are known by a variety of names, including targeting peptides, transit peptides, and signal peptides. In some embodiments, the polynucleotide (e.g., a RNA, e.g., an mRNA) comprises a nucleotide sequence (e.g., an ORF) that encodes a signal peptide operably linked a nucleotide sequence that encodes an IL12B and/or IL12A polypeptide described herein.

[2209] In some embodiments, the signal sequence or signal peptide is a polynucleotide or polypeptide, respectively, which is from about 9 to 200 nucleotides (3-70 amino acids) in length that, optionally, is incorporated at the 5′ (or N-terminus) of the coding region or the polypeptide, respectively. Addition of these sequences results in trafficking the encoded polypeptide to a desired site, such as the endoplasmic reticulum or the mitochondria through one or more targeting pathways. Some signal peptides are cleaved from the protein, for example by a signal peptidase after the proteins are transported to the desired site.

[2210] In some embodiments, the IL12 polynucleotide comprises a nucleotide sequence encoding an IL12B and/or IL12A polypeptide, wherein the nucleotide sequence further comprises a 5′ nucleic acid sequence encoding a native signal peptide. In another embodiment, the IL12 polynucleotide comprises a nucleotide sequence encoding an IL12B and/or IL12A polypeptide, wherein the nucleotide sequence lacks the nucleic acid sequence encoding a native signal peptide.

[2211] In some embodiments, the IL12 polynucleotide of the disclosure comprises a nucleotide sequence encoding an IL12B and/or IL12A polypeptide, wherein the nucleotide sequence further comprises a 5′ nucleic acid sequence encoding a heterologous signal peptide.

[2212] IL12 chimeric proteins: In some embodiments, the IL12 polynucleotide (e.g., a RNA, e.g., an mRNA) can comprise more than one nucleic acid sequence (e.g., an ORF) encoding a polypeptide of interest. In some embodiments, the IL12 polynucleotide comprises a single ORF encoding an IL12B and/or IL12A polypeptide, a functional fragment, or a variant thereof. However, in some embodiments, the IL12 polynucleotide of the disclosure can comprise more than one ORF, for example, a first ORF encoding an IL12B polypeptide (a first polypeptide of interest), a functional fragment, or a variant thereof, a second ORF encoding an IL12A polypeptide (a second polypeptide of interest), a functional fragment, or a variant thereof, and a third ORF expressing a third polypeptide of interest (e.g., a polypeptide heterologous to IL12). In one embodiment, the third polypeptide of interest can be fused to the IL12B polypeptide directly or by a linker. In another embodiment, the third polypeptide of interest can be fused to the IL12A polypeptide directly or by a linker. In other embodiments, the third polypeptide of interest can be fused to both the IL12B polypeptide and the IL12A polypeptide directly or by a linker. In further embodiments, the IL12 polynucleotide of the disclosure can comprise more than three ORFs, for example, a first ORF encoding an IL12B polypeptide (a first polypeptide of interest), a functional fragment, or a variant thereof, a second ORF encoding an IL12A polypeptide (a second polypeptide of interest), a functional fragment, or a variant thereof, a third ORF expressing a third polypeptide of interest, and a fourth ORF expressing a fourth polypeptide of interest. In other embodiments, the third polypeptide of interest is fused to the IL12A polypeptide directly or by a linker, and the fourth polypeptide of interest is fused to the IL12B polypeptide directly or by a linker. In some embodiments, two or more polypeptides of interest can be genetically fused, i.e., two or more polypeptides can be encoded by the same ORF. In some embodiments, the polynucleotide can comprise a nucleic acid sequence encoding a linker (e.g., a G4S peptide linker or another linker known in the art) between two or more polypeptides of interest.

[2213] In some embodiments, an IL12 polynucleotide of the disclosure (e.g., a RNA, e.g., an mRNA) can comprise two, three, four, or more ORFs, each expressing a polypeptide of interest.

[2214] In some embodiments, the 1112 polynucleotide (e.g., a RNA, e.g., an mRNA) can comprise a first nucleic acid sequence (e.g., a first ORF) encoding an IL12B polypeptide, IL12A polypeptide, or both IL12B and IL12A polypeptides and a second nucleic acid sequence (e.g., a second ORF) encoding a second polypeptide of interest.

[2215] Linkers in IL12 chimeric constructs: In one aspect, the IL12B polypeptide and/or IL12A polypeptide in an IL12 polypeptide disclosed herein can be fused directly or by a linker. In other embodiments, the IL12B polypeptide and/or IL12A polypeptide can be fused directly to by a linker to a heterologous polypeptide. The linkers suitable for fusing the IL12B polypeptide to the IL12A polypeptide or the IL12B polypeptide and/or the IL12A polypeptide to a heterologous polypeptide can be a polypeptide (or peptide) moiety or a non-polypeptide moiety.

[2216] In some embodiments, the linker is a peptide linker, including from one amino acid to about 200 amino acids. In some embodiments, the linker comprises at least 1, at least 2, at least 3, at least 4, at least 5, at least 6, at least 7, at least 8, at least 9, at least 10, at least 11, at least 12, at least 13, at least 14, at least 15, at least 16, at least 17, at least 18, at least 19, at least 20, at least 21, at least 22, at least 23, at least 24, at least 25, at least 26, at least 27, at least 28, at least 29, at least 30, at least 31, at least 32, at least 33, at least 34, at least 35, at least 36, at least 37, at least 38, at least 39, or at least 40 amino acids.

[2217] In some embodiments, the linker in the IL12 chimeric construct can be a GS (Gly/Ser) linker, for example, comprising (GₙS)ₘ, wherein n is an integer from 1 to 20 and m is an integer from 1 to 20. In some embodiments, the GS linker can comprise (GGGGS)ₒ (SEQ ID NO:1010) wherein o is an integer from 1 to 5. In some embodiments, the GS linker can comprise GGSGGGGSGG (SEQ ID NO:1011), GGSGGGGG (SEQ ID NO:1012), or GSGSGSGS (SEQ ID NO:1013).

[2218] In some embodiments, the linker suitable in the IL12 chimeric construct can be a Gly-rich linker, for example, comprising (Gly)ₚ, wherein p is an integer from 1 to 40. In some embodiments, a Gly-rich linker can comprise GGGGG (SEQ ID NO:1015), GGGGGG (SEQ ID NO:1016), GGGGGGG (SEQ ID NO:1017) or GGGGGGGG (SEQ ID NO:1018).

[2219] In some embodiments, the linker suitable for the disclosure can comprise (EAAAK)_{q}(SEQ ID NO:1019), wherein q is an integer from 1 to 5. In one embodiment, the linker suitable for the disclosure can comprise (EAAAK)₃ (SEQ ID NO:1020).

[2220] Further exemplary linkers include, but not limited to, GGGGSLVPRGSGGGGS (SEQ ID NO:1021), GSGSGS (SEQ ID NO:1022), GGGGSLVPRGSGGGG (SEQ ID NO:1023), GGSGGHMGSGG (SEQ ID NO:1024), GGSGGSGGSGG (SEQ ID NO:1025), GGSGG (SEQ ID NO:1026), GSGSGSGS (SEQ ID NO:1027), GGGSEGGGSEGGGSEGGG (SEQ ID NO:1028), AAGAATAA (SEQ ID NO:1029), GGSSG (SEQ ID NO:1030), GSGGGTGGGSG (SEQ ID NO:1031), GSGSGSGSGGSG (SEQ ID NO:1032), GSGGSGSGGSGGSG (SEQ ID NO:1023), and GSGGSGGSGGSGGS (SEQ ID NO:1024). The nucleotides encoding the linkers can be constructed to fuse the IL12 ORFs of the present disclosure.

[2221] Sequence-optimized nucleotide sequences encoding IL12 polypeptides: In some embodiments, the IL12 polynucleotide of the disclosure comprises a sequence-optimized nucleotide sequence encoding an IL12B and/or IL12A polypeptide disclosed herein. In some embodiments, the IL12 polynucleotide of the disclosure comprises an open reading frame (ORF) encoding an IL12B and/or IL12A polypeptide, wherein the ORF has been sequence optimized.

[2222] Exemplary sequence-optimized nucleotide sequences encoding human IL12B and/or IL12A are shown in Table 3. In some embodiments, the sequence optimized IL12B and/or IL12A sequences in TABLE 14, fragments, and variants thereof are used to practice the methods disclosed herein. In some embodiments, the sequence optimized IL12B and/or IL12A sequences in TABLE 14, fragments and variants thereof are combined with or alternatives to the wild-type sequences disclosed in FIG. 109A.

TABLE 14
Sequence optimized Open Reading Frame sequences for human IL12

>hIL12AB_001 (SEQ ID NO: 1041)
ATGTGTCACCAGCAGCTGGTCATTAGCTGGTTTAGCCTTGTGTTCCTGGCCTCCCCCCTTGTCGCTATTTGGGAGCTCAAGAAG
GACGTGTACGTGGTGGAGCTGGACTGGTACCCAGACGCGCCCGGAGAGATGGTAGTTCTGACCTGTGATACCCCAGAGGAGGAC
GGCATCACCTGGACTCTGGACCAAAGCAGCGAGGTTTTGGGCTCAGGGAAAACGCTGACCATCCAGGTGAAGGAATTCGGCGAC
GCCGGACAGTACACCTGCCATAAGGGAGGAGAGGTGCTGAGCCATTCCCTTCTTCTGCTGCACAAGAAAGAGGACGGCATCTGG
TCTACCGACATCCTGAAAGACCAGAAGGAGCCCAAGAACAAAACCTTCCTGAGGTGCGAGGCCAAGAACTACTCCGGCAGGTTC
ACTTGTTGGTGGCTGACCACCATCAGTACAGACCTGACTTTTAGTGTAAAAAGCTCCAGAGGCTCGTCCGATCCCCAAGGGGTG
ACCTGCGGCGCAGCCACTCTGAGCGCTGAGCGCGTGCGCGGTGACAATAAAGAGTACGAGTACAGCGTTGAGTGTCAAGAAGAC
AGCGCTTGCCCTGCCGCCGAGGAGAGCCTGCCTATCGAGGTGATGGTTGACGCAGTGCACAAGCTTAAGTACGAGAATTACACC
AGCTCATTCTTCATTAGAGATATAATCAAGCCTGACCCACCCAAGAACCTGCAGCTGAAGCCACTGAAAAACTCACGGCAGGTC
GAAGTGAGCTGGGAGTACCCCGACACCTGGAGCACTCCTCATTCCTATTTCTCTCTTACATTCTGCGTCCAGGTGCAGGGCAAG
AGCAAGCGGGAAAAGAAGGATCGAGTCTTCACCGACAAAACAAGCGCGACCGTGATTTGCAGGAAGAACGCCAGCATCTCCGTC
AGAGCCCAGGATAGATACTATAGTAGCAGCTGGAGCGAGTGGGCAAGCGTGCCCTGTTCCGGCGGCGGGGGCGGGGGCAGCCGA
AACTTGCCTGTCGCTACCCCGGACCCTGGAATGTTTCCGTGTCTGCACCACAGCCAGAACCTGCTGAGAGCCGTGTCGAATATG
CTCCAGAAGGCCCGGCAGACCCTTGAGTTCTACCCCTGTACCAGCGAAGAGATCGATCATGAGGACATCACGAAAGACAAGACT
TCCACCGTCGAGGCTTGTCTCCCGCTGGAGCTGACCAAGAACGAGAGCTGTCTGAATAGCCGGGAGACATCTTTCATCACGAAT
GGTAGCTGTCTGGCCAGCAGGAAAACTTCCTTCATGATGGCTCTCTGCCTGAGCTCTATCTATGAAGATCTGAAGATGTATCAG
GTGGAGTTTAAGACTATGAACGCCAAACTCCTGATGGACCCAAAAAGGCAAATCTTTCTGGACCAGAATATGCTGGCCGTGATA
GACGAGCTGATGCAGGCACTGAACTTCAACAGCGAGACAGTGCCACAGAAATCCAGCCTGGAGGAGCCTGACTTTTACAAAACT
AAGATCAAGCTGTGTATCCTGCTGCACGCCTTTAGAATCCGTGCCGTGACTATCGACAGGGTGATGTCATACCTCAACGCTTCA
>hIL12AB_002 (SEQ ID NO: 1042)
ATGTGCCACCAGCAGCTGGTGATCAGCTGGTTCAGCCTGGTGTTCCTGGCCAGCCCCCTGGTGGCCATCTGGGAGCTGAAGAAG
GACGTGTACGTGGTGGAGCTGGACTGGTACCCCGACGCCCCCGGCGAGATGGTGGTGCTGACCTGCGACACCCCCGAGGAGGAC
GGCATCACCTGGACCCTGGACCAGAGCAGCGAGGTGCTGGGCAGCGGCAAGACCCTGACCATCCAGGTGAAGGAGTTCGGCGAC
GCCGGCCAGTACACCTGCCACAAGGGCGGCGAGGTGCTGAGCCACAGCCTGCTGCTGCTGCACAAGAAGGAGGACGGCATCTGG
AGCACCGACATCCTGAAGGACCAGAAGGAGCCCAAGAACAAGACCTTCCTGAGATGCGAGGCCAAGAACTACAGCGGCAGATTC
ACCTGCTGGTGGCTGACCACCATCAGCACCGACCTGACCTTCAGCGTGAAGAGCAGCAGAGGCAGCAGCGACCCCCAGGGCGTG
ACCTGCGGCGCCGCCACCCTGAGCGCCGAGAGAGTGAGAGGCGACAACAAGGAGTACGAGTACAGCGTGGAGTGCCAGGAGGAC
AGCGCCTGCCCCGCCGCCGAGGAGAGCCTGCCCATCGAGGTGATGGTGGACGCCGTGCACAAGCTGAAGTACGAGAACTACACC
AGCAGCTTCTTCATCAGAGACATCATCAAGCCCGACCCCCCCAAGAACCTGCAGCTGAAGCCCCTGAAGAACAGCAGACAGGTG
GAGGTGAGCTGGGAGTACCCCGACACCTGGAGCACCCCCCACAGCTACTTCAGCCTGACCTTCTGCGTGCAGGTGCAGGGCAAG
AGCAAGAGAGAGAAGAAGGACAGAGTGTTCACCGACAAGACCAGCGCCACCGTGATCTGCAGAAAGAACGCCAGCATCAGCGTG
AGAGCCCAGGACAGATACTACAGCAGCAGCTGGAGCGAGTGGGCCAGCGTGCCCTGCAGCGGCGGCGGCGGCGGCGGCAGCAGA
AACCTGCCCGTGGCCACCCCCGACCCCGGCATGTTCCCCTGCCTGCACCACAGCCAGAACCTGCTGAGAGCCGTGAGCAACATG
CTGCAGAAGGCCAGACAGACCCTGGAGTTCTACCCCTGCACCAGCGAGGAGATCGACCACGAGGACATCACCAAGGACAAGACC
AGCACCGTGGAGGCCTGCCTGCCCCTGGAGCTGACCAAGAACGAGAGCTGCCTGAACAGCAGAGAGACCAGCTTCATCACCAAC
GGCAGCTGCCTGGCCAGCAGAAAGACCAGCTTCATGATGGCCCTGTGCCTGAGCAGCATCTACGAGGACCTGAAGATGTACCAG
GTGGAGTTCAAGACCATGAACGCCAAGCTGCTGATGGACCCCAAGAGACAGATCTTCCTGGACCAGAACATGCTGGCCGTGATC
GACGAGCTGATGCAGGCCCTGAACTTCAACAGCGAGACCGTGCCCCAGAAGAGCAGCCTGGAGGAGCCCGACTTCTACAAGACC
AAGATCAAGCTGTGCATCCTGCTGCACGCCTTCAGAATCAGAGCCGTGACCATCGACAGAGTGATGAGCTACCTGAACGCCAGC
>hIL12AB_003 (SEQ ID NO: 1043)
ATGTGTCACCAGCAGTTGGTCATCTCTTGGTTTTCCCTGGTTTTTCTGGCATCTCCCCTCGTGGCCATATGGGAACTGAAGAAA
GATGTTTATGTCGTAGAATTGGATTGGTATCCGGATGCCCCTGGAGAAATGGTGGTCCTCACCTGTGACACCCCTGAAGAAGAT
GGTATCACCTGGACCTTGGACCAGAGCAGTGAGGTCTTAGGCTCTGGCAAAACCCTGACCATCCAAGTCAAAGAGTTTGGAGAT
GCTGGCCAGTACACCTGTCACAAAGGAGGCGAGGTTCTAAGCCATTCGCTCCTGCTGCTTCACAAAAAGGAAGATGGAATTTGG
TCCACTGATATTTTAAAGGACCAGAAAGAACCCAAAAATAAGACCTTTCTAAGATGCGAGGCCAAGAATTATTCTGGACGTTTC
ACCTGCTGGTGGCTGACGACAATCAGTACTGATTTGACATTCAGTGTCAAAAGCAGCAGAGGCTCTTCTGACCCCCAAGGGGTG
ACGTGCGGAGCTGCTACACTCTCTGCAGAGAGAGTCAGAGGGGACAACAAGGAGTATGAGTACTCAGTGGAGTGCCAGGAGGAC
AGTGCCTGCCCAGCTGCTGAGGAGAGTCTGCCCATTGAGGTCATGGTGGATGCCGTTCACAAGCTCAAGTATGAAAACTACACC
AGCAGCTTCTTCATCAGGGACATCATCAAACCTGACCCACCCAAGAACTTGCAGCTGAAGCCATTAAAGAATTCTCGGCAGGTG
GAGGTCAGCTGGGAGTACCCTGACACCTGGAGTACTCCACATTCCTACTTCTCCCTGACATTCTGCGTTCAGGTCCAGGGCAAG
AGCAAGAGAGAAAAGAAAGATAGAGTCTTCACGGACAAGACCTCAGCCACGGTCATCTGCCGCAAAAATGCCAGCATTAGCGTG
CGGGCCCAGGACCGCTACTATAGCTCATCTTGGAGCGAATGGGCATCTGTGCCCTGCAGTGGCGGAGGGGGCGGAGGGAGCAGA
AACCTCCCCGTGGCCACTCCAGACCCAGGAATGTTCCCATGCCTTCACCACTCCCAAAACCTGCTGAGGGCCGTCAGCAACATG
CTCCAGAAGGCCAGACAAACTTTAGAATTTTACCCTTGCACTTCTGAAGAGATTGATCATGAAGATATCACAAAAGATAAAACC
AGCACAGTGGAGGCCTGTTTACCATTGGAATTAACCAAGAATGAGAGTTGCCTAAATTCCAGAGAGACCTCTTTCATAACTAAT
GGGAGTTGCCTGGCCTCCAGAAAGACCTCTTTTATGATGGCCCTGTGCCTTAGTAGTATTTATGAAGACTTGAAGATGTACCAG
GTGGAGTTCAAGACCATGAATGCAAAGCTTCTGATGGATCCTAAGAGGCAGATCTTTTTAGATCAAAACATGCTGGCAGTTATT
GATGAGCTGATGCAGGCCCTGAATTTCAACAGTGAGACTGTGCCACAAAAATCCTCCCTTGAAGAACCGGACTTCTACAAGACC
AAGATCAAGCTCTGCATACTTCTTCATGCTTTCAGAATTCGGGCAGTGACTATTGATAGAGTGATGAGCTATCTGAATGCTTCC
>hIL12AB_004 (SEQ ID NO: 1044)
ATGGGCTGCCACCAGCAGCTGGTCATCAGCTGGTTCTCCCTGGTCTTCCTGGCCAGCCCCCTGGTGGCCATCTGGGAGCTGAAG
AAAGATGTCTATGTTGTAGAGCTGGACTGGTACCCAGATGCTCCTGGAGAAATGGTGGTTCTCACCTGTGACACGCCAGAAGAA
GATGGCATCACCTGGACGCTGGACCAGAGCTCAGAAGTTCTTGGCAGTGGAAAAACGCTGACCATACAAGTAAAAGAATTTGGG
GATGCTGGCCAGTACACCTGCCACAAAGGAGGAGAAGTTCTCAGCCACAGCCTGCTGCTGCTGCACAAGAPAGAAGATGGCATC
TGGAGCACAGACATTTTAAAAGACCAGAAGGAGCCCAAGAACAAAACCTTCCTTCGATGTGAGGCCAAGAACTACAGTGGCCGC
TTCACCTGCTGGTGGCTCACCACCATCAGCACAGACCTCACCTTCTCGGTGAAGAGCAGCCGTGGCAGCTCAGACCCCCAAGGA
GTCACCTGTGGGGCGGCCACGCTGTCGGCAGAAAGAGTTCGAGGGGACAACAAGGAATATGAATACTCGGTGGAATGTCAAGAA
GACTCGGCCTGCCCGGCGGCAGAAGAAAGTCTTCCCATAGAAGTCATGGTGGATGCTGTTCACAAATTAAAATATGAAAACTAC
ACCAGCAGCTTCTTCATCAGAGACATCATCAAGCCAGACCCGCCCAAGAACCTGCAGCTGAAGCCCCTGAAGAACAGCAGACAA
GTGGAAGTTTCCTGGGAGTACCCAGACACGTGGAGCACGCCGCACAGCTACTTCAGCCTCACCTTCTGTGTACAAGTACAAGGC
AAGAGCAAGAGAGAGAAGAAAGATCGTGTCTTCACAGACAAAACCTCGGCGACGGTCATCTGCAGGAAGAATGCCTCCATCTCG
GTTCGAGCCCAGGACCGCTACTACAGCAGCAGCTGGAGTGAGTGGGCCTCGGTGCCCTGCAGTGGTGGCGGCGGCGGCGGCAGC
AGAAACCTTCCTGTGGCCACGCCGGACCCTGGCATGTTCCCGTGCCTGCACCACAGCCAAAATTTACTTCGAGCTGTTTCTAAC
ATGCTGCAGAAAGCAAGACAAACTTTAGAATTCTACCCCTGCACCTCAGAAGAAATAGACCATGAAGACATCACCAAAGATAAA
ACCAGCACTGTAGAGGCCTGCCTGCCCCTGGAGCTCACCAAGAATGAATCCTGCCTCAACAGCAGAGAGACCAGCTTCATCACC
AATGGCAGCTGCCTGGCCAGCAGGAAAACCAGCTTCATGATGGCGCTCTGCCTGAGCAGCATCTATGAAGATTTGAAGATGTAC
CAAGTAGAATTTAAAACCATGAATGCCAAGCTGCTCATGGACCCCAAGAGACAAATATTTTTGGATCAAAACATGCTGGCTGTC
ATTGATGAGCTCATGCAAGCATTAAACTTCAACTCAGAGACGGTGCCCCAGAAGAGCAGCCTGGAGGAGCCAGACTTCTACAAA
ACCAAGATCAAGCTCTGCATCTTATTACATGCCTTCCGCATCCGGGCGGTCACCATTGACCGTGTCATGTCCTACTTAAATGCC
AGC
>hIL12AB_005 (SEQ ID NO: 1045)
ATGTGCCACCAGCAGCTGGTCATCAGCTGGTTCTCCCTGGTCTTCCTGGCCAGCCCCCTGGTGGCCATCTGGGAGCTGAAGAAA
GATGTCTATGTTGTAGAGCTGGACTGGTACCCAGATGCTCCTGGAGAAATGGTGGTTCTCACCTGTGACACGCCAGAAGAAGAT
GGCATCACCTGGACGCTGGACCAGAGCTCAGAAGTTCTTGGCAGTGGAAAAACGCTGACCATACAAGTAAAAGAATTTGGGGAT
GCTGGCCAGTACACCTGCCACAAAGGAGGAGAAGTTCTCAGCCACAGCCTGCTGCTGCTGCACAAGAAAGAAGATGGCATCTGG
AGCACAGACATTTTAAAAGACCAGAAGGAGCCCAAGAACAAAACCTTCCTTCGATGTGAGGCCAAGAACTACAGTGGCCGCTTC
ACCTGCTGGTGGCTCACCACCATCAGCACAGACCTCACCTTCTCGGTGAAGAGCAGCCGTGGCAGCTCAGACCCCCAAGGAGTC
ACCTGTGGGGCGGCCACGCTGTCGGCAGAAAGAGTTCGAGGGGACAACAAGGAATATGAATACTCGGTGGAATGTCAAGAAGAC
TCGGCCTGCCCGGCGGCAGAAGAAAGTCTTCCCATAGAAGTCATGGTGGATGCTGTTCACAAATTAAAATATGAAAACTACACC
AGCAGCTTCTTCATCAGAGACATCATCAAGCCAGACCCGCCCAAGAACCTGCAGCTGAAGCCCCTGAAGAACAGCAGACAAGTG
GAAGTTTCCTGGGAGTACCCAGACACGTGGAGCACGCCGCACAGCTACTTCAGCCTCACCTTCTGTGTACAAGTACAAGGCAAG
AGCAAGAGAGAGAAGAAAGATCGTGTCTTCACAGACAAAACCTCGGCGACGGTCATCTGCAGGAAGAATGCCTCCATCTCGGTT
CGAGCCCAGGACCGCTACTACAGCAGCAGCTGGAGTGAGTGGGCCTCGGTGCCCTGCAGTGGTGGCGGCGGCGGCGGCAGCAGA
AACCTTCCTGTGGCCACGCCGGACCCTGGCATGTTCCCGTGCCTGCACCACAGCCAAAATTTACTTCGAGCTGTTTCTAACATG
CTGCAGAAAGCAAGACAAACTTTAGAATTCTACCCCTGCACCTCAGAAGAAATAGACCATGAAGACATCACCAAAGATAAAACC
AGCACTGTAGAGGCCTGCCTGCCCCTGGAGCTCACCAAGAATGAATCCTGCCTCAACAGCAGAGAGACCAGCTTCATCACCAAT
GGCAGCTGCCTGGCCAGCAGGAAAACCAGCTTCATGATGGCGCTCTGCCTGAGCAGCATCTATGAAGATTTGAAGATGTACCAA
GTAGAATTTAAAACCATGAATGCCAAGCTGCTCATGGACCCCAAGAGACAAATATTTTTGGATCAAAACATGCTGGCTGTCATT
GATGAGCTCATGCAAGCATTAAACTTCAACTCAGAGACGGTGCCCCAGAAGAGCAGCCTGGAGGAGCCAGACTTCTACAAAACC
AAGATCAAGCTCTGCATCTTATTACATGCCTTCCGCATCCGGGCGGTCACCATTGACCGTGTCATGTCCTACTTAAATGCCAGC
>hIL12AB_006 (SEQ ID NO: 1046)
ATGTGCCACCAGCAGCTGGTGATCAGCTGGTTCAGCCTGGTGTTCCTGGCCAGCCCCCTGGTGGCCATCTGGGAGCTGAAGAAG
GACGTGTACGTGGTGGAGCTGGACTGGTACCCCGACGCCCCCGGCGAGATGGTGGTGCTGACCTGTGACACCCCCGAGGAGGAC
GGCATCACCTGGACCCTGGACCAGAGCAGCGAGGTGCTGGGCAGCGGCAAGACCCTGACCATCCAGGTGAAGGAGTTCGGGGAC
GCCGGCCAGTACACCTGCCACAAGGGCGGCGAGGTGCTGAGCCACAGCCTGCTGCTGCTGCACAAGAAGGAGGACGGCATCTGG
AGCACAGATATCCTGAAGGACCAGAAGGAGCCCAAGAACAAGACCTTCCTGAGATGCGAGGCCAAGAACTACAGCGGCAGATTC
ACCTGCTGGTGGCTGACCACCATCAGCACAGACTTGACCTTCAGCGTGAAGAGCAGCAGAGGCAGCAGCGACCCCCAGGGCGTG
ACCTGCGGCGCCGCCACCCTGAGCGCCGAGAGAGTGAGAGGGGACAACAAGGAGTACGAGTACAGCGTGGAGTGCCAGGAGGAC
AGCGCCTGCCCCGCCGCCGAGGAGAGCCTGCCCATCGAGGTGATGGTGGACGCCGTGCACAAGCTGAAGTACGAGAACTACACC
AGCAGCTTCTTCATCAGAGACATCATCAAGCCCGACCCGCCGAAGAACCTGCAGCTGAAGCCCCTGAAGAACAGCAGACAGGTG
GAGGTGAGCTGGGAGTACCCCGACACCTGGAGCACCCCCCACAGCTACTTCAGCCTGACCTTCTGCGTGCAGGTGCAGGGCAAG
AGCAAGAGAGAGAAGAAGGACAGAGTGTTCACAGATAAGACCAGCGCCACCGTGATCTGCAGAAAGAACGCCAGCATCAGCGTG
AGAGCCCAGGACAGATACTACAGCAGCAGCTGGAGCGAGTGGGCCAGCGTGCCCTGCAGCGGCGGCGGCGGCGGCGGCAGCAGA
AACCTGCCCGTGGCCACCCCCGACCCCGGCATGTTCCCCTGCCTGCACCACAGCCAGAACCTGCTGAGAGCCGTGAGCAACATG
CTGCAGAAGGCCAGACAGACCCTGGAGTTCTACCCCTGCACCAGCGAGGAGATCGACCACGAGGACATCACCAAGGACAAGACC
AGCACCGTGGAGGCCTGCCTGCCCCTGGAGCTGACCAAGAATGAAAGCTGCCTGAACAGCAGAGAGACCAGCTTCATCACCAAC
GGCAGCTGCCTGGCCAGCAGAAAGACCAGCTTCATGATGGCCCTGTGCCTGAGCAGCATCTACGAGGACCTGAAGATGTACCAG
GTGGAGTTCAAGACCATGAACGCCAAGCTGCTGATGGACCCCAAGAGACAGATCTTCCTGGACCAGAACATGCTGGCCGTGATC
GACGAGCTGATGCAGGCCCTGAACTTCAACAGCGAGACCGTGCCCCAGAAGAGCAGCCTGGAGGAGCCCGACTTCTACAAGACC
AAGATCAAGCTGTGCATCCTGCTGCACGCCTTCAGAATCAGAGCCGTGACCATCGACAGAGTGATGAGCTACCTGAACGCCAGC
>hIL12AB_007 (SEQ ID NO: 1047)
ATGTGCCACCAGCAGCTTGTCATCTCCTGGTTCTCTCTTGTCTTCCTTGCTTCTCCTCTTGTGGCCATCTGGGAGCTGAAGAAG
GATGTTTATGTTGTGGAGTTGGACTGGTACCCTGATGCTCCTGGAGAAATGGTGGTTCTCACCTGTGACACTCCTGAGGAGGAT
GGCATCACCTGGACTTTGGACCAGTCTTCTGAGGTTCTTGGCAGTGGAAAAACTCTTACTATTCAGGTGAAGGAGTTTGGAGAT
GCTGGCCAGTACACCTGCCACAAGGGTGGTGAAGTTCTCAGCCACAGTTTACTTCTTCTTCACAAGAAGGAGGATGGCATCTGG
TCTACTGACATTTTAAAAGACCAGAAGGAGCCCAAGAACAAGACTTTCCTTCGTTGTGAAGCCAAGAACTACAGTGGTCGTTTC
ACCTGCTGGTGGCTTACTACTATTTCTACTGACCTTACTTTCTCTGTGAAGTCTTCTCGTGGCTCTTCTGACCCTCAGGGTGTC
ACCTGTGGGGCTGCTACTCTTTCTGCTGAGCGTGTGCGTGGGGACAACAAGGAGTATGAATACTCGGTGGAGTGCCAGGAGGAC
TCTGCCTGCCCTGCTGCTGAGGAGTCTCTTCCTATTGAGGTGATGGTGGATGCTGTGCACAAGTTAAAATATGAAAACTACACT
TCTTCTTTCTTCATTCGTGACATTATAAAACCTGACCCTCCCAAGAACCTTCAGTTAAAACCTTTAAAAAACTCTCGTCAGGTG
GAGGTGTCCTGGGAGTACCCTGACACGTGGTCTACTCCTCACTCCTACTTCTCTCTTACTTTCTGTGTCCAGGTGCAGGGCAAG
TCCAAGCGTGAGAAGAAGGACCGTGTCTTCACTGACAAGACTTCTGCTACTGTCATCTGCAGGAAGAATGCATCCATCTCTGTG
CGTGCTCAGGACCGTTACTACAGCTCTTCCTGGTCTGAGTGGGCTTCTGTGCCCTGCTCTGGCGGCGGCGGCGGCGGCAGCAGA
AATCTTCCTGTGGCTACTCCTGACCCTGGCATGTTCCCCTGCCTTCACCACTCGCAGAACCTTCTTCGTGCTGTGAGCAACATG
CTTCAGAAGGCTCGTCAGACTTTAGAATTCTACCCCTGCACTTCTGAGGAGATTGACCATGAAGACATCACCAAGGACAAGACT
TCTACTGTGGAGGCCTGCCTTCCTTTAGAGCTGACCAAGAATGAATCCTGCTTAAATTCTCGTGAGACTTCTTTCATCACCAAT
GGCAGCTGCCTTGCCTCGCGCAAGACTTCTTTCATGATGGCTCTTTGCCTTTCTTCCATCTATGAAGACTTAAAAATGTACCAG
GTGGAGTTCAAGACCATGAATGCAAAGCTTCTCATGGACCCCAAGCGTCAGATATTTTTGGACCAGAACATGCTTGCTGTCATT
GATGAGCTCATGCAGGCTTTAAACTTCAACTCTGAGACTGTGCCTCAGAAGTCTTCTTTAGAAGAGCCTGACTTCTACAAGACC
AAGATAAAACTTTGCATTCTTCTTCATGCTTTCCGCATCCGTGCTGTGACTATTGACCGTGTGATGTCCTACTTAAATGCTTCT
>hIL12AB_008 (SEQ ID NO: 1048)
ATGTGTCATCAACAACTCGTGATTAGCTGGTTCAGTCTCGTGTTCCTGGCCTCTCCGCTGGTGGCCATCTGGGAGCTTAAGAAG
GACGTGTACGTGGTGGAGCTCGATTGGTACCCCGATGCTCCTGGCGAGATGGTGGTGCTAACCTGCGATACCCCCGAGGAGGAC
GGGATCACTTGGACCCTGGATCAGAGTAGCGAAGTCCTGGGCTCTGGCAAGACACTCACAATCCAGGTGAAGGAATTCGGAGAC
GCTGGTCAGTACACTTGCCACAAGGGGGGTGAAGTGCTGTCTCACAGCCTGCTGTTACTGCACAAGAAGGAGGATGGGATCTGG
TCAACCGACATCCTGAAGGATCAGAAGGAGCCTAAGAACAAGACCTTTCTGAGGTGTGAAGCTAAGAACTATTCCGGAAGATTC
ACTTGCTGGTGGTTGACCACAATCAGCACTGACCTGACCTTTTCCGTGAAGTCCAGCAGAGGAAGCAGCGATCCTCAGGGCGTA
ACGTGCGGCGCGGCTACCCTGTCAGCTGAGCGGGTTAGAGGCGACAACAAAGAGTATGAGTACTCCGTGGAGTGTCAGGAGGAC
AGCGCCTGCCCCGCAGCCGAGGAGAGTCTGCCCATCGAGGTGATGGTGGACGCTGTCCATAAGTTAAAATACGAAAATTACACA
AGTTCCTTTTTCATCCGCGATATTATCAAACCCGATCCCCCCAAGAACCTGCAGCTGAAGCCCCTGAAGAATAGCCGACAGGTG
GAAGTCTCTTGGGAGTATCCTGACACCTGGTCCACGCCTCACAGCTACTTTAGTCTGACTTTCTGTGTCCAGGTCCAGGGCAAG
AGCAAGAGAGAGAAAAAGGATAGAGTGTTTACTGACAAGACATCTGCTACAGTCATCTGCAGAAAGAACGCCAGTATCTCAGTG
AGGGCGCAGGACAGATACTACAGTAGTAGCTGGAGCGAATGGGCTAGCGTGCCCTGTTCAGGGGGCGGCGGAGGGGGCTCCAGG
AATCTGCCCGTGGCCACCCCCGACCCTGGGATGTTCCCTTGCCTCCATCACTCACAGAACCTGCTCAGAGCAGTGAGCAACATG
CTCCAAAAGGCCCGCCAGACCCTGGAGTTTTACCCTTGTACTTCAGAAGAGATCGATCACGAAGACATAACAAAGGATAAAACC
AGCACCGTGGAGGCCTGTCTGCCTCTAGAACTCACAAAGAATGAAAGCTGTCTGAATTCCAGGGAAACCTCCTTCATTACTAAC
GGAAGCTGTCTCGCATCTCGCAAAACATCATTCATGATGGCCCTCTGCCTGTCTTCTATCTATGAAGATCTCAAGATGTATCAG
GTGGAGTTCAAAACAATGAACGCCAAGCTGCTGATGGACCCCAAGAGACAGATCTTCCTGGACCAGAACATGCTGGCAGTGATC
GATGAGCTGATGCAAGCCTTGAACTTCAACTCAGAGACAGTGCCGCAAAAGTCCTCGTTGGAGGAACCAGATTTTTACAAAACC
AAAATCAAGCTGTGTATCCTTCTTCACGCCTTTCGGATCAGAGCCGTGACTATCGACCGGGTGATGTCATACCTGAATGCTTCC
>hIL12AB_009 (SEQ ID NO: 1049)
ATGTGCCACCAGCAGCTGGTCATCAGCTGGTTTAGCCTGGTCTTCCTGGCCAGCCCCCTGGTGGCCATCTGGGAGCTGAAGAAA
GATGTCTATGTTGTAGAGCTGGACTGGTACCCAGATGCTCCTGGAGAAATGGTGGTTCTCACCTGCGACACGCCAGAAGAAGAT
GGCATCACCTGGACGCTGGACCAGAGCAGCGAAGTACTGGGCAGTGGAAAAACGCTGACCATACAAGTAAAAGAATTTGGCGAT
GCTGGCCAGTACACCTGCCACAAAGGAGGAGAAGTACTGAGCCACAGCCTGCTGCTGCTGCACAAGAAAGAAGATGGCATCTGG
AGCACCGACATTTTAAAAGACCAGAAGGAGCCCAAGAACAAAACCTTCCTTCGATGTGAGGCGAAGAACTACAGTGGCCGCTTC
ACCTGCTGGTGGCTCACCACCATCAGCACCGACCTCACCTTCTCGGTGAAGAGCAGCCGTGGTAGCTCAGACCCCCAAGGAGTC
ACCTGTGGGGCGGCCACGCTGTCGGCAGAAAGAGTTCGAGGCGACAACAAGGAATATGAATACTCGGTGGAATGTCAAGAAGAC
TCGGCCTGCCCGGCGGCAGAAGAAAGTCTGCCCATAGAAGTCATGGTGGATGCTGTTCACAAATTAAAATATGAAAACTACACC
AGCAGCTTCTTCATCAGAGACATCATCAAGCCAGACCCCCCCAAGAACCTGCAGCTGAAGCCCCTGAAGAACAGCAGACAAGTG
GAAGTTTCCTGGGAGTACCCAGACACGTGGAGCACGCCGCACAGCTACTTCAGCCTCACCTTCTGTGTACAAGTACAAGGCAAG
AGCAAGAGAGAGAAGAAAGATCGTGTCTTCACCGACAAAACCTCGGCGACGGTCATCTGCAGGAAGAATGCAAGCATCTCGGTT
CGAGCCCAGGACCGCTACTACAGCAGCAGCTGGAGTGAGTGGGCCTCGGTGCCCTGCAGTGGTGGCGGCGGCGGCGGCAGCAGA
AACCTTCCTGTGGCCACGCCGGACCCTGGCATGTTTCCGTGCCTGCACCACAGCCAAAATTTATTACGAGCTGTTAGCAACATG
CTGCAGAAAGCAAGACAAACTTTAGAATTCTACCCCTGCACCTCAGAAGAAATAGACCATGAAGACATCACCAAAGATAAAACC
AGCACTGTAGAGGCCTGCCTGCCCCTGGAGCTCACCAAGAACGAGAGCTGCCTCAATAGCAGAGAGACCAGCTTCATCACCAAT
GGCAGCTGCCTGGCCAGCAGGAAAACCAGCTTCATGATGGCGCTCTGCCTGAGCAGCATCTATGAAGATCTGAAGATGTACCAA
GTAGAATTTAAAACCATGAATGCCAAGCTGCTCATGGACCCCAAGAGACAAATATTCCTCGACCAAAACATGCTGGCTGTCATT
GATGAGCTCATGCAAGCATTAAACTTCAACTCAGAGACGGTGCCCCAGAAGAGCAGCCTGGAGGAGCCAGACTTCTACAAAACC
AAGATCAAGCTCTGCATCTTATTACATGCCTTCCGCATCCGGGCGGTCACCATTGACCGTGTCATGTCCTACTTAAATGCCAGC
>hIL12AB_010 (SEQ ID NO: 1050)
ATGTGCCACCAGCAGCTTGTCATCTCCTGGTTTTCTCTTGTCTTCCTCGCTTCTCCTCTTGTGGCCATCTGGGAGCTGAAGAAA
GATGTCTATGTTGTAGAGCTGGACTGGTACCCGGACGCTCCTGGAGAAATGGTGGTTCTCACCTGCGACACTCCTGAAGAAGAT
GGCATCACCTGGACGCTGGACCAAAGCAGCGAAGTTTTAGGCTCTGGAAAAACGCTGACCATACAAGTAAAAGAATTTGGCGAC
GCTGGCCAGTACACGTGCCACAAAGGAGGAGAAGTTTTAAGCCACAGTTTACTTCTTCTTCACAAGAAAGAAGATGGCATCTGG
AGTACGGACATTTTAAAAGACCAGAAGGAGCCTAAGAACAAAACCTTCCTCCGCTGTGAAGCTAAGAACTACAGTGGTCGTTTC
ACCTGCTGGTGGCTCACCACCATCTCCACTGACCTCACCTTCTCTGTAAAATCAAGCCGTGGTTCTTCTGACCCCCAAGGAGTC
ACCTGTGGGGCTGCCACGCTCAGCGCTGAAAGAGTTCGAGGCGACAACAAGGAATATGAATATTCTGTGGAATGTCAAGAAGAT
TCTGCCTGCCCGGCGGCAGAAGAAAGTCTTCCCATAGAAGTCATGGTGGACGCTGTTCACAAATTAAAATATGAAAACTACACC
AGCAGCTTCTTCATTCGTGACATCATCAAACCAGACCCTCCTAAGAACCTTCAGTTAAAACCGCTGAAGAACAGCAGACAAGTG
GAAGTTTCCTGGGAGTACCCGGACACGTGGAGTACGCCGCACTCCTACTTCAGTTTAACCTTCTGTGTACAAGTACAAGGAAAA
TCAAAAAGAGAGAAGAAAGATCGTGTCTTCACTGACAAAACATCTGCCACGGTCATCTGCCGTAAGAACGCTTCCATCTCGGTT
CGAGCCCAGGACCGCTACTACAGCAGCAGCTGGAGTGAGTGGGCATCTGTTCCCTGCAGTGGTGGCGGCGGCGGCGGCAGCCGC
AACCTTCCTGTGGCCACGCCGGACCCTGGCATGTTCCCGTGCCTTCACCACTCGCAAAATCTTCTTCGTGCTGTTTCTAACATG
CTGCAGAAGGCGAGACAAACTTTAGAATTCTACCCGTGCACTTCTGAAGAAATAGACCATGAAGACATCACCAAGGACAAAACC
AGCACGGTGGAGGCCTGCCTTCCTTTAGAACTTACTAAGAACGAAAGTTGCCTTAACAGCCGTGAGACCAGCTTCATCACCAAT
GGCAGCTGCCTTGCTAGCAGGAAGACCAGCTTCATGATGGCGCTGTGCCTTTCTTCCATCTATGAAGATCTTAAGATGTACCAA
GTAGAATTTAAAACCATGAATGCCAAATTATTAATGGACCCCAAGAGACAAATATTCCTCGACCAAAACATGCTGGCTGTCATT
GATGAGCTCATGCAAGCATTAAACTTCAACTCAGAAACTGTTCCCCAGAAGTCATCTTTAGAAGAACCGGACTTCTACAAAACA
AAAATAAAACTCTGCATTCTTCTTCATGCCTTCCGCATCCGTGCTGTCACCATTGACCGTGTCATGTCCTACTTAAATGCTTCT
>hIL12AB_011 (SEQ ID NO: 1051)
ATGTGCCACCAGCAGCTGGTGATCAGCTGGTTCAGCCTGGTGTTCCTGGCCAGCCCCCTGGTGGCCATCTGGGAGCTGAAGAAG
GACGTGTACGTGGTGGAGCTGGACTGGTACCCGGACGCGCCGGGGGAGATGGTGGTGCTGACGTGCGACACGCCGGAGGAGGAC
GGGATCACGTGGACGCTGGACCAGAGCAGCGAGGTGCTGGGGAGCGGGAAGACGCTGACGATCCAGGTGAAGGAGTTCGGGGAC
GCGGGGCAGTACACGTGCCACAAGGGGGGGGAGGTGCTGAGCCACAGCCTGCTGCTGCTGCACAAGAAGGAGGACGGGATCTGG
AGCACGGACATCCTGAAGGACCAGAAGGAGCCGAAGAACAAGACGTTCCTGAGGTGCGAGGCGAAGAACTACAGCGGGAGGTTC
ACGTGCTGGTGGCTGACGACGATCAGCACGGACCTGACGTTCAGCGTGAAGAGCAGCAGGGGGAGCAGCGACCCGCAGGGGGTG
ACGTGCGGGGCGGCGACGCTGAGCGCGGAGAGGGTGAGGGGGGACAACAAGGAGTACGAGTACAGCGTGGAGTGCCAGGAGGAC
AGCGCGTGCCCGGCGGCGGAGGAGAGCCTGCCGATCGAGGTGATGGTGGACGCGGTGCACAAGCTGAAGTACGAGAACTACACG
AGCAGCTTCTTCATCAGGGACATCATCAAGCCGGACCCGCCGAAGAACCTGCAGCTGAAGCCGCTGAAGAACAGCAGGCAGGTG
GAGGTGAGCTGGGAGTACCCGGACACGTGGAGCACGCCGCACAGCTACTTCAGCCTGACGTTCTGCGTGCAGGTGCAGGGGAAG
AGCAAGAGGGAGAAGAAGGACAGGGTGTTCACGGACAAGACGAGCGCGACGGTGATCTGCAGGAAGAACGCGAGCATCAGCGTG
AGGGCGCAGGACAGGTACTACAGCAGCAGCTGGAGCGAGTGGGCGAGCGTGCCGTGCAGCGGGGGGGGGGGGGGGGGGAGCAGG
AACCTGCCGGTGGCGACGCCGGACCCGGGGATGTTCCCGTGCCTGCACCACAGCCAGAACCTGCTGAGGGCGGTGAGCAACATG
CTGCAGAAGGCGAGGCAGACGCTGGAGTTCTACCCGTGCACGAGCGAGGAGATCGACCACGAGGACATCACGAAGGACAAGACG
AGCACGGTGGAGGCGTGCCTGCCGCTGGAGCTGACGAAGAACGAGAGCTGCCTGAACAGCAGGGAGACGAGCTTCATCACGAAC
GGGAGCTGCCTGGCGAGCAGGAAGACGAGCTTCATGATGGCGCTGTGCCTGAGCAGCATCTACGAGGACCTGAAGATGTACCAG
GTGGAGTTCAAGACGATGAACGCGAAGCTGCTGATGGACCCGAAGAGGCAGATCTTCCTGGACCAGAACATGCTGGCGGTGATC
GACGAGCTGATGCAGGCGCTGAACTTCAACAGCGAGACGGTGCCGCAGAAGAGCAGCCTGGAGGAGCCGGACTTCTACAAGACG
AAGATCAAGCTGTGCATCCTGCTGCACGCGTTCAGGATCAGGGCGGTGACGATCGACAGGGTGATGAGCTACCTGAACGCGAGC
>hIL12AB_012 (SEQ ID NO: 1052)
ATGTGCCATCAGCAGCTGGTGATCAGCTGGTTCAGCCTCGTGTTTCTGGCCAGCCCCCTGGTGGCCATTTGGGAACTCAAGAAG
GACGTGTATGTAGTGGAACTCGACTGGTACCCTGACGCCCCAGGCGAAATGGTGGTCTTAACCTGCGACACCCCTGAGGAGGAC
GGAATCACCTGGACCTTGGACCAGAGCTCCGAGGTCCTCGGCAGTGGCAAGACCCTGACCATACAGGTGAAAGAATTTGGAGAC
GCAGGGCAATACACATGTCACAAGGGCGGGGAGGTTCTTTCTCACTCCCTTCTGCTTCTACATAAAAAGGAAGACGGAATTTGG
TCTACCGACATCCTCAAGGACCAAAAGGAGCCTAAGAATAAAACCTTCTTACGCTGTGAAGCTAAAAACTACAGCGGCAGATTC
ACTTGCTGGTGGCTCACCACCATTTCTACCGACCTGACCTTCTCGGTGAAGTCTTCAAGGGGCTCTAGTGATCCACAGGGAGTG
ACATGCGGGGCCGCCACACTGAGCGCTGAACGGGTGAGGGGCGATAACAAGGAGTATGAATACTCTGTCGAGTGTCAGGAGGAT
TCAGCTTGTCCCGCAGCTGAAGAGTCACTCCCCATAGAGGTTATGGTCGATGCTGTGCATAAACTGAAGTACGAAAACTACACC
AGCAGCTTCTTCATTCGGGACATTATAAAACCTGACCCCCCCAAGAACCTGCAACTTAAACCCCTGAAAAACTCTCGGCAGGTC
GAAGTTAGCTGGGAGTACCCTGATACTTGGTCCACCCCCCACTCGTACTTCTCACTGACTTTCTGTGTGCAGGTGCAGGGCAAG
AGCAAGAGAGAGAAAAAAGATCGTGTATTCACAGACAAGACCTCTGCCACCGTGATCTGCAGAAAAAACGCTTCCATCAGTGTC
AGAGCCCAAGACCGGTACTATAGTAGTAGCTGGAGCGAGTGGGCAAGTGTCCCCTGCTCTGGCGGCGGAGGGGGCGGCTCTCGA
AACCTCCCCGTCGCTACCCCTGATCCAGGAATGTTCCCTTGCCTGCATCACTCACAGAATCTGCTGAGAGCGGTCAGCAACATG
CTGCAGAAAGCTAGGCAAACACTGGAGTTTTATCCTTGTACCTCAGAGGAGATCGACCACGAGGATATTACCAAGGACAAGACC
AGCACGGTGGAGGCCTGCTTGCCCCTGGAACTGACAAAGAATGAATCCTGCCTTAATAGCCGTGAGACCTCTTTTATAACAAAC
GGATCCTGCCTGGCCAGCAGGAAGACCTCCTTCATGATGGCCCTCTGCCTGTCCTCAATCTACGAAGACCTGAAGATGTACCAG
GTGGAATTTAAAACTATGAACGCCAAGCTGTTGATGGACCCCAAGCGGCAGATCTTTCTGGATCAAAATATGCTGGCTGTGATC
GACGAACTGATGCAGGCCCTCAACTTTAACAGCGAGACCGTGCCACAAAAGAGCAGTCTTGAGGAGCCCGACTTCTACAAGACC
AAGATCAAGCTGTGCATCCTCCTTCATGCCTTCAGGATAAGAGCTGTCACCATCGACAGAGTCATGAGTTACCTGAATGCATCC
>hIL12AB_013 (SEQ ID NO: 1053)
ATGTGCCACCAGCAGCTGGTCATCTCCTGGTTCAGTCTTGTCTTCCTGGCCTCGCCGCTGGTGGCCATCTGGGAGCTGAAGAAA
GATGTTTATGTTGTAGAGCTGGACTGGTACCCAGATGCTCCTGGAGAAATGGTGGTCCTCACCTGTGACACGCCAGAAGAAGAT
GGCATCACCTGGACGCTGGACCAGAGCAGTGAAGTTCTTGGAAGTGGAAAAACGCTGACCATACAAGTAAAAGAATTTGGAGAT
GCTGGCCAGTACACCTGCCACAAAGGAGGAGAAGTTCTCAGCCACAGTTTATTATTACTTCACAAGAAAGAAGATGGCATCTGG
TCCACGGACATTTTAAAAGACCAGAAGGAGCCCAAAAATAAAACATTTCTTCGATGTGAGGCCAAGAACTACAGTGGTCGTTTC
ACCTGCTGGTGGCTGACCACCATCTCCACAGACCTCACCTTCAGTGTAAAAAGCAGCCGTGGTTCTTCTGACCCCCAAGGAGTC
ACCTGTGGGGCTGCCACGCTCTCTGCAGAAAGAGTTCGAGGGGACAACAAAGAATATGAGTACTCGGTGGAATGTCAAGAAGAC
TCGGCCTGCCCAGCTGCTGAGGAGAGTCTTCCCATAGAAGTCATGGTGGATGCTGTTCACAAATTAAAATATGAAAACTACACC
AGCAGCTTCTTCATCAGAGACATCATCAAACCTGACCCGCCCAAGAACTTACAGCTGAAGCCGCTGAAAAACAGCAGACAAGTA
GAAGTTTCCTGGGAGTACCCGGACACCTGGTCCACGCCGCACTCCTACTTCTCCCTCACCTTCTGTGTACAAGTACAAGGCAAG
AGCAAGAGAGAGAAGAAAGATCGTGTCTTCACGGACAAAACATCAGCCACGGTCATCTGCAGGAAAAATGCCAGCATCTCGGTG
CGGGCCCAGGACCGCTACTACAGCAGCAGCTGGAGTGAGTGGGCATCTGTGCCCTGCAGTGGTGGTGGGGGTGGTGGCAGCAGA
AACCTTCCTGTGGCCACTCCAGACCCTGGCATGTTCCCGTGCCTTCACCACTCCCAAAATTTACTTCGAGCTGTTTCTAACATG
CTGCAGAAAGCAAGACAAACTTTAGAATTCTACCCGTGCACTTCTGAAGAAATTGACCATGAAGACATCACAAAAGATAAAACC
AGCACAGTGGAGGCCTGTCTTCCTTTAGAGCTGACCAAAAATGAATCCTGCCTCAACAGCAGAGAGACCAGCTTCATCACCAAT
GGCAGCTGCCTGGCCTCCAGGAAAACCAGCTTCATGATGGCGCTCTGCCTCAGCTCCATCTATGAAGATTTGAAGATGTACCAA
GTAGAATTTAAAACCATGAATGCCAAATTATTAATGGACCCCAAGAGGCAGATATTTTTAGATCAAAACATGCTGGCAGTTATT
GATGAGCTCATGCAAGCATTAAACTTCAACAGTGAGACTGTACCTCAAAAAAGCAGCCTTGAAGAGCCGGACTTCTACAAAACC
AAGATCAAACTCTGCATTTTACTTCATGCCTTCCGCATCCGGGCGGTCACCATTGACCGTGTCATGTCCTACTTAAATGCCTCG
>hIL12AB_014 (SEQ ID NO: 1054)
ATGTGCCACCAGCAGCTTGTGATTTCTTGGTTCTCTCTTGTGTTCCTTGCTTCTCCTCTTGTGGCTATTTGGGAGTTAAAAAAG
GACGTGTACGTGGTGGAGCTTGACTGGTACCCTGATGCTCCTGGCGAGATGGTGGTGCTTACTTGTGACACTCCTGAGGAGGAC
GGCATTACTTGGACTCTTGACCAGTCTTCTGAGGTGCTTGGCTCTGGCAAGACTCTTACTATTCAGGTGAAGGAGTTCGGGGAT
GCTGGCCAGTACACTTGCCACAAGGGCGGCGAGGTGCTTTCTCACTCTCTTCTTCTTCTTCACAAGAAGGAGGACGGCATTTGG
TCTACTGACATTTTAAAAGACCAGAAGGAGCCCAAGAACAAGACTTTCCTTCGTTGCGAGGCCAAGAACTACTCTGGCCGTTTC
ACTTGCTGGTGGCTTACTACTATTTCTACTGACCTTACTTTCTCTGTGAAGTCTTCTCGTGGCTCTTCTGACCCTCAGGGCGTG
ACTTGTGGGGCTGCTACTCTTTCTGCTGAGCGTGTGCGTGGGGACAACAAGGAGTACGAGTACTCTGTGGAGTGCCAGGAGGAC
TCTGCTTGCCCTGCTGCTGAGGAGTCTCTTCCTATTGAGGTGATGGTGGATGCTGTGCACAAGTTAAAATACGAGAACTACACT
TCTTCTTTCTTCATTCGTGACATTATTAAGCCTGACCCTCCCAAGAACCTTCAGTTAAAACCTTTAAAAAACTCTCGTCAGGTG
GAGGTGTCTTGGGAGTACCCTGACACTTGGTCTACTCCTCACTCTTACTTCTCTCTTACTTTCTGCGTGCAGGTGCAGGGCAAG
TCTAAGCGTGAGAAGAAGGACCGTGTGTTCACTGACAAGACTTCTGCTACTGTGATTTGCAGGAAGAATGCATCTATTTCTGTG
CGTGCTCAGGACCGTTACTACTCTTCTTCTTGGTCTGAGTGGGCTTCTGTGCCTTGCTCTGGCGGCGGCGGCGGCGGCTCTAGA
AATCTTCCTGTGGCTACTCCTGACCCTGGCATGTTCCCTTGCCTTCACCACTCTCAGAACCTTCTTCGTGCTGTGAGCAACATG
CTTCAGAAGGCTCGTCAGACTCTTGAGTTCTACCCTTGCACTTCTGAGGAGATTGACCACGAGGACATCACCAAGGACAAGACT
TCTACTGTGGAGGCTTGCCTTCCTCTTGAGCTTACCAAGAATGAATCTTGCTTAAATTCTCGTGAGACTTCTTTCATCACCAAC
GGCTCTTGCCTTGCCTCGCGCAAGACTTCTTTCATGATGGCTCTTTGCCTTTCTTCTATTTACGAGGACTTAAAAATGTACCAG
GTGGAGTTCAAGACTATGAATGCAAAGCTTCTTATGGACCCCAAGCGTCAGATTTTCCTTGACCAGAACATGCTTGCTGTGATT
GACGAGCTTATGCAGGCTTTAAATTTCAACTCTGAGACTGTGCCTCAGAAGTCTTCTCTTGAGGAGCCTGACTTCTACAAGACC
AAGATTAAGCTTTGCATTCTTCTTCATGCTTTCCGTATTCGTGCTGTGACTATTGACCGTGTGATGTCTTACTTAAATGCTTCT
>hIL12AB_015 (SEQ ID NO: 1055)
ATGTGTCACCAGCAGCTGGTGATCAGCTGGTTTAGCCTGGTGTTTCTGGCCAGCCCCCTGGTGGCCATATGGGAACTGAAGAAA
GATGTGTATGTGGTAGAACTGGATTGGTATCCGGATGCCCCCGGCGAAATGGTGGTGCTGACCTGTGACACCCCCGAAGAAGAT
GGTATCACCTGGACCCTGGACCAGAGCAGCGAGGTGCTGGGCAGCGGCAAAACCCTGACCATCCAAGTGAAAGAGTTTGGCGAT
GCCGGCCAGTACACCTGTCACAAAGGCGGCGAGGTGCTAAGCCATTCGCTGCTGCTGCTGCACAAAAAGGAAGATGGCATCTGG
AGCACCGATATCCTGAAGGACCAGAAAGAACCCAAAAATAAGACCTTTCTAAGATGCGAGGCCAAGAATTATAGCGGCCGTTTC
ACCTGCTGGTGGCTGACGACCATCAGCACCGATCTGACCTTCAGCGTGAAAAGCAGCAGAGGCAGCAGCGACCCCCAAGGCGTG
ACGTGCGGCGCCGCCACCCTGAGCGCCGAGAGAGTGAGAGGCGACAACAAGGAGTATGAGTACAGCGTGGAGTGCCAGGAGGAC
AGCGCCTGCCCCGCCGCCGAGGAGAGCCTGCCCATCGAGGTGATGGTGGATGCCGTGCACAAGCTGAAGTATGAAAACTACACC
AGCAGCTTCTTCATCAGAGACATCATCAAACCCGACCCCCCCAAGAACCTGCAGCTGAAGCCCCTGAAGAATAGCAGACAGGTG
GAGGTGAGCTGGGAGTACCCCGACACCTGGAGCACCCCCCATAGCTACTTCAGCCTGACCTTCTGCGTGCAGGTGCAGGGCAAG
AGCAAGAGAGAAAAGAAAGATAGAGTGTTCACGGACAAGACCAGCGCCACGGTGATCTGCAGAAAAAATGCCAGCATCAGCGTG
AGAGCCCAGGACAGATACTATAGCAGCAGCTGGAGCGAATGGGCCAGCGTGCCCTGCAGCGGCGGCGGCGGCGGCGGCAGCAGA
AACCTGCCCGTGGCCACCCCCGACCCCGGCATGTTCCCCTGCCTGCACCACAGCCAAAACCTGCTGAGAGCCGTGAGCAACATG
CTGCAGAAGGCCAGACAAACCCTGGAATTTTACCCCTGCACCAGCGAAGAGATCGATCATGAAGATATCACCAAAGATAAAACC
AGCACCGTGGAGGCCTGTCTGCCCCTGGAACTGACCAAGAATGAGAGCTGCCTAAATAGCAGAGAGACCAGCTTCATAACCAAT
GGCAGCTGCCTGGCCAGCAGAAAGACCAGCTTTATGATGGCCCTGTGCCTGAGCAGCATCTATGAAGACCTGAAGATGTACCAG
GTGGAGTTCAAGACCATGAATGCCAAGCTGCTGATGGATCCCAAGAGACAGATCTTTCTGGATCAAAACATGCTGGCCGTGATC
GATGAGCTGATGCAGGCCCTGAATTTCAACAGCGAGACCGTGCCCCAAAAAAGCAGCCTGGAAGAACCGGATTTTTATAAAACC
AAAATCAAGCTGTGCATACTGCTGCATGCCTTCAGAATCAGAGCCGTGACCATCGATAGAGTGATGAGCTATCTGAATGCCAGC
>hIL12AB_016 (SEQ ID NO: 1056)
ATGTGCCACCAGCAGCTGGTCATCAGCTGGTTCAGCCTGGTCTTCCTGGCCAGCCCCCTGGTGGCCATCTGGGAGCTGAAGAAG
GATGTTTATGTTGTGGAGCTGGACTGGTACCCAGATGCCCCTGGGGAGATGGTGGTGCTGACCTGTGACACCCCAGAAGAGGAT
GGCATCACCTGGACCCTGGACCAGAGCTCAGAAGTGCTGGGCAGTGGAAAAACCCTGACCATCCAGGTGAAGGAGTTTGGAGAT
GCTGGCCAGTACACCTGCCACAAGGGTGGTGAAGTGCTGAGCCACAGCCTGCTGCTGCTGCACAAGAAGGAGGATGGCATCTGG
AGCACAGACATCCTGAAGGACCAGAAGGAGCCCAAGAACAAGACCTTCCTTCGCTGTGAAGCCAAGAACTACAGTGGCCGCTTC
ACCTGCTGGTGGCTGACCACCATCAGCACAGACCTCACCTTCTCGGTGAAGAGCAGCAGAGGCAGCTCAGACCCCCAGGGTGTC
ACCTGTGGGGCGGCCACGCTGTCGGCGGAGAGAGTTCGAGGGGACAACAAGGAGTATGAATACTCGGTGGAGTGCCAGGAGGAC
TCGGCGTGCCCGGCGGCAGAAGAGAGCCTGCCCATAGAAGTGATGGTGGATGCTGTGCACAAGCTGAAGTATGAAAACTACACC
AGCAGCTTCTTCATCAGAGACATCATCAAGCCAGACCCGCCCAAGAACCTGCAGCTGAAGCCCCTGAAGAACAGCAGACAAGTG
GAGGTTTCCTGGGAGTACCCAGACACGTGGAGCACCCCCCACAGCTACTTCAGCCTGACCTTCTGTGTCCAGGTGCAGGGCAAG
AGCAAGAGAGAGAAGAAGGACAGAGTCTTCACAGACAAGACCTCGGCCACGGTCATCTGCAGAAAGAATGCCTCCATCTCGGTT
CGAGCCCAGGACAGATACTACAGCAGCAGCTGGTCAGAATGGGCCTCGGTGCCCTGCAGTGGTGGCGGCGGCGGCGGCAGCAGA
AACCTGCCTGTTGCCACCCCAGACCCTGGGATGTTCCCCTGCCTGCACCACAGCCAGAACTTATTACGAGCTGTTTCTAACATG
CTGCAGAAGGCCAGACAAACCCTGGAGTTCTACCCCTGCACCTCAGAAGAGATTGACCATGAAGACATCACCAAGGACAAGACC
AGCACTGTAGAGGCCTGCCTGCCCCTGGAGCTGACCAAGAATGAAAGCTGCCTGAACAGCAGAGAGACCAGCTTCATCACCAAT
GGAAGCTGCCTGGCCAGCAGAAAGACCAGCTTCATGATGGCCCTGTGCCTGAGCAGCATCTATGAAGACCTGAAGATGTACCAG
GTGGAGTTCAAGACCATGAATGCAAAGCTGCTGATGGACCCCAAGAGACAAATATTTTTGGACCAGAACATGCTGGCTGTCATT
GATGAGCTGATGCAGGCCCTGAACTTCAACTCAGAAACTGTACCCCAGAAGAGCAGCCTGGAGGAGCCAGACTTCTACAAGACC
AAGATCAAGCTGTGCATCCTGCTTCATGCTTTCAGAATCAGAGCTGTCACCATTGACCGCGTGATGAGCTACTTAAATGCCTCG
>hIL12AB_017 (SEQ ID NO: 1057)
ATGTGCCACCAGCAGCTGGTAATCAGCTGGTTTTCCCTCGTCTTTCTGGCATCACCCCTGGTGGCTATCTGGGAGCTGAAGAAG
GACGTGTACGTGGTGGAGCTGGATTGGTACCCTGACGCCCCGGGGGAAATGGTGGTGTTAACATGCGACACGCCTGAGGAGGAC
GGCATCACCTGGACACTGGACCAGAGCAGCGAGGTGCTTGGGTCTGGTAAAACTCTGACTATTCAGGTGAAAGAGTTCGGGGAT
GCCGGCCAATATACTTGCCACAAGGGTGGCGAGGTGCTTTCTCATTCTCTGCTCCTGCTGCACAAGAAAGAAGATGGCATTTGG
TCTACTGATATTCTGAAAGACCAGAAGGAGCCCAAGAACAAGACCTTTCTGAGATGCGAGGCTAAAAACTACAGCGGAAGATTT
ACCTGCTGGTGGCTGACCACAATCTCAACCGACCTGACATTTTCAGTGAAGTCCAGCAGAGGGAGCTCCGACCCTCAGGGCGTG
ACCTGCGGAGCCGCCACTCTGTCCGCAGAAAGAGTGAGAGGTGATAATAAGGAGTACGAGTATTCAGTCGAGTGCCAAGAGGAC
TCTGCCTGCCCAGCCGCCGAGGAGAGCCTGCCAATCGAGGTGATGGTAGATGCGGTACACAAGCTGAAGTATGAGAACTACACA
TCCTCCTTCTTCATAAGAGACATTATCAAGCCTGACCCACCTAAAAATCTGCAACTCAAGCCTTTGAAAAATTCAAGACAGGTG
GAGGTGAGCTGGGAGTACCCTGATACTTGGAGCACCCCCCATAGCTACTTTTCGCTGACATTCTGCGTCCAGGTGCAGGGCAAG
TCAAAGAGAGAGAAGAAGGATCGCGTGTTCACTGATAAGACAAGCGCCACAGTGATCTGCAGAAAAAACGCTAGCATTAGCGTC
AGAGCACAGGACCGGTATTACTCCAGCTCCTGGAGCGAATGGGCATCTGTGCCCTGCAGCGGTGGGGGCGGAGGCGGATCTAGA
AACCTCCCCGTTGCCACACCTGATCCTGGAATGTTCCCCTGTCTGCACCACAGCCAGAACCTGCTGAGAGCAGTGTCTAACATG
CTCCAGAAGGCCAGGCAGACCCTGGAGTTTTACCCCTGCACCAGCGAGGAAATCGATCACGAGGACATCACCAAAGATAAAACC
TCCACCGTGGAGGCCTGCCTGCCCCTGGAACTGACCAAAAACGAGAGCTGCCTGAATAGCAGGGAGACCTCCTTCATCACCAAC
GGCTCATGCCTTGCCAGCCGGAAAACTAGCTTCATGATGGCCCTGTGCCTGTCTTCGATCTATGAGGACCTGAAAATGTACCAG
GTCGAATTTAAGACGATGAACGCAAAGCTGCTGATGGACCCCAAGCGGCAGATCTTTCTGGACCAGAACATGCTGGCAGTCATA
GATGAGTTGATGCAGGCATTAAACTTCAACAGCGAGACCGTGCCTCAGAAGTCCAGCCTCGAGGAGCCAGATTTTTATAAGACC
AAGATCAAACTATGCATCCTGCTGCATGCTTTCAGGATTAGAGCCGTCACCATCGATCGAGTCATGTCTTACCTGAATGCTAGC
>hIL12AB_018 (SEQ ID NO: 1058)
ATGTGTCACCAACAGTTAGTAATCTCCTGGTTTTCTCTGGTGTTTCTGGCCAGCCCCCTCGTGGCCATCTGGGAGCTTAAAAAG
GATGTGTACGTGGTGGAGCTGGACTGGTATCCCGATGCACCAGGCGAAATGGTCGTGCTGACCTGCGATACCCCTGAAGAAGAT
GGCATCACCTGGACTCTGGACCAGTCTTCCGAGGTGCTTGGATCTGGCAAGACTCTGACAATACAAGTTAAGGAGTTCGGGGAC
GCAGGACAGTACACCTGCCACAAAGGCGGCGAGGTCCTGAGTCACTCCCTGTTACTGCTCCACAAGAAAGAGGACGGCATTTGG
TCCACCGACATTCTGAAGGACCAGAAGGAGCCTAAGAATAAAACTTTCCTGAGATGCGAGGCAAAAAACTATAGCGGCCGCTTT
ACTTGCTGGTGGCTTACAACAATCTCTACCGATTTAACTTTCTCCGTGAAGTCTAGCAGAGGATCCTCTGACCCGCAAGGAGTG
ACTTGCGGAGCCGCCACCTTGAGCGCCGAAAGAGTCCGTGGCGATAACAAAGAATACGAGTACTCCGTGGAGTGCCAGGAAGAT
TCCGCCTGCCCAGCTGCCGAGGAGTCCCTGCCCATTGAAGTGATGGTGGATGCCGTCCACAAGCTGAAGTACGAAAACTATACC
AGCAGCTTCTTCATCCGGGATATCATTAAGCCCGACCCTCCTAAAAACCTGCAACTTAAGCCCCTAAAGAATAGTCGGCAGGTT
GAGGTCAGCTGGGAATATCCTGACACATGGAGCACCCCCCACTCTTATTTCTCCCTGACCTTCTGCGTGCAGGTGCAGGGCAAG
AGTAAACGGGAGAAAAAGGACAGGGTCTTTACCGATAAAACCAGCGCTACGGTTATCTGTCGGAAGAACGCTTCCATCTCCGTC
CGCGCTCAGGATCGTTACTACTCGTCCTCATGGAGCGAGTGGGCCAGCGTGCCCTGCAGCGGCGGCGGTGGAGGCGGATCCAGA
AATCTGCCTGTTGCCACACCAGACCCTGGCATGTTCCCCTGTCTGCATCATAGCCAGAACCTGCTCAGAGCCGTGAGCAACATG
CTCCAGAAGGCCAGGCAGACATTGGAGTTCTACCCGTGTACATCTGAGGAAATCGATCACGAAGATATAACCAAGGACAAAACC
TCTACAGTAGAGGCTTGTTTGCCCCTGGAGTTGACCAAAAACGAGAGTTGCCTGAACAGTCGCGAGACAAGCTTCATTACTAAC
GGCAGCTGTCTCGCCTCCAGAAAGACATCCTTCATGATGGCCCTGTGTCTTTCCAGCATATACGAAGACCTGAAAATGTACCAG
GTCGAGTTCAAAACAATGAACGCCAAGCTGCTTATGGACCCCAAGAGACAGATCTTCCTCGACCAAAACATGCTCGCTGTGATC
GATGAGCTGATGCAGGCTCTCAACTTCAATTCCGAAACAGTGCCACAGAAGTCCAGTCTGGAAGAACCCGACTTCTACAAGACC
AAGATTAAGCTGTGTATTTTGCTGCATGCGTTTAGAATCAGAGCCGTGACCATTGATCGGGTGATGAGCTACCTGAACGCCTCG
>hIL12AB_019 (SEQ ID NO: 1059)
ATGTGCCACCAGCAGCTTGTCATCTCCTGGTTTTCTCTTGTCTTCCTGGCCTCGCCGCTGGTGGCCATCTGGGAGCTGAAGAAA
GATGTCTATGTTGTAGAGCTGGACTGGTACCCAGATGCTCCTGGAGAAATGGTGGTTCTCACCTGTGACACTCCTGAAGAAGAT
GGCATCACCTGGACGCTGGACCAAAGCTCAGAAGTTCTTGGCAGTGGAAAAACGCTGACCATACAAGTAAAAGAATTTGGGGAT
GCTGGCCAGTACACGTGCCACAAAGGAGGAGAAGTTCTCAGCCACAGTTTACTTCTTCTTCACAAGAAAGAAGATGGCATCTGG
TCCACGGACATTTTAAAAGACCAGAAGGAGCCCAAGAACAAAACCTTCCTCCGCTGTGAGGCCAAGAACTACAGTGGTCGTTTC
ACCTGCTGGTGGCTCACCACCATCTCCACTGACCTCACCTTCTCTGTAAAAAGCAGCCGTGGTTCTTCTGACCCCCAAGGAGTC
ACCTGTGGGGCTGCCACGCTCTCGGCAGAAAGAGTTCGAGGGGACAACAAGGAATATGAATATTCTGTGGAATGTCAAGAAGAT
TCTGCCTGCCCGGCGGCAGAAGAAAGTCTTCCCATAGAAGTCATGGTGGATGCTGTTCACAAATTAAAATATGAAAACTACACC
AGCAGCTTCTTCATTCGTGACATCATCAAACCAGACCCGCCCAAGAACCTTCAGTTAAAACCTTTAAAAAACAGCAGACAAGTA
GAAGTTTCCTGGGAGTACCCGGACACGTGGTCCACGCCGCACTCCTACTTCAGTTTAACCTTCTGTGTACAAGTACAAGGAAAA
TCAAAAAGAGAGAAGAAAGATCGTGTCTTCACTGACAAAACATCTGCCACGGTCATCTGCAGGAAGAATGCCTCCATCTCGGTT
CGAGCCCAGGACCGCTACTACAGCAGCAGCTGGAGTGAGTGGGCATCTGTTCCCTGCAGTGGTGGCGGCGGCGGCGGCAGCCGC
AACCTTCCTGTGGCCACGCCGGACCCTGGCATGTTCCCGTGCCTTCACCACTCCCAAAATCTTCTTCGTGCTGTTTCTAACATG
CTGCAGAAGGCGCGCCAAACTTTAGAATTCTACCCGTGCACTTCTGAAGAAATAGACCATGAAGACATCACCAAAGATAAAACC
AGCACGGTGGAGGCCTGCCTTCCTTTAGAGCTGACCAAGAATGAATCCTGCCTCAACAGCAGAGAGACCAGCTTCATCACCAAT
GGCAGCTGCCTGGCCTCGCGCAAGACCAGCTTCATGATGGCGCTGTGCCTTTCTTCCATCTATGAAGATTTAAAGATGTACCAA
GTAGAATTTAAAACCATGAATGCCAAATTATTAATGGACCCCAAAAGACAAATATTTTTGGATCAAAACATGCTGGCTGTCATT
GATGAGCTCATGCAAGCATTAAACTTCAACTCAGAAACTGTTCCCCAGAAGTCATCTTTAGAAGAGCCGGACTTCTACAAAACA
AAAATAAAACTCTGCATTCTTCTTCATGCCTTCCGCATCCGTGCTGTCACCATTGACCGTGTCATGTCCTACTTAAATGCTTCT
>hIL12AB_020 (SEQ ID NO: 1060)
ATGTGCCACCAGCAGCTGGTGATCAGCTGGTTCAGCCTGGTGTTCCTGGCTAGCCCTCTGGTGGCCATCTGGGAGCTGAAGAAG
GACGTGTACGTGGTGGAGTTAGACTGGTACCCCGACGCTCCCGGCGAGATGGTGGTGCTGACCTGCGACACCCCCGAGGAGGAC
GGGATCACCTGGACCCTGGATCAGTCAAGCGAGGTGCTGGGAAGCGGCAAGACCCTGACCATCCAGGTGAAGGAGTTCGGCGAC
GCCGGCCAATACACTTGCCACAAGGGAGGCGAGGTGCTGTCCCACTCCCTCCTGCTGCTGCACAAAAAGGAAGACGGCATCTGG
AGCACCGACATCCTGAAAGACCAGAAGGAGCCTAAGAACAAGACATTCCTCAGATGCGAGGCCAAGAATTACTCCGGGAGATTC
ACCTGTTGGTGGCTGACCACCATCAGCACAGACCTGACCTTCAGCGTGAAGAGCAGCAGAGGCAGCAGCGACCCCCAGGGCGTG
ACCTGTGGCGCCGCCACCCTGAGCGCCGAAAGAGTGCGCGGCGACAACAAGGAGTACGAGTACTCCGTGGAATGCCAGGAGGAC
AGCGCCTGCCCCGCCGCCGAGGAGAGCCTGCCCATCGAGGTGATGGTGGACGCCGTCCACAAGCTGAAGTACGAGAACTACACC
TCTAGCTTCTTCATCCGGGACATCATCAAGCCCGATCCCCCCAAGAACCTGCAGCTGAAACCCCTGAAGAACAGCAGACAGGTG
GAGGTGAGCTGGGAGTATCCCGACACCTGGTCCACCCCCCACAGCTATTTTAGCCTGACCTTCTGCGTGCAAGTGCAGGGCAAG
AGCAAGAGAGAGAAGAAGGACCGCGTGTTCACCGACAAAACCAGCGCCACCGTGATCTGCAGAAAGAACGCCAGCATCAGCGTG
AGGGCCCAGGATAGATACTACAGTTCCAGCTGGAGCGAGTGGGCCAGCGTGCCCTGCAGCGGCGGCGGCGGGGGAGGCTCTAGA
AACCTGCCCGTGGCTACCCCCGATCCCGGAATGTTCCCCTGCCTGCACCACAGCCAGAACCTGCTGAGGGCGGTGTCCAACATG
CTTCAGAAGGCCCGGCAGACCCTGGAGTTCTACCCCTGTACCTCTGAGGAGATCGATCATGAGGACATCACAAAGGACAAAACC
AGCACCGTGGAGGCCTGCCTGCCCCTGGAGCTGACCAAGAACGAGAGCTGCCTGAACTCCCGCGAGACCAGCTTCATCACGAAC
GGCAGCTGCCTGGCCAGCAGGAAGACCTCCTTCATGATGGCCCTGTGCCTGAGCAGCATCTACGAGGACCTGAAAATGTACCAG
GTGGAGTTTAAGACCATGAACGCCAAGCTGCTGATGGACCCCAAGCGGCAAATCTTCCTGGACCAGAACATGCTGGCAGTGATC
GACGAGCTCATGCAGGCCCTGAACTTCAATAGCGAGACAGTCCCCCAGAAGAGCAGCCTGGAGGAGCCCGACTTTTACAAGACC
AAGATCAAGCTGTGCATCCTGCTGCACGCCTTTAGAATCCGTGCCGTGACCATTGACAGAGTGATGAGCTACCTGAATGCCAGC
>hIL12AB_021 (SEQ ID NO: 1061)
ATGTGCCACCAGCAGCTGGTGATCAGCTGGTTCAGCCTGGTGTTCCTGGCCAGCCCTCTGGTTGCCATCTGGGAGCTGAAGAAA
GACGTGTACGTCGTGGAACTGGACTGGTATCCGGACGCCCCGGGCGAGATGGTGGTGCTGACCTGTGACACCCCCGAGGAGGAC
GGCATCACCTGGACGCTGGACCAATCCTCCGAGGTGCTGGGAAGCGGCAAGACCCTGACCATCCAGGTGAAGGAATTCGGGGAC
GCCGGGCAGTACACCTGCCACAAGGGGGGCGAAGTGCTGTCCCACTCGCTGCTGCTCCTGCATAAGAAGGAGGATGGAATCTGG
TCCACCGACATCCTCAAAGATCAGAAGGAGCCCAAGAACAAGACGTTCCTGCGCTGTGAAGCCAAGAATTATTCGGGGCGATTC
ACGTGCTGGTGGCTGACAACCATCAGCACCGACCTGACGTTTAGCGTGAAGAGCAGCAGGGGGTCCAGCGACCCCCAGGGCGTG
ACGTGCGGCGCCGCCACCCTCTCCGCCGAGAGGGTGCGGGGGGACAATAAGGAGTACGAGTACAGCGTGGAATGCCAGGAGGAC
AGCGCCTGCCCCGCCGCGGAGGAAAGCCTCCCGATAGAGGTGATGGTGGACGCCGTGCACAAGCTCAAGTATGAGAATTACACC
AGCAGCTTTTTCATCCGGGACATTATCAAGCCCGACCCCCCGAAGAACCTCCAGCTGAAGCCCCTGAAGAACAGCCGGCAGGTG
GAAGTCTCCTGGGAGTATCCCGACACCTGGAGCACCCCGCACAGCTACTTCTCCCTGACCTTCTGTGTGCAGGTGCAGGGCAAG
TCCAAGAGGGAAAAGAAGGACAGGGTTTTCACCGACAAGACCAGCGCGACCGTGATCTGCCGGAAGAACGCCAGCATAAGCGTC
CGCGCCCAAGATAGGTACTACAGCAGCTCCTGGAGCGAGTGGGCTAGCGTGCCCTGCAGCGGGGGCGGGGGTGGGGGCTCCAGG
AACCTGCCAGTGGCGACCCCCGACCCCGGCATGTTCCCCTGCCTCCATCACAGCCAGAACCTGCTGAGGGCCGTCAGCAATATG
CTGCAGAAGGCCAGGCAGACCCTGGAATTCTACCCCTGCACGTCGGAGGAGATCGATCACGAGGATATCACAAAAGACAAGACT
TCCACCGTGGAGGCCTGCCTGCCCCTGGAGCTCACCAAGAATGAGTCCTGTCTGAACTCCCGGGAAACCAGCTTCATCACCAAC
GGGTCCTGCCTGGCCAGCAGGAAGACCAGCTTTATGATGGCCCTGTGCCTGTCGAGCATCTACGAGGACCTGAAGATGTACCAG
GTCGAGTTCAAGACAATGAACGCCAAGCTGCTGATGGACCCCAAGAGGCAAATCTTCCTGGACCAGAATATGCTTGCCGTCATC
GACGAGCTCATGCAGGCCCTGAACTTCAACTCCGAGACCGTGCCCCAGAAGAGCAGCCTGGAGGAGCCCGACTTCTACAAGACC
AAGATCAAGCTGTGCATCCTGCTGCACGCGTTCAGGATCCGGGCAGTCACCATCGACCGTGTGATGTCCTACCTGAACGCCAGC
>hIL12AB_022 (SEQ ID NO: 1062)
ATGTGCCATCAGCAGCTGGTGATCAGCTGGTTCAGCCTGGTGTTCCTCGCCTCTCCCCTGGTGGCCATCTGGGAGCTCAAAAAG
GACGTGTACGTGGTGGAGCTCGACTGGTACCCAGACGCCCCCGGGGAGATGGTGGTGCTGACCTGCGACACCCCCGAAGAAGAC
GGCATCACGTGGACCCTCGACCAGTCCAGCGAGGTGCTGGGGAGCGGGAAGACTCTGACCATCCAGGTCAAGGAGTTCGGGGAC
GCCGGGCAGTACACGTGCCACAAGGGCGGCGAAGTCTTAAGCCACAGCCTGCTCCTGCTGCACAAGAAGGAGGACGGGATCTGG
TCCACAGACATACTGAAGGACCAGAAGGAGCCGAAGAATAAAACCTTTCTGAGGTGCGAGGCCAAGAACTATTCCGGCAGGTTC
ACGTGCTGGTGGCTTACAACAATCAGCACAGACCTGACGTTCAGCGTGAAGTCCAGCCGCGGCAGCAGCGACCCCCAGGGGGTG
ACCTGCGGCGCCGCCACCCTGAGCGCCGAGCGGGTGCGCGGGGACAACAAGGAGTACGAGTACTCCGTGGAGTGCCAGGAAGAC
AGCGCCTGTCCCGCCGCCGAAGAGAGCCTGCCTATCGAGGTCATGGTAGATGCAGTGCATAAGCTGAAGTACGAGAACTATACG
AGCAGCTTTTTCATACGCGACATCATCAAGCCCGACCCCCCCAAGAACCTGCAGCTTAAGCCCCTGAAGAATAGCCGGCAGGTG
GAGGTCTCCTGGGAGTACCCCGACACCTGGTCAACGCCCCACAGCTACTTCTCCCTGACCTTTTGTGTCCAAGTCCAGGGAAAG
AGCAAGAGGGAGAAGAAAGATCGGGTGTTCACCGACAAGACCTCCGCCACGGTGATCTGCAGGAAGAACGCCAGCATCTCCGTG
AGGGCGCAAGACAGGTACTACTCCAGCAGCTGGTCCGAATGGGCCAGCGTGCCCTGCTCCGGCGGCGGGGGCGGCGGCAGCCGA
AACCTACCCGTGGCCACGCCGGATCCCGGCATGTTTCCCTGCCTGCACCACAGCCAGAACCTCCTGAGGGCCGTGTCCAACATG
CTGCAGAAGGCCAGGCAGACTCTGGAGTTCTACCCCTGCACGAGCGAGGAGATCGATCACGAGGACATCACCAAGGATAAGACC
AGCACTGTGGAGGCCTGCCTTCCCCTGGAGCTGACCAAGAACGAGAGCTGTCTGAACTCCAGGGAGACCTCATTCATCACCAAC
GGCTCCTGCCTGGCCAGCAGGAAAACCAGCTTCATGATGGCCTTGTGTCTCAGCTCCATCTACGAGGACCTGAAGATGTATCAG
GTCGAGTTCAAGACAATGAACGCCAAGCTGCTGATGGACCCCAAAAGGCAGATCTTCCTGGACCAGAACATGCTGGCCGTCATC
GACGAGCTGATGCAGGCCCTGAACTTCAACAGCGAGACGGTGCCCCAGAAAAGCTCCCTGGAGGAGCCCGACTTCTACAAGACC
AAGATCAAGCTGTGCATCCTGCTGCACGCCTTCAGGATCAGGGCAGTGACCATCGACCGGGTGATGTCATACCTTAACGCCAGC
>hIL12AB_023 (SEQ ID NO: 1063)
ATGTGCCATCAGCAGCTGGTGATCTCCTGGTTCAGCCTGGTGTTTCTGGCCTCGCCCCTGGTCGCCATCTGGGAGCTGAAGAAA
GACGTGTACGTCGTCGAACTGGACTGGTACCCCGACGCCCCCGGGGAGATGGTGGTGCTGACCTGCGACACGCCGGAGGAGGAC
GGCATCACCTGGACCCTGGATCAAAGCAGCGAGGTGCTGGGCAGCGGCAAGACCCTGACCATCCAAGTGAAGGAATTCGGCGAT
GCCGGCCAGTACACCTGTCACAAAGGGGGCGAGGTGCTCAGCCACAGCCTGCTGCTGCTGCACAAGAAGGAGGATGGCATCTGG
AGCACCGATATCCTGAAGGACCAGAAAGAGCCCAAGAACAAGACGTTCCTGAGGTGCGAGGCCAAGAACTACAGCGGTAGGTTC
ACGTGTTGGTGGCTGACCACCATCAGCACCGACCTGACGTTCAGCGTGAAGAGCTCCAGGGGCAGCTCCGACCCACAGGGGGTG
ACGTGCGGGGCCGCAACCCTCAGCGCCGAAAGGGTGCGGGGGGACAACAAGGAGTACGAATACTCCGTGGAGTGCCAGGAAGAT
TCGGCCTGCCCCGCCGCGGAGGAGAGCCTCCCCATCGAGGTAATGGTGGACGCCGTGCATAAGCTGAAGTACGAGAACTACACC
AGCTCGTTCTTCATCCGAGACATCATCAAACCCGACCCGCCCAAAAATCTGCAGCTCAAGCCCCTGAAGAACTCCAGGCAGGTG
GAGGTGAGCTGGGAGTACCCCGACACCTGGTCCACCCCGCACAGCTACTTCTCCCTGACATTCTGCGTGCAGGTGCAGGGCAAG
AGCAAGCGGGAGAAGAAGGACAGGGTGTTCACCGACAAGACGAGCGCCACCGTGATCTGCCGAAAGAACGCCAGCATCTCGGTG
CGCGCCCAGGATAGGTACTATTCCAGCTCCTGGAGCGAGTGGGCCTCGGTACCCTGCAGCGGCGGCGGGGGCGGCGGCAGTAGG
AATCTGCCCGTGGCTACCCCGGACCCGGGCATGTTCCCCTGCCTCCACCACAGCCAGAACCTGCTGAGGGCCGTGAGCAACATG
CTGCAGAAGGCCAGACAGACGCTGGAGTTCTACCCCTGCACGAGCGAGGAGATCGACCACGAGGACATCACCAAGGATAAAACT
TCCACCGTCGAGGCCTGCCTGCCCTTGGAGCTGACCAAGAATGAATCCTGTCTGAACAGCAGGGAGACCTCGTTTATCACCAAT
GGCAGCTGCCTCGCCTCCAGGAAGACCAGCTTCATGATGGCCCTCTGTCTGAGCTCCATCTATGAGGACCTGAAGATGTACCAG
GTGGAGTTCAAGACCATGAACGCGAAGCTGCTGATGGACCCCAAGAGGCAGATCTTCCTGGATCAGAATATGCTGGCGGTGATC
GACGAGCTCATGCAGGCCCTCAATTTCAATAGCGAGACAGTGCCCCAGAAGTCCTCCCTGGAGGAGCCCGACTTCTACAAGACC
AAGATCAAGCTGTGTATCCTGCTGCACGCCTTCCGGATCCGGGCCGTCACCATCGACCGGGTCATGAGCTACCTCAATGCCAGC
>hIL12AB_024 (SEQ ID NO: 1064)
ATGTGCCACCAGCAGCTGGTGATCTCCTGGTTCTCCCTGGTGTTCCTGGCCTCGCCCCTGGTGGCCATCTGGGAGCTGAAGAAG
GACGTGTACGTCGTGGAGCTCGACTGGTACCCCGACGCCCCTGGCGAGATGGTGGTGCTGACCTGCGACACCCCAGAGGAGGAT
GGCATCACCTGGACCCTGGATCAGTCCTCCGAGGTGCTGGGCTCCGGCAAGACGCTGACCATCCAAGTGAAGGAGTTCGGTGAC
GCCGGACAGTATACCTGCCATAAGGGCGGCGAGGTCCTGTCCCACAGCCTCCTCCTCCTGCATAAGAAGGAGGACGGCATCTGG
AGCACCGACATCCTGAAGGACCAGAAGGAGCCCAAGAACAAGACCTTTCTGAGGTGCGAGGCCAAGAACTACAGCGGCCGATTC
ACCTGCTGGTGGCTCACCACCATATCCACCGACCTGACTTTCTCCGTCAAGTCCTCCCGGGGGTCCAGCGACCCCCAGGGAGTG
ACCTGCGGCGCCGCCACCCTCAGCGCCGAGCGGGTGCGGGGGGACAACAAGGAGTACGAATACTCCGTCGAGTGCCAGGAGGAC
TCCGCCTGCCCGGCCGCCGAGGAGAGCCTGCCCATCGAGGTGATGGTCGACGCGGTGCACAAGCTGAAGTACGAGAACTACACC
AGCAGTTTCTTCATCAGGGATATCATCAAGCCAGATCCCCCGAAGAATCTGCAACTGAAGCCGCTGAAAAACTCACGACAGGTG
GAGGTGAGCTGGGAGTACCCCGACACGTGGAGCACCCCACATTCCTACTTCAGCCTGACCTTCTGCGTGCAGGTCCAGGGCAAG
AGCAAGCGGGAGAAGAAGGACAGGGTGTTCACGGATAAGACCAGTGCCACCGTGATCTGCAGGAAGAACGCCTCTATTAGCGTG
AGGGCCCAGGATCGGTATTACTCCTCGAGCTGGAGCGAATGGGCCTCCGTGCCCTGCAGTGGGGGGGGTGGAGGCGGGAGCAGG
AACCTGCCCGTAGCAACCCCCGACCCCGGGATGTTCCCCTGTCTGCACCACTCGCAGAACCTGCTGCGCGCGGTGAGCAACATG
CTCCAAAAAGCCCGTCAGACCTTAGAGTTCTACCCCTGCACCAGCGAAGAAATCGACCACGAAGACATCACCAAGGACAAAACC
AGCACCGTGGAGGCGTGCCTGCCGCTGGAGCTGACCAAGAACGAGAGCTGCCTCAACTCCAGGGAGACCAGCTTTATCACCAAC
GGCTCGTGCCTAGCCAGCCGGAAAACCAGCTTCATGATGGCCCTGTGCCTGAGCTCCATTTACGAGGACCTGAAGATGTATCAG
GTGGAGTTCAAGACCATGAATGCCAAACTCCTGATGGACCCCAAGAGGCAGATCTTCCTGGACCAGAACATGCTCGCGGTGATC
GATGAGCTGATGCAGGCCCTGAACTTTAATAGCGAGACCGTGCCCCAGAAAAGCAGCCTGGAGGAGCCGGACTTCTACAAGACC
AAAATCAAGCTGTGCATCCTGCTCCACGCCTTCCGCATCCGGGCCGTGACCATCGACAGGGTGATGAGCTACCTGAACGCCAGC
>hIL12AB_025 (SEQ ID NO: 1065)
ATGTGCCATCAGCAGCTGGTGATTTCCTGGTTCTCCCTGGTGTTCCTGGCCAGCCCCCTCGTGGCGATCTGGGAGCTAAAGAAG
GACGTGTACGTGGTGGAGCTGGACTGGTACCCGGACGCACCCGGCGAGATGGTCGTTCTGACCTGCGATACGCCAGAGGAGGAC
GGCATCACCTGGACCCTCGATCAGAGCAGCGAGGTCCTGGGGAGCGGAAAGACCCTGACCATCCAGGTCAAGGAGTTCGGCGAC
GCCGGCCAGTACACCTGCCACAAAGGTGGCGAGGTCCTGAGCCACTCGCTGCTGCTCCTGCATAAGAAGGAGGACGGAATCTGG
AGCACAGACATCCTGAAAGACCAGAAGGAGCCCAAGAACAAGACCTTCCTGAGGTGCGAGGCCAAGAACTACAGCGGGCGCTTC
ACGTGCTGGTGGCTGACCACCATCAGCACGGACCTCACCTTCTCCGTGAAGAGCAGCCGGGGATCCAGCGATCCCCAAGGCGTC
ACCTGCGGCGCGGCCACCCTGAGCGCGGAGAGGGTCAGGGGCGATAATAAGGAGTATGAGTACAGCGTGGAGTGCCAGGAGGAC
AGCGCCTGCCCGGCCGCCGAGGAGTCCCTGCCAATCGAAGTGATGGTCGACGCCGTGCACAAGCTGAAGTACGAGAACTACACC
AGCAGCTTCTTCATCCGGGATATCATCAAGCCCGATCCCCCGAAGAACCTGCAGCTGAAGCCCCTCAAGAACAGCCGGCAGGTG
GAGGTGAGTTGGGAGTACCCCGACACCTGGTCAACGCCCCACAGCTACTTCTCCCTGACCTTCTGTGTGCAGGTGCAGGGAAAG
AGCAAGAGGGAGAAGAAAGACCGGGTCTTCACCGACAAGACCAGCGCCACGGTGATCTGCAGGAAGAACGCAAGCATCTCCGTG
AGGGCCCAGGACAGGTACTACAGCTCCAGCTGGTCCGAATGGGCCAGCGTGCCCTGTAGCGGCGGCGGGGGCGGTGGCAGCCGC
AACCTCCCAGTGGCCACCCCCGACCCCGGCATGTTCCCCTGCCTGCACCACAGCCAGAATCTGCTGAGGGCCGTGAGTAACATG
CTGCAGAAGGCAAGGCAAACCCTCGAATTCTATCCCTGCACCTCCGAGGAGATCGACCACGAGGATATCACCAAGGACAAGACC
AGCACCGTCGAGGCCTGTCTCCCCCTGGAGCTGACCAAGAATGAGAGCTGCCTGAACAGCCGGGAGACCAGCTTCATCACCAAC
GGGAGCTGCCTGGCCTCCAGGAAGACCTCGTTCATGATGGCGCTGTGCCTCTCAAGCATATACGAGGATCTGAAGATGTACCAG
GTGGAGTTTAAGACGATGAACGCCAAGCTGCTGATGGACCCGAAGAGGCAGATCTTCCTGGACCAGAACATGCTGGCCGTGATA
GACGAGCTCATGCAGGCCCTGAACTTCAACTCCGAGACCGTGCCGCAGAAGTCATCCCTCGAGGAGCCCGACTTCTATAAGACC
AAGATCAAGCTGTGCATCCTGCTCCACGCCTTCCGGATAAGGGCCGTGACGATCGACAGGGTGATGAGCTACCTTAACGCCAGC
>hIL12AB_026 (SEQ ID NO: 1066)
ATGTGCCACCAGCAGCTCGTGATCAGCTGGTTCTCCCTGGTGTTTCTCGCCAGCCCCCTGGTGGCCATCTGGGAGCTGAAGAAG
GACGTGTACGTGGTGGAGCTGGACTGGTACCCTGACGCCCCGGGGGAGATGGTCGTGCTGACCTGCGACACCCCCGAAGAGGAC
GGTATCACCTGGACCCTGGACCAGTCCAGCGAGGTGCTGGGCAGCGGCAAGACCCTGACTATTCAAGTCAAGGAGTTCGGAGAC
GCCGGCCAGTACACCTGCCACAAGGGTGGAGAGGTGTTATCACACAGCCTGCTGCTGCTGCACAAGAAGGAAGACGGGATCTGG
AGCACCGACATCCTGAAGGACCAGAAGGAGCCCAAAAACAAGACCTTCCTGCGGTGCGAGGCCAAGAACTATTCGGGCCGCTTT
ACGTGCTGGTGGCTGACCACCATCAGCACTGATCTCACCTTCAGCGTGAAGTCCTCCCGGGGGTCGTCCGACCCCCAGGGGGTG
ACCTGCGGGGCCGCCACCCTGTCCGCCGAGAGAGTGAGGGGCGATAATAAGGAGTACGAGTACAGCGTTGAGTGCCAGGAAGAT
AGCGCCTGTCCCGCCGCCGAGGAGAGCCTGCCCATCGAGGTGATGGTGGACGCCGTCCACAAGCTGAAGTATGAGAACTACACC
TCAAGCTTCTTCATCAGGGACATCATCAAACCCGATCCGCCCAAGAATCTGCAGCTGAAGCCCCTGAAAAATAGCAGGCAGGTG
GAGGTGAGCTGGGAGTACCCCGACACCTGGTCCACCCCCCATAGCTATTTCTCCCTGACGTTCTGCGTGCAGGTGCAAGGGAAG
AGCAAGCGGGAGAAGAAGGACCGGGTGTTCACCGACAAGACCTCCGCCACCGTGATCTGTAGGAAGAACGCGTCGATCTCGGTC
AGGGCCCAGGACAGGTATTACAGCAGCAGCTGGAGCGAGTGGGCGAGCGTGCCCTGCTCGGGCGGCGGCGGCGGCGGGAGCAGA
AATCTGCCCGTGGCCACCCCAGACCCCGGAATGTTCCCCTGCCTGCACCATTCGCAGAACCTCCTGAGGGCCGTGAGCAACATG
CTGCAGAAGGCCCGCCAGACGCTGGAGTTCTACCCCTGCACGAGCGAGGAGATCGACCACGAAGACATCACCAAGGACAAAACC
AGCACCGTGGAGGCCTGCCTGCCCCTGGAGCTGACCAAAAACGAATCCTGCCTCAACAGCCGGGAGACCAGCTTCATCACCAAC
GGCAGCTGCCTGGCCAGCCGAAAGACCTCCTTCATGATGGCCCTCTGCCTGAGCAGCATCTATGAGGATCTGAAGATGTATCAG
GTGGAGTTCAAGACCATGAATGCCAAGCTGCTGATGGACCCCAAGAGGCAGATATTCCTGGACCAGAATATGCTGGCCGTGATC
GACGAGCTGATGCAGGCCCTGAACTTCAACAGCGAGACCGTCCCCCAGAAGTCCAGCCTGGAGGAGCCGGACTTTTACAAAACG
AAGATCAAGCTGTGCATACTGCTGCACGCCTTCAGGATCCGGGCCGTGACAATCGACAGGGTGATGTCCTACCTGAACGCCAGC
>hIL12AB_027 (SEQ ID NO: 1067)
ATGTGTCACCAGCAGCTGGTGATCAGCTGGTTCTCCCTGGTGTTCCTGGCCAGCCCCCTGGTGGCCATCTGGGAGCTCAAGAAG
GACGTCTACGTCGTGGAGCTGGATTGGTACCCCGACGCTCCCGGGGAGATGGTGGTGCTGACCTGCGACACCCCCGAGGAGGAC
GGCATCACCTGGACGCTGGACCAGAGCTCAGAGGTGCTGGGAAGCGGAAAGACACTGACCATCCAGGTGAAGGAGTTCGGGGAT
GCCGGGCAGTATACCTGCCACAAGGGCGGCGAAGTGCTGAGCCATTCCCTGCTGCTGCTGCACAAGAAGGAGGACGGCATATGG
TCCACCGACATCCTGAAGGATCAGAAGGAGCCGAAGAATAAAACCTTCCTGAGGTGCGAGGCCAAGAATTACAGCGGCCGATTC
ACCTGCTGGTGGCTGACCACCATCAGCACCGACCTGACCTTCAGTGTGAAGTCCTCACGGGGCAGCTCAGATCCCCAGGGCGTG
ACCTGCGGGGCCGCGACACTCAGCGCCGAGCGGGTGAGGGGTGATAACAAGGAGTACGAGTATTCTGTGGAGTGCCAGGAAGAC
TCCGCCTGTCCCGCCGCCGAGGAGTCCCTGCCCATCGAGGTGATGGTGGACGCCGTGCATAAACTGAAGTACGAGAACTACACC
TCCAGCTTCTTCATCCGGGATATAATCAAGCCCGACCCTCCGAAAAACCTGCAGCTGAAGCCCCTTAAAAACAGCCGGCAGGTG
GAGGTGAGCTGGGAGTACCCCGACACCTGGAGCACCCCCCATAGCTATTTCAGCCTGACCTTCTGCGTGCAGGTGCAGGGGAAG
TCCAAGCGCGAGAAAAAGGACCGGGTGTTCACCGACAAGACGAGCGCCACCGTGATCTGCCGGAAGAACGCCAGTATAAGCGTA
AGGGCCCAGGATAGGTACTACAGCTCCAGCTGGTCGGAGTGGGCCTCCGTGCCCTGTTCCGGCGGCGGGGGGGGTGGCAGCAGG
AACCTCCCCGTGGCCACGCCGGACCCCGGCATGTTCCCGTGCCTGCACCACTCCCAAAACCTCCTGCGGGCCGTCAGCAACATG
CTGCAAAAGGCGCGGCAGACCCTGGAGTTTTACCCCTGTACCTCCGAAGAGATCGACCACGAGGATATCACCAAGGATAAGACC
TCCACCGTGGAGGCCTGTCTCCCCCTGGAGCTGACCAAGAACGAGAGCTGTCTTAACAGCAGAGAGACCTCGTTCATAACGAAC
GGCTCCTGCCTCGCTTCCAGGAAGACGTCGTTCATGATGGCGCTGTGCCTGTCCAGCATCTACGAGGACCTGAAGATGTATCAG
GTCGAGTTCAAAACCATGAACGCCAAGCTGCTGATGGACCCCAAGAGGCAGATCTTCCTGGACCAGAACATGCTCGCCGTGATC
GACGAGCTGATGCAGGCCCTGAACTTCAACAGCGAAACCGTGCCCCAGAAGTCAAGCCTGGAGGAGCCGGACTTCTATAAGACC
AAGATCAAGCTGTGTATCCTGCTACACGCTTTTCGTATCCGGGCCGTGACCATCGACAGGGTTATGTCGTACTTGAACGCCAGC
>hIL12AB_028 (SEQ ID NO: 1068)
ATGTGCCACCAACAGCTCGTGATCAGCTGGTTCAGCCTGGTGTTCCTGGCCAGCCCGCTGGTGGCCATCTGGGAGCTGAAGAAG
GACGTGTACGTGGTGGAGCTGGACTGGTACCCCGACGCCCCCGGCGAGATGGTGGTCCTGACCTGCGACACGCCGGAAGAGGAC
GGCATCACCTGGACCCTGGATCAGTCCAGCGAGGTGCTGGGCTCCGGCAAGACCCTGACCATTCAGGTGAAGGAGTTCGGCGAC
GCCGGTCAGTACACCTGCCACAAGGGCGGCGAGGTGCTGAGCCACAGCCTACTGCTCCTGCACAAAAAGGAGGATGGAATCTGG
TCCACCGACATCCTCAAGGACCAGAAGGAGCCGAAGAACAAGACGTTCCTCCGGTGCGAGGCCAAGAACTACAGCGGCAGGTTT
ACCTGCTGGTGGCTGACCACCATCAGCACCGACCTGACATTTTCCGTGAAGAGCAGCCGCGGCAGCAGCGATCCCCAGGGCGTG
ACCTGCGGGGCGGCCACCCTGTCCGCCGAGCGTGTGAGGGGCGACAACAAGGAGTACGAGTACAGCGTGGAATGCCAGGAGGAC
AGCGCCTGTCCCGCCGCCGAGGAGAGCCTGCCAATCGAGGTCATGGTGGACGCCGTGCACAAGCTGAAGTACGAGAACTACACG
AGCAGCTTCTTCATCAGGGACATCATCAAACCGGACCCGCCCAAGAACCTGCAGCTGAAACCCTTGPAAAACAGCAGGCAGGTG
GAAGTGTCTTGGGAGTACCCCGACACCTGGTCCACCCCCCACAGCTACTTTAGCCTGACCTTCTGTGTGCAGGTCCAGGGCAAG
TCCAAGAGGGAGAAGAAGGACAGGGTGTTCACCGACAAAACCAGCGCCACCGTGATCTGCAGGAAGAACGCCTCCATCAGCGTG
CGGGCCCAGGACAGGTATTACAGCTCGTCGTGGAGCGAGTGGGCCAGCGTGCCCTGCTCCGGGGGAGGCGGCGGCGGAAGCCGG
AATCTGCCCGTGGCCACCCCCGATCCCGGCATGTTCCCGTGTCTGCACCACAGCCAGAACCTGCTGCGGGCCGTGAGCAACATG
CTGCAGAAGGCCCGCCAAACCCTGGAGTTCTACCCCTGTACAAGCGAGGAGATCGACCATGAGGACATTACCAAGGACAAGACC
AGCACCGTGGAGGCCTGCCTGCCCCTCGAGCTCACAAAGAACGAATCCTGCCTGAATAGCCGCGAGACCAGCTTTATCACGAAC
GGGTCCTGCCTCGCCAGCCGGAAGACAAGCTTCATGATGGCCCTGTGCCTGAGCAGCATCTACGAGGACCTGAAAATGTACCAA
GTGGAGTTCAAAACGATGAACGCCAAGCTGCTGATGGACCCCAAGCGCCAGATCTTCCTGGACCAGAACATGCTGGCCGTCATC
GACGAGCTCATGCAGGCCCTGAACTTCAACAGCGAGACCGTGCCCCAGAAGAGCAGCCTGGAGGAGCCCGACTTCTACAAGACG
AAGATCAAGCTCTGCATCCTGCTGCACGCTTTCCGCATCCGCGCGGTGACCATCGACCGGGTGATGAGCTACCTCAACGCCAGT
>hIL12AB_029 (SEQ ID NO: 1069)
ATGTGCCACCAACAGCTGGTGATCAGCTGGTTCAGCCTGGTGTTTCTGGCCTCCCCTCTGGTGGCCATCTGGGAGCTGAAGAAG
GACGTGTACGTGGTGGAGCTGGACTGGTACCCTGACGCCCCCGGCGAAATGGTGGTGCTGACGTGCGACACCCCCGAGGAGGAT
GGCATCACCTGGACCCTGGACCAAAGCAGCGAGGTCCTCGGAAGCGGCAAGACCCTCACTATCCAAGTGAAGGAGTTCGGGGAT
GCGGGCCAGTACACCTGCCACAAGGGCGGCGAGGTGCTGTCTCATAGCCTGCTGCTCCTGCATAAGAAGGAAGACGGCATCTGG
AGCACCGACATACTGAAGGATCAGAAGGAGCCCAAGAACAAGACCTTCCTGAGGTGCGAGGCCAAGAACTACTCCGGGCGCTTC
ACCTGTTGGTGGCTGACCACCATCTCCACCGACCTGACCTTCAGCGTGAAGAGCAGCAGGGGGAGCAGCGACCCCCAGGGGGTG
ACCTGCGGAGCCGCGACCTTGTCGGCCGAGCGGGTGAGGGGCGACAATAAGGAGTACGAGTACTCGGTCGAATGCCAGGAGGAC
TCCGCCTGCCCCGCCGCCGAGGAGTCCCTCCCCATCGAAGTGATGGTGGACGCCGTCCACAAGCTGAAGTACGAGAACTACACC
AGCAGCTTCTTCATACGGGATATCATCAAGCCCGACCCCCCGAAGAACCTGCAGCTGAAACCCTTGAAGAACTCCAGGCAGGTG
GAGGTGAGCTGGGAGTACCCCGACACCTGGTCCACCCCGCACTCATACTTCAGCCTGACCTTCTGTGTACAGGTCCAGGGCAAG
AGCAAGAGGGAAAAGAAGGATAGGGTGTTCACCGACAAGACCTCCGCCACGGTGATCTGTCGGAAAAACGCCAGCATCTCCGTG
CGGGCCCAGGACAGGTACTATTCCAGCAGCTGGAGCGAGTGGGCCTCCGTCCCCTGCTCCGGCGGCGGTGGCGGGGGCAGCAGG
AACCTCCCCGTGGCCACCCCCGATCCCGGGATGTTCCCATGCCTGCACCACAGCCAAAACCTGCTGAGGGCCGTCTCCAATATG
CTGCAGAAGGCGAGGCAGACCCTGGAGTTCTACCCCTGTACCTCCGAGGAGATCGACCACGAGGATATCACCAAGGACAAGACC
TCCACGGTCGAGGCGTGCCTGCCCCTGGAGCTCACGAAGAACGAGAGCTGCCTTAACTCCAGGGAAACCTCGTTTATCACGAAC
GGCAGCTGCCTGGCGTCACGGAAGACCTCCTTTATGATGGCCCTATGTCTGTCCTCGATCTACGAGGACCTGAAGATGTACCAG
GTGGAGTTCAAGACCATGAACGCCAAGCTGCTGATGGATCCCAAGAGGCAGATTTTCCTGGACCAGAACATGCTGGCCGTGATT
GACGAGCTGATGCAGGCGCTGAACTTCAACAGCGAGACAGTGCCGCAGAAGAGCTCCCTGGAGGAGCCGGACTTTTACAAGACC
AAGATAAAGCTGTGCATCCTGCTCCACGCCTTCAGAATACGGGCCGTCACCATCGATAGGGTGATGTCTTACCTGAACGCCTCC
>hIL12AB_030 (SEQ ID NO: 1070)
ATGTGCCACCAGCAGCTGGTGATTAGCTGGTTTAGCCTGGTGTTCCTGGCAAGCCCCCTGGTGGCCATCTGGGAACTGAAAAAG
GACGTGTACGTGGTCGAGCTGGATTGGTACCCCGACGCCCCCGGCGAAATGGTGGTGCTGACGTGTGATACCCCCGAGGAGGAC
GGGATCACCTGGACCCTGGATCAGAGCAGCGAGGTGCTGGGGAGCGGGAAGACCCTGACGATCCAGGTCAAGGAGTTCGGCGAC
GCTGGGCAGTACACCTGTCACAAGGGCGGGGAGGTGCTGTCCCACTCCCTGCTGCTCCTGCATAAGAAAGAGGACGGCATCTGG
TCCACCGACATCCTCAAGGACCAGAAGGAGCCCAAGAACAAGACCTTCCTGCGGTGTGAGGCGAAGAACTACAGCGGCCGTTTC
ACCTGCTGGTGGCTGACGACAATCAGCACCGACTTGACGTTCTCCGTGAAGTCCTCCAGAGGCAGCTCCGACCCCCAAGGGGTG
ACGTGCGGCGCGGCCACCCTGAGCGCCGAGCGGGTGCGGGGGGACAACAAGGAGTACGAGTACTCCGTGGAGTGCCAGGAGGAC
AGCGCCTGTCCCGCAGCCGAGGAGTCCCTGCCCATCGAAGTCATGGTGGACGCCGTCCACAAGCTGAAGTACGAGAACTACACC
AGCAGCTTCTTCATCCGCGATATCATCAAGCCCGATCCCCCCAAAAACCTGCAACTGAAGCCGCTGAAGAATAGCAGGCAGGTG
GAGGTGTCCTGGGAGTACCCGGACACCTGGAGCACGCCCCACAGCTATTTCAGCCTGACCTTTTGCGTGCAGGTCCAGGGGAAG
AGCAAGCGGGAGAAGAAGGACCGCGTGTTTACGGACAAAACCAGCGCCACCGTGATCTGCAGGAAGAACGCCAGCATCAGCGTG
AGGGCCCAGGACAGGTACTACAGCAGCTCCTGGAGCGAGTGGGCCTCCGTGCCCTGTTCCGGAGGCGGCGGGGGCGGTTCCCGG
AACCTCCCGGTGGCCACCCCCGACCCGGGCATGTTCCCGTGCCTGCACCACTCACAGAATCTGCTGAGGGCCGTGAGCAATATG
CTGCAGAAGGCAAGGCAGACCCTGGAGTTTTATCCCTGCACCAGCGAGGAGATCGACCACGAAGACATCACCAAGGACAAGACC
AGCACAGTGGAGGCCTGCCTGCCCCTGGAACTGACCAAGAACGAGTCCTGTCTGAACTCCCGGGAAACCAGCTTCATAACCAAC
GGCTCCTGTCTCGCCAGCAGGAAGACCAGCTTCATGATGGCCCTGTGCCTCAGCTCCATCTACGAGGACCTCAAGATGTACCAG
GTTGAGTTCAAGACCATGAACGCCAAGCTCCTGATGGACCCCAAGAGGCAGATCTTCCTGGACCAGAATATGCTGGCCGTGATC
GATGAGTTAATGCAGGCGCTGAACTTCAACAGCGAGACGGTGCCCCAAAAGTCCTCGCTGGAGGAGCCCGACTTCTACAAGACC
AAGATCAAGCTGTGCATCCTCCTGCACGCCTTCCGAATCCGGGCCGTAACCATCGACAGGGTGATGAGCTATCTCAACGCCTCC
>hIL12AB_031 (SEQ ID NO: 1071)
ATGTGCCACCAGCAGCTCGTGATCAGCTGGTTCTCGCTTGTGTTCCTGGCCTCCCCCCTCGTCGCCATCTGGGAGCTGAAGAAA
GACGTGTACGTGGTGGAGCTGGACTGGTATCCCGACGCCCCGGGGGAGATGGTGGTGCTGACCTGCGACACCCCGGAAGAGGAC
GGCATCACCTGGACGCTCGACCAGTCGTCCGAAGTGCTGGGGTCGGGCAAGACCCTCACCATCCAGGTGAAGGAGTTCGGAGAC
GCCGGCCAGTACACCTGTCATAAGGGGGGGGAGGTGCTGAGCCACAGCCTCCTGCTCCTGCACAAAAAGGAGGACGGCATCTGG
AGCACCGATATCCTCAAGGACCAGAAGGAGCCCAAGAACAAGACGTTCCTGAGGTGTGAGGCCAAGAACTACAGCGGGCGGTTC
ACGTGTTGGTGGCTCACCACCATCTCCACCGACCTCACCTTCTCCGTGAAGTCAAGCAGGGGCAGCTCCGACCCCCAAGGCGTC
ACCTGCGGCGCCGCCACCCTGAGCGCCGAGAGGGTCAGGGGGGATAACAAGGAATACGAGTACAGTGTGGAGTGCCAAGAGGAT
AGCGCCTGTCCCGCCGCCGAAGAGAGCCTGCCCATCGAAGTGATGGTGGACGCCGTGCACAAGCTGAAGTACGAGAACTACACC
TCCAGCTTCTTCATCAGGGATATCATCAAGCCCGATCCCCCCAAGAACCTGCAGCTGAAGCCCCTGAAGAACAGCAGGCAGGTG
GAGGTGAGCTGGGAGTATCCCGACACGTGGAGCACCCCGCACAGCTACTTCTCGCTGACCTTCTGCGTGCAGGTGCAAGGGAAG
TCCAAGAGGGAGAAGAAGGATAGGGTGTTCACCGACAAAACGAGCGCCACCGTGATCTGCCGGAAGAATGCCAGCATCTCTGTG
AGGGCCCAGGACAGGTACTATTCCAGCTCCTGGTCGGAGTGGGCCAGCGTGCCCTGTAGCGGCGGGGGCGGGGGCGGCAGCAGG
AACCTCCCGGTTGCCACCCCCGACCCCGGCATGTTTCCGTGCCTGCACCACTCGCAAAACCTGCTGCGCGCGGTCTCCAACATG
CTGCAAAAAGCGCGCCAGACGCTGGAGTTCTACCCCTGCACCAGCGAGGAGATCGATCATGAAGATATCACCAAAGACAAGACC
TCGACCGTGGAGGCCTGCCTGCCCCTGGAGCTCACCAAGAACGAAAGCTGCCTGAACAGCAGGGAGACAAGCTTCATCACCAAC
GGCAGCTGCCTGGCCTCCCGGAAGACCAGCTTCATGATGGCCCTGTGCCTGTCCAGCATCTACGAGGATCTGAAGATGTACCAA
GTGGAGTTTAAGACCATGAACGCCAAGCTGTTAATGGACCCCAAAAGGCAGATCTTCCTGGATCAGAACATGCTGGCCGTCATC
GACGAGCTGATGCAAGCCCTGAACTTCAACAGCGAGACGGTGCCCCAGAAGAGCAGCCTCGAGGAGCCCGACTTCTATAAGACC
AAGATAAAGCTGTGCATTCTGCTGCACGCCTTCAGAATCAGGGCCGTGACCATCGATAGGGTGATGAGCTACCTGAACGCCAGC
>hIL12AB_032 (SEQ ID NO: 1072)
ATGTGTCACCAGCAGCTGGTGATTTCCTGGTTCAGTCTGGTGTTTCTTGCCAGCCCCCTGGTGGCCATCTGGGAGCTGAAGAAA
GACGTATACGTCGTGGAGCTGGACTGGTATCCCGACGCTCCCGGCGAGATGGTGGTCCTCACCTGCGACACCCCAGAGGAGGAC
GGCATCACCTGGACCCTGGACCAGAGCTCCGAGGTCCTGGGCAGCGGTAAGACCCTCACCATCCAGGTGAAGGAGTTTGGTGAT
GCCGGGCAGTATACCTGCCACAAGGGCGGCGAGGTGCTGTCCCACAGCCTCCTGTTACTGCATAAGAAGGAGGATGGCATCTGG
AGCACCGACATCCTCAAGGACCAGAAAGAGCCCAAGAACAAGACCTTTCTGCGGTGCGAGGCGAAAAATTACTCCGGCCGGTTC
ACCTGCTGGTGGCTGACCACCATCAGCACGGACCTGACGTTCTCCGTGAAGTCGAGCAGGGGGAGCTCCGATCCCCAGGGCGTG
ACCTGCGGCGCGGCCACCCTGAGCGCCGAGCGCGTCCGCGGGGACAATAAGGAATACGAATATAGCGTGGAGTGCCAGGAGGAC
AGCGCCTGCCCCGCGGCCGAGGAGAGCCTCCCGATCGAGGTGATGGTGGATGCCGTCCACAAGCTCAAATACGAAAACTACACC
AGCAGCTTCTTCATTAGGGACATCATCAAGCCCGACCCCCCCAAAAACCTGCAGCTGAAGCCCCTGAAGAACAGCCGCCAGGTC
GAGGTGTCATGGGAGTACCCAGACACCTGGAGCACCCCCCACTCCTACTTCAGCCTGACCTTCTGCGTCCAGGTGCAGGGAAAG
TCCAAACGGGAGAAGAAGGATAGGGTCTTTACCGATAAGACGTCGGCCACCGTCATCTGCAGGAAGAACGCCAGCATAAGCGTG
CGGGCGCAGGATCGGTACTACAGCTCGAGCTGGTCCGAATGGGCCTCCGTGCCCTGTAGCGGAGGGGGTGGCGGGGGCAGCAGG
AACCTGCCCGTGGCCACCCCGGACCCGGGCATGTTTCCCTGCCTGCATCACAGTCAGAACCTGCTGAGGGCCGTGAGCAACATG
CTCCAGAAGGCCCGCCAGACCCTGGAGTTTTACCCCTGCACCAGCGAAGAGATCGATCACGAAGACATCACCAAAGACAAGACC
TCCACCGTGGAGGCCTGTCTGCCCCTGGAGCTGACCAAGAACGAGAGCTGTCTGAACAGCAGGGAGACCTCCTTCATCACCAAC
GGCTCCTGCCTGGCATCCCGGAAGACCAGCTTCATGATGGCCCTGTGTCTGAGCTCTATCTACGAGGACCTGAAGATGTACCAG
GTCGAGTTCAAGACCATGAACGCCAAGCTGCTGATGGACCCCAAGCGACAGATATTCCTGGACCAGAACATGCTCGCCGTGATC
GATGAACTGATGCAAGCCCTGAACTTCAATAGCGAGACCGTGCCCCAGAAAAGCAGCCTGGAGGAGCCCGACTTCTACAAGACC
AAGATCAAACTGTGCATACTGCTGCACGCGTTCAGGATCCGGGCCGTCACCATCGACCGGGTGATGTCCTATCTGAATGCCAGC
>hIL12AB_033 (SEQ ID NO: 1073)
ATGTGCCACCAGCAGCTCGTGATTAGCTGGTTTTCGCTGGTGTTCCTGGCCAGCCCTCTCGTGGCCATCTGGGAGCTGAAAAAA
GACGTGTACGTGGTGGAGCTGGACTGGTACCCGGACGCCCCCGGCGAGATGGTGGTGCTGACGTGCGACACCCCGGAAGAGGAC
GGCATCACCTGGACCCTGGACCAGTCATCCGAGGTCCTGGGCAGCGGCAAGACGCTCACCATCCAGGTGAAGGAGTTCGGCGAC
GCCGGCCAGTACACATGCCATAAGGGCGGGGAGGTGCTGAGCCACAGCCTGCTCCTCCTGCACAAGAAGGAGGATGGCATCTGG
TCTACAGACATCCTGAAGGACCAGAAAGAGCCCAAGAACAAGACCTTCCTCCGGTGCGAGGCCAAGAACTACTCCGGGCGGTTT
ACTTGTTGGTGGCTGACCACCATCAGCACCGACCTCACCTTCAGCGTGAAGAGCTCCCGAGGGAGCTCCGACCCCCAGGGGGTC
ACCTGCGGCGCCGCCACCCTGAGCGCCGAGCGGGTGAGGGGCGACAACAAGGAGTATGAATACAGCGTGGAATGCCAAGAGGAC
AGCGCCTGTCCCGCGGCCGAGGAAAGCCTGCCCATCGAGGTGATGGTGGACGCCGTCCACAAACTCAAGTACGAGAACTACACC
AGCAGTTTCTTCATTCGCGACATCATCAAGCCGGACCCCCCCAAAAACCTGCAGCTCAAACCCCTGAAGAACAGCAGGCAGGTG
GAGGTCAGCTGGGAGTACCCGGACACCTGGAGCACCCCCCATAGCTACTTCAGCCTGACCTTCTGCGTGCAGGTGCAGGGCAAG
AGCAAACGCGAGAAGAAGGACCGGGTGTTTACCGACAAGACCAGCGCCACGGTGATCTGCCGAAAGAATGCAAGCATCTCCGTG
AGGGCGCAGGACCGCTACTACTCTAGCAGCTGGAGCGAGTGGGCCAGCGTGCCCTGCAGCGGTGGCGGCGGAGGCGGCAGCCGT
AACCTCCCCGTGGCCACCCCCGACCCCGGCATGTTCCCGTGTCTGCACCACTCCCAGAACCTGCTGAGGGCCGTCAGCAATATG
CTGCAGAAGGCCCGGCAGACGCTGGAGTTCTACCCCTGCACCTCCGAGGAGATCGACCATGAGGACATTACCAAGGACAAGACG
AGCACTGTGGAGGCCTGCCTGCCCCTGGAGCTCACCAAAAACGAGAGCTGCCTGAATAGCAGGGAGACGTCCTTCATCACCAAC
GGCAGCTGTCTGGCCAGCAGGAAGACCAGCTTCATGATGGCCCTGTGCCTCTCCTCCATATATGAGGATCTGAAGATGTACCAG
GTGGAGTTCAAGACCATGAACGCCAAGCTGCTGATGGATCCCAAGAGGCAGATCTTCCTGGACCAGAATATGCTGGCCGTGATT
GACGAGCTGATGCAGGCCCTGAACTTTAATAGCGAGACCGTCCCCCAGAAGAGCAGCCTGGAGGAGCCCGACTTCTATAAGACC
AAGATCAAGCTGTGCATACTGCTGCACGCGTTTAGGATAAGGGCCGTCACCATCGACAGGGTGATGAGCTACCTGAATGCCAGC
>hIL12AB_034 (SEQ ID NO: 1074)
ATGTGCCACCAACAGCTGGTGATCTCCTGGTTCAGCCTGGTGTTCCTCGCCAGCCCCCTGGTGGCCATCTGGGAGCTGAAGAAA
GACGTGTACGTGGTGGAGCTGGACTGGTATCCCGACGCCCCCGGCGAGATGGTCGTGCTGACCTGCGACACCCCGGAGGAGGAC
GGCATCACCTGGACCCTGGATCAGTCCTCCGAGGTGCTGGGCAGCGGGAAGACCCTGACCATCCAGGTGAAAGAGTTCGGAGAT
GCCGGCCAGTATACCTGTCACAAGGGGGGTGAGGTGCTGAGCCATAGCCTCTTGCTTCTGCACAAGAAGGAGGACGGCATCTGG
TCCACCGACATCCTCAAGGACCAAAAGGAGCCGAAGAATAAAACGTTCCTGAGGTGCGAAGCCAAGAACTATTCCGGACGGTTC
ACCTGCTGGTGGCTGACCACCATCAGCACCGACCTCACCTTCTCCGTAAAGTCAAGCAGGGGCAGCTCCGACCCCCAGGGCGTG
ACCTGCGGAGCCGCCACCCTGAGCGCAGAGAGGGTGAGGGGCGACAACAAGGAGTACGAATACTCCGTCGAGTGCCAGGAGGAC
AGCGCCTGCCCCGCCGCCGAGGAAAGTCTGCCCATCGAGGTGATGGTGGACGCCGTGCACAAGCTCAAATACGAGAACTACACC
AGCAGCTTCTTCATCCGGGATATCATCAAGCCCGACCCTCCAAAGAATCTGCAGCTGAAACCCCTTAAGAACAGCAGGCAGGTG
GAGGTCAGCTGGGAGTACCCCGACACCTGGAGCACGCCCCACTCCTACTTTAGCCTGACCTTTTGCGTGCAGGTGCAGGGGAAA
AGCAAGCGGGAGAAGAAGGACAGGGTGTTCACCGATAAGACCTCCGCTACCGTGATCTGCAGGAAGAACGCCTCAATCAGCGTG
AGGGCCCAGGATCGGTACTACTCCAGCTCCTGGAGCGAGTGGGCCAGCGTGCCCTGCTCTGGCGGTGGCGGCGGGGGCAGCCGG
AACCTGCCGGTGGCCACTCCCGACCCGGGCATGTTCCCGTGCCTCCACCATTCCCAGAACCTGCTGCGGGCCGTGTCCAATATG
CTCCAGAAGGCAAGGCAGACCCTGGAGTTCTACCCCTGCACCAGCGAGGAGATCGATCACGAGGACATCACCAAAGACAAAACC
AGCACGGTCGAGGCCTGCCTGCCCCTGGAACTCACCAAGAACGAAAGCTGTCTCAACAGCCGCGAGACCAGCTTCATAACCAAC
GGTTCCTGTCTGGCCTCCCGCAAGACCAGCTTTATGATGGCCCTCTGTCTGAGCTCCATCTATGAAGACCTGAAAATGTACCAG
GTGGAGTTCAAAACCATGAACGCCAAGCTTCTGATGGACCCCAAGAGGCAGATCTTCCTGGATCAGAACATGCTGGCCGTGATC
GACGAGCTGATGCAGGCCCTGAACTTTAACTCCGAGACCGTGCCCCAGAAAAGCAGCCTGGAAGAGCCCGATTTCTACAAAACG
AAGATCAAGCTGTGCATCCTGCTGCACGCCTTCCGGATCCGTGCGGTGACCATCGATAGGGTGATGAGCTACCTGAACGCCAGC
>hIL12AB_035 (SEQ ID NO: 1075)
ATGTGCCACCAACAGCTGGTAATCAGCTGGTTCAGCCTGGTTTTCCTCGCGTCGCCCCTGGTGGCCATCTGGGAGTTAAAGAAG
GACGTGTACGTGGTGGAGCTGGATTGGTACCCCGACGCCCCGGGCGAGATGGTCGTGCTCACCTGCGATACCCCCGAGGAGGAC
GGGATCACCTGGACCCTGGACCAATCCAGCGAGGTGCTGGGCAGCGGCAAGACCCTGACCATACAGGTGAAGGAATTTGGGGAC
GCCGGGCAGTACACCTGCCACAAGGGCGGGGAAGTGCTGTCCCACTCCCTCCTGCTGCTGCATAAGAAGGAGGACGGCATCTGG
AGCACCGACATCCTGAAGGACCAAAAGGAGCCCAAGAACAAGACCTTCCTGAGGTGCGAGGCCAAAAACTATTCCGGCCGCTTT
ACCTGTTGGTGGCTGACCACCATCTCCACCGATCTGACCTTCAGCGTGAAGTCGTCTAGGGGCTCCTCCGACCCCCAGGGCGTA
ACCTGCGGCGCCGCGACCCTGAGCGCCGAGAGGGTGCGGGGCGATAACAAAGAGTACGAGTACTCGGTGGAGTGCCAGGAGGAC
AGCGCCTGTCCGGCGGCCGAGGAGAGCCTGCCCATCGAGGTGATGGTGGACGCCGTCCACAAGCTGAAGTACGAGAACTACACC
AGTTCGTTCTTCATCAGGGACATCATCAAGCCGGACCCCCCCAAGAACCTCCAGCTGAAGCCCCTGAAGAACAGCAGGCAGGTG
GAAGTGTCCTGGGAGTATCCCGACACCTGGAGCACCCCCCACAGCTACTTCAGCCTGACCTTTTGCGTGCAGGTGCAGGGCAAA
AGCAAGAGGGAAAAGAAGGACCGGGTGTTCACCGATAAGACGAGCGCCACCGTTATCTGCAGGAAGAACGCCTCCATAAGCGTG
AGGGCGCAGGACCGTTACTACAGCAGCAGCTGGAGTGAGTGGGCAAGCGTGCCCTGTAGCGGCGGGGGCGGGGGCGGGTCCCGC
AACCTCCCCGTCGCCACCCCCGACCCAGGCATGTTTCCGTGCCTGCACCACAGCCAGAACCTGCTGCGGGCCGTTAGCAACATG
CTGCAGAAGGCCAGGCAGACCCTCGAGTTCTATCCCTGCACATCTGAGGAGATCGACCACGAAGACATCACTAAGGATAAGACC
TCCACCGTGGAGGCCTGTCTGCCCCTCGAGCTGACCAAGAATGAATCCTGCCTGAACAGCCGAGAGACCAGCTTTATCACCAAC
GGCTCCTGCCTGGCCAGCAGGAAGACCTCCTTCATGATGGCCCTGTGCCTCTCCAGCATCTACGAGGATCTGAAGATGTACCAG
GTAGAGTTCAAGACGATGAACGCCAAGCTCCTGATGGACCCCAAGAGGCAGATATTCCTGGACCAGAACATGCTGGCGGTGATC
GACGAGCTGATGCAGGCCCTGAATTTCAACAGCGAGACGGTGCCACAGAAGTCCAGCCTGGAGGAGCCAGACTTCTACAAGACC
AAGATCAAACTGTGCATCCTCCTGCACGCGTTCAGGATCCGCGCCGTCACCATAGACAGGGTGATGAGTTATCTGAACGCCAGC
>hIL12AB_036 (SEQ ID NO: 1076)
ATGTGCCATCAGCAGCTGGTAATCAGCTGGTTTAGCCTGGTGTTCCTGGCCAGCCCACTGGTGGCCATCTGGGAGCTGAAGAAG
GACGTGTACGTGGTGGAACTGGACTGGTACCCCGACGCCCCTGGCGAGATGGTGGTACTGACCTGTGACACCCCGGAGGAAGAC
GGTATCACCTGGACCCTGGATCAGAGCTCCGAGGTGCTGGGCTCCGGCAAGACACTGACCATCCAAGTTAAGGAATTTGGGGAC
GCCGGCCAGTACACCTGCCACAAGGGGGGCGAGGTGCTGTCCCACTCCCTGCTGCTTCTGCATAAGAAGGAGGATGGCATCTGG
TCCACCGACATACTGAAGGACCAGAAGGAGCCCAAGAATAAGACCTTCCTGAGATGCGAGGCCAAGAACTACTCGGGAAGGTTC
ACCTGCTGGTGGCTGACCACCATCAGCACCGACCTGACCTTCTCCGTGAAGAGCTCCCGGGGCAGCTCCGACCCCCAGGGCGTA
ACCTGTGGGGCCGCTACCCTGTCCGCCGAGAGGGTCCGGGGCGACAACAAGGAATACGAGTACAGCGTGGAGTGCCAGGAGGAC
TCCGCCTGCCCCGCCGCCGAGGAGTCGCTGCCCATAGAGGTGATGGTGGACGCCGTGCACAAGCTCAAGTACGAGAATTACACC
AGCAGCTTCTTTATCAGGGACATAATTAAGCCGGACCCCCCAAAGAATCTGCAGCTGAAGCCCCTGAAGAATAGCCGGCAGGTG
GAAGTGTCCTGGGAGTACCCCGACACCTGGAGCACCCCCCACTCCTATTTCTCACTGACATTCTGCGTGCAGGTGCAAGGGAAA
AGCAAGAGGGAGAAGAAGGATAGGGTGTTCACCGACAAGACAAGCGCCACCGTGATCTGCCGAAAAAATGCCAGCATCAGCGTG
AGGGCCCAGGATCGGTATTACAGCAGCTCCTGGAGCGAGTGGGCCAGCGTGCCCTGTTCCGGCGGGGGAGGGGGCGGCTCCCGG
AACCTGCCGGTGGCCACCCCCGACCCTGGCATGTTCCCCTGCCTGCATCACAGCCAGAACCTGCTCCGGGCCGTGTCGAACATG
CTGCAGAAGGCCCGGCAGACCCTCGAGTTTTACCCCTGCACCAGCGAAGAGATCGACCACGAAGACATAACCAAGGACAAGACC
AGCACGGTGGAGGCCTGCCTGCCCCTGGAGCTTACCAAAAACGAGTCCTGCCTGAACAGCCGGGAAACCAGCTTCATAACGAAC
GGGAGCTGCCTGGCCTCCAGGAAGACCAGCTTCATGATGGCGCTGTGTCTGTCCAGCATATACGAGGATCTGAAGATGTATCAG
GTGGAATTCAAAACTATGAATGCCAAGCTCCTGATGGACCCCAAGAGGCAGATCTTCCTGGACCAGAACATGCTAGCCGTGATC
GACGAGCTGATGCAGGCCCTCAACTTCAACTCGGAGACGGTGCCCCAGAAGTCCAGCCTCGAGGAGCCCGACTTCTACAAGACC
AAGATCAAGCTGTGCATACTGCTGCATGCCTTCAGGATAAGGGCGGTGACTATCGACAGGGTCATGTCCTACCTGAACGCCAGC
>hIL12AB_037 (SEQ ID NO: 1077)
ATGTGCCACCAACAACTGGTGATCAGCTGGTTCTCCCTGGTGTTCCTGGCCAGCCCCCTGGTGGCCATCTGGGAGCTCAAAAAA
GACGTGTACGTGGTGGAGCTCGATTGGTACCCAGACGCGCCGGGGGAAATGGTGGTGCTGACCTGCGACACCCCAGAGGAGGAT
GGCATCACGTGGACGCTGGATCAGTCCAGCGAGGTGCTGGGGAGCGGCAAGACGCTCACCATCCAGGTGAAGGAATTTGGCGAC
GCGGGCCAGTATACCTGTCACAAGGGCGGCGAGGTGCTGAGCCACTCCCTGCTGCTGCTGCACAAGAAGGAGGATGGGATCTGG
TCAACCGATATCCTGAAAGACCAGAAGGAGCCCAAGAACAAGACCTTCCTGCGCTGCGAGGCCAAGAACTATAGCGGCAGGTTC
ACCTGCTGGTGGCTGACCACCATCAGCACCGACCTGACCTTCAGCGTGAAATCCTCCAGGGGCAGCAGCGACCCCCAGGGCGTG
ACCTGCGGTGCCGCCACGCTCTCCGCCGAGCGAGTGAGGGGTGACAACAAGGAGTACGAGTACAGCGTGGAATGTCAGGAGGAC
AGCGCCTGTCCCGCCGCCGAGGAGTCGCTGCCCATCGAGGTGATGGTCGACGCGGTGCACAAGCTCAAATACGAGAATTACACC
AGCAGCTTCTTCATCAGGGACATCATCAAGCCCGACCCCCCCAAGAACCTGCAGCTGAAGCCCTTGAAGAACAGCAGGCAGGTG
GAGGTGAGCTGGGAGTACCCGGACACCTGGAGCACCCCCCACTCCTACTTCAGCCTGACGTTCTGTGTGCAGGTGCAGGGGAAG
TCCAAGAGGGAGAAGAAGGACCGGGTGTTCACCGACAAGACCAGCGCCACCGTGATATGCCGCAAGAACGCGTCCATCAGCGTT
CGCGCCCAGGACCGCTACTACAGCAGCTCCTGGTCCGAATGGGCCAGCGTGCCCTGCAGCGGTGGAGGGGGCGGGGGCTCCAGG
AATCTGCCGGTGGCCACCCCCGACCCCGGGATGTTCCCGTGTCTGCATCACTCCCAGAACCTGCTGCGGGCCGTGAGCAATATG
CTGCAGAAGGCCAGGCAGACGCTCGAGTTCTACCCCTGCACCTCCGAAGAGATCGACCATGAGGACATCACCAAGGACAAGACC
AGCACCGTGGAGGCCTGCCTCCCCCTGGAGCTGACCAAAAACGAGAGCTGCCTGAACTCCAGGGAGACCAGCTTTATAACCAAC
GGCAGCTGCCTCGCCTCCAGGAAGACCTCGTTTATGATGGCCCTCTGCCTGTCCAGCATCTACGAGGACCTGAAGATGTACCAG
GTGGAGTTCAAGACCATGAACGCGAAGTTGCTCATGGACCCCAAGAGGCAGATCTTCCTGGACCAGAACATGCTCGCGGTGATC
GACGAGCTGATGCAAGCCCTGAACTTCAACAGCGAGACCGTGCCCCAGAAGAGCAGCCTGGAAGAGCCCGACTTCTACAAGACC
AAGATCAAGCTGTGCATCCTGCTGCACGCCTTCCGGATCCGGGCCGTGACCATCGACAGGGTGATGAGCTACCTCAACGCCTCC
>hIL12AB_038 (SEQ ID NO: 1078)
ATGTGCCACCAGCAGCTCGTGATCAGCTGGTTCTCCCTCGTCTTCCTGGCCTCCCCGCTGGTGGCCATCTGGGAGCTGAAGAAG
GACGTGTACGTGGTGGAGCTGGACTGGTATCCCGACGCCCCCGGCGAGATGGTGGTGCTGACGTGCGACACACCAGAAGAGGAC
GGGATCACATGGACCCTGGATCAGTCGTCCGAGGTGCTGGGGAGCGGCAAGACCCTCACCATCCAAGTGAAGGAGTTCGGGGAC
GCCGGCCAGTACACCTGCCACAAGGGCGGGGAGGTGCTCTCCCATAGCCTGCTCCTCCTGCACAAAAAGGAGGATGGCATCTGG
AGCACCGACATCCTGAAGGACCAGAAGGAGCCCAAGAACAAGACATTTCTCAGGTGTGAGGCCAAGAACTATTCGGGCAGGTTT
ACCTGTTGGTGGCTCACCACCATCTCTACCGACCTGACGTTCTCCGTCAAGTCAAGCAGGGGGAGCTCGGACCCCCAGGGGGTG
ACATGTGGGGCCGCCACCCTGAGCGCGGAGCGTGTCCGCGGCGACAACAAGGAGTACGAGTATTCCGTGGAGTGCCAGGAGGAC
AGCGCCTGCCCCGCCGCCGAGGAGTCCCTGCCCATAGAGGTGATGGTGGACGCCGTCCACAAGTTGAAGTACGAAAATTATACC
TCCTCGTTCTTCATTAGGGACATCATCAAGCCTGACCCCCCGAAGAACCTACAACTCAAGCCCCTCAAGAACTCCCGCCAGGTG
GAGGTGTCCTGGGAGTACCCCGACACCTGGTCCACCCCGCACAGCTACTTCAGCCTGACCTTCTGCGTGCAGGTCCAGGGGAAG
AGCAAGCGTGAAAAGAAAGACAGGGTGTTCACCGACAAGACGAGCGCCACCGTGATCTGCAGGAAAAACGCCTCCATCTCCGTG
CGCGCCCAGGACAGGTACTACAGTAGCTCCTGGAGCGAATGGGCCAGCGTGCCGTGCAGCGGCGGGGGAGGAGGCGGCAGTCGC
AACCTGCCCGTGGCCACCCCCGACCCCGGCATGTTCCCATGCCTGCACCACAGCCAGAACCTGCTGAGGGCAGTCAGCAATATG
CTGCAGAAGGCCAGGCAGACCCTGGAGTTTTATCCCTGCACCAGCGAGGAGATCGACCACGAGGACATCACCAAGGACAAGACC
TCCACCGTCGAGGCCTGCCTGCCACTGGAGCTGACCAAAAACGAGAGCTGCCTGAACTCCAGGGAGACCTCCTTCATCACCAAC
GGGAGCTGCCTGGCCAGCCGGAAGACCAGCTTCATGATGGCGCTGTGCCTCAGCAGCATCTACGAGGATCTCAAGATGTACCAG
GTGGAGTTCAAGACCATGAACGCGAAGCTGCTGATGGACCCCAAGCGGCAGATCTTCCTGGACCAGAACATGCTGGCCGTGATT
GACGAGCTCATGCAGGCCCTGAACTTCAATAGCGAGACCGTCCCCCAAAAGAGCAGCCTGGAGGAACCCGACTTCTACAAAACG
AAGATCAAGCTCTGCATCCTGCTGCACGCCTTCCGGATCCGGGCCGTGACCATCGATCGTGTGATGAGCTACCTGAACGCCTCG
>hIL12AB_039 (SEQ ID NO: 1079)
ATGTGCCACCAGCAGCTCGTCATCTCCTGGTTTAGCCTGGTGTTTCTGGCCTCCCCCCTGGTCGCCATCTGGGAGCTGAAGAAA
GACGTGTACGTGGTGGAGCTGGACTGGTACCCGGACGCTCCCGGGGAGATGGTGGTGCTGACCTGCGACACCCCCGAGGAGGAC
GGCATCACCTGGACCCTGGACCAGAGCTCCGAGGTGCTGGGGAGCGGCAAGACCCTGACCATTCAGGTGAAAGAGTTCGGCGAC
GCCGGCCAATATACCTGCCACAAGGGGGGGGAGGTCCTGTCGCATTCCCTGCTGCTGCTTCACAAAAAGGAGGATGGCATCTGG
AGCACCGACATCCTGAAGGACCAGAAAGAACCCAAGAACAAGACGTTCCTGCGCTGCGAGGCCAAGAACTACAGCGGCCGGTTC
ACCTGTTGGTGGCTGACCACCATCTCCACCGACCTGACTTTCTCGGTGAAGAGCAGCCGCGGGAGCAGCGACCCCCAGGGAGTG
ACCTGCGGCGCCGCCACCCTGAGCGCCGAAAGGGTGAGGGGCGACAATAAAGAGTACGAGTATTCCGTGGAGTGCCAGGAGGAC
AGCGCCTGTCCCGCCGCCGAGGAGTCCCTGCCTATCGAGGTGATGGTCGACGCGGTGCACAAGCTCAAGTACGAAAACTACACC
AGCAGCTTTTTCATCAGGGATATCATCAAACCAGACCCCCCCAAGAACCTGCAGCTGAAGCCCCTGAAAAACAGCAGGCAGGTG
GAAGTGAGCTGGGAATACCCCGATACCTGGTCCACCCCCCACAGCTACTTCAGCCTGACCTTCTGCGTGCAGGTGCAGGGGAAG
TCCAAGCGGGAGAAGAAAGATCGGGTGTTCACGGACAAGACCAGCGCCACCGTGATTTGCAGGAAAAACGCCAGCATCTCCGTG
AGGGCTCAGGACAGGTACTACAGCTCCAGCTGGAGCGAGTGGGCCTCCGTGCCTTGCAGCGGGGGAGGAGGCGGCGGCAGCAGG
AATCTGCCCGTCGCAACCCCCGACCCCGGCATGTTCCCCTGCCTGCACCACAGCCAGAATCTGCTGCGAGCCGTGAGCAACATG
CTCCAGAAGGCCCGGCAGACGCTGGAGTTCTACCCCTGCACCTCCGAGGAGATCGACCACGAGGACATCACCAAGGATAAGACG
AGCACCGTCGAGGCCTGTCTCCCCCTGGAGCTCACCAAGAACGAGTCCTGCCTGAATAGCAGGGAGACGTCCTTCATAACCAAC
GGCAGCTGTCTGGCGTCCAGGAAGACCAGCTTCATGATGGCCCTCTGCCTGAGCTCCATCTACGAGGACCTCAAGATGTACCAG
GTCGAGTTCAAGACCATGAACGCAAAACTGCTCATGGATCCAAAGAGGCAGATCTTTCTGGACCAGAACATGCTGGCCGTGATC
GATGAACTCATGCAGGCCCTGAATTTCAATTCCGAGACCGTGCCCCAGAAGAGCTCCCTGGAGGAACCCGACTTCTACAAAACA
AAGATCAAGCTGTGTATCCTCCTGCACGCCTTCCGGATCAGGGCCGTCACCATTGACCGGGTGATGTCCTACCTGAACGCCAGC
>hIL12AB_040 (SEQ ID NO: 1080)
ATGTGCCATCAGCAGCTGGTGATCAGCTGGTTCAGCCTCGTGTTCCTCGCCAGCCCCCTCGTGGCCATCTGGGAGCTGAAAAAG
GACGTGTACGTGGTGGAGCTGGACTGGTATCCCGACGCCCCGGGCGAGATGGTGGTGCTGACCTGCGACACCCCCGAGGAGGAC
GGCATTACCTGGACACTGGACCAGAGCAGCGAGGTCCTGGGCAGCGGGAAGACCCTGACAATTCAGGTGAAGGAGTTCGGCGAC
GCCGGACAGTACACGTGCCACAAGGGGGGGGAGGTGCTGTCCCACAGCCTCCTCCTGCTGCACAAGAAGGAGGATGGCATCTGG
AGCACCGACATCCTGAAGGATCAGAAGGAGCCCAAGAACAAGACCTTTCTGAGATGCGAGGCCAAGAATTACAGCGGCCGTTTC
ACCTGCTGGTGGCTCACCACCATCAGCACCGACCTGACCTTCAGCGTGAAATCCTCCAGGGGCTCCTCCGACCCGCAGGGAGTG
ACCTGCGGCGCCGCCACACTGAGCGCCGAGCGGGTCAGAGGGGACAACAAGGAGTACGAGTACAGCGTTGAGTGCCAGGAGGAC
AGCGCCTGTCCCGCGGCCGAGGAATCCCTGCCCATCGAGGTGATGGTGGACGCAGTGCACAAGCTGAAGTACGAGAACTATACC
TCGAGCTTCTTCATCCGGGATATCATTAAGCCCGATCCCCCGAAGAACCTGCAGCTCAAACCCCTGAAGAACAGCAGGCAGGTG
GAGGTCTCCTGGGAGTACCCCGACACATGGTCCACCCCCCATTCCTATTTCTCCCTGACCTTTTGCGTGCAGGTGCAGGGCAAG
AGCAAGAGGGAGAAAAAGGACAGGGTGTTCACCGACAAGACCTCCGCCACCGTGATCTGCCGTAAGAACGCTAGCATCAGCGTC
AGGGCCCAGGACAGGTACTATAGCAGCTCCTGGTCCGAGTGGGCCAGCGTCCCGTGCAGCGGCGGGGGCGGTGGAGGCTCCCGG
AACCTCCCCGTGGCCACCCCGGACCCCGGGATGTTTCCCTGCCTGCATCACAGCCAGAACCTGCTGAGGGCCGTGTCCAACATG
CTGCAGAAGGCCAGGCAGACACTCGAGTTTTACCCCTGCACCAGCGAGGAGATCGACCACGAAGACATCACCAAGGACAAGACC
TCCACCGTGGAGGCATGCCTGCCCCTGGAGCTGACCAAAAACGAAAGCTGTCTGAACTCCAGGGAGACCTCCTTTATCACGAAC
GGCTCATGCCTGGCCTCCAGAAAGACCAGCTTCATGATGGCCCTGTGCCTGAGCTCCATCTACGAGGACTTGAAAATGTACCAG
GTCGAGTTCAAGACCATGAACGCCAAGCTGCTCATGGACCCCAAAAGGCAGATCTTTCTGGACCAGAATATGCTGGCCGTGATC
GACGAGCTCATGCAAGCCCTGAATTTCAACAGCGAGACCGTGCCCCAGAAGTCCTCCCTGGAGGAGCCCGACTTCTACAAGACC
AAGATCAAGCTGTGCATACTCCTGCACGCGTTTAGGATCAGGGCGGTGACCATCGATAGGGTGATGAGCTACCTGAATGCCTCC

TABLE 15
Sequence Optimized IL12 Polynucleotides Comprising 5′ UTR, ORF, and 3′ UTR

| SEQ ID | | |
|---|---|---|
| NO | Description | Sequence |
| 1081 | hIL12AB_001 | TCAAGCTTTTGGACCCTCGTACAGAAGCTAATACGACTCACTATAGGGAAATAAGAGAGAA |
| | | AAGAAGAGTAAGAAGAAATATAAGAGCCACCATGTGTCACCAGCAGCTGGTCATTAGCTGG |
| | | TTTAGCCTTGTGTTCCTGGCCTCCCCCCTTGTCGCTATTTGGGAGCTCAAGAAGGACGTGT |
| | | ACGTGGTGGAGTTGGATTGGTACCCAGACGCGCCCGGAGAGATGGTAGTTCTGACCTGTGA |
| | | TACCCCAGAGGAGGACGGCATCACCTGGACGCTGGACCAAAGCAGCGAGGTTTTGGGCTCA |
| | | GGGAAAACGCTGACCATCCAGGTGAAGGAATTCGGCGACGCCGGGCAGTACACCTGCCATA |
| | | AGGGAGGAGAGGTGCTGAGCCATTCCCTTCTTCTGCTGCACAAGAAAGAGGACGGCATCTG |
| | | GTCTACCGACATCCTGAAAGACCAGAAGGAGCCCAAGAACAAAACCTTCCTGAGGTGCGAG |
| | | GCCAAGAACTACTCCGGCAGGTTCACTTGTTGGTGGCTGACCACCATCAGTACAGACCTGA |
| | | CTTTTAGTGTAAAAAGCTCCAGAGGCTCGTCCGATCCCCAAGGGGTGACCTGCGGCGCAGC |
| | | CACTCTGAGCGCTGAGCGCGTGCGCGGTGACAATAAAGAGTACGAGTACAGCGTTGAGTGT |
| | | CAAGAAGATAGCGCTTGCCCTGCCGCCGAGGAGAGCCTGCCTATCGAGGTGATGGTTGACG |
| | | CAGTGCACAAGCTTAAGTACGAGAATTACACCAGCTCATTCTTCATTAGAGATATAATCAA |
| | | GCCTGACCCACCCAAGAACCTGCAGCTGAAGCCACTGAAAAACTCACGGCAGGTCGAAGTG |
| | | AGCTGGGAGTACCCCGACACCTGGAGCACTCCTCATTCCTATTTCTCTCTTACATTCTGCG |
| | | TCCAGGTGCAGGGCAAGAGCAAGCGGGAAAAGAAGGATCGAGTCTTCACCGACAAAACAAG |
| | | CGCGACCGTGATTTGCAGGAAGAACGCCAGCATCTCCGTCAGAGCCCAGGATAGATACTAT |
| | | AGTAGCAGCTGGAGCGAGTGGGCAAGCGTGCCCTGTTCCGGCGGCGGGGGCGGGGGCAGCC |
| | | GAAACTTGCCTGTCGCTACCCCGGACCCTGGAATGTTTCCGTGTCTGCACCACAGCCAGAA |
| | | CCTGCTGAGAGCCGTGTCGAATATGCTCCAGAAGGCCCGGCAGACCCTTGAGTTCTACCCC |
| | | TGTACCAGCGAAGAGATCGATCATGAAGATATCACGAAAGATAAAACATCCACCGTCGAGG |
| | | CTTGTCTCCCGCTGGAGCTGACCAAGAACGAGAGCTGTCTGAATAGCCGGGAGACGTCTTT |
| | | CATCACGAATGGTAGCTGTCTGGCCAGCAGGAAAACTTCCTTCATGATGGCTCTCTGCCTG |
| | | AGCTCTATCTATGAAGATCTGAAGATGTATCAGGTGGAGTTTAAAACAATGAACGCCAAAC |
| | | TCCTGATGGACCCAAAAAGGCAAATCTTTCTGGACCAGAATATGCTGGCCGTGATAGACGA |
| | | GCTGATGCAGGCACTGAACTTCAACAGCGAGACGGTGCCACAGAAATCCAGCCTGGAGGAG |
| | | CCTGACTTTTACAAAACTAAGATCAAGCTGTGTATCCTGCTGCACGCCTTTAGAATCCGTG |
| | | CCGTGACTATCGACAGGGTGATGTCATACCTCAACGCTTCATGATAATAGGCTGGAGCCTC |
| | | GGTGGCCATGCTTCTTGCCCCTTGGGCCTCCCCCCAGCCCCTCCTCCCCTTCCTGCACCCG |
| | | TACCCCCCAAACACCATTGTCACACTCCAGTGGTCTTTGAATAAAGTCTGAGTGGGCGGC |
| 1082 | hIL12AB_002 | TCAAGCTTTTGGACCCTCGTACAGAAGCTAATACGACTCACTATAGGGAAATAAGAGAGAA |
| | | AAGAAGAGTAAGAAGAAATATAAGAGCCACCATGTGCCACCAGCAGCTGGTGATCAGCTGG |
| | | TTCAGCCTGGTGTTCCTGGCCAGCCCCCTGGTGGCCATCTGGGAGCTGAAGAAGGACGTGT |
| | | ACGTGGTGGAGTTGGATTGGTACCCCGACGCCCCCGGCGAGATGGTGGTGCTGACCTGCGA |
| | | CACCCCCGAGGAGGACGGCATCACCTGGACCCTGGACCAGAGCAGCGAGGTGCTGGGCAGC |
| | | GGCAAGACCCTGACCATCCAGGTGAAGGAGTTCGGCGACGCCGGCCAGTACACCTGCCACA |
| | | AGGGCGGCGAGGTGCTGAGCCACAGCCTGCTGCTGCTGCACAAGAAGGAGGACGGCATCTG |
| | | GAGCACCGACATCCTGAAGGACCAGAAGGAGCCCAAGAACAAGACCTTCCTGAGATGCGAG |
| | | GCCAAGAACTACAGCGGCAGATTCACCTGCTGGTGGCTGACCACCATCAGCACCGACCTGA |
| | | CCTTCAGCGTGAAGAGCAGCAGAGGCAGCAGCGACCCCCAGGGCGTGACCTGCGGCGCCGC |
| | | CACCCTGAGCGCCGAGAGAGTGAGAGGCGACAACAAGGAGTACGAGTACAGCGTGGAGTGC |
| | | CAGGAAGATAGCGCCTGCCCCGCCGCCGAGGAGAGCCTGCCCATCGAGGTGATGGTGGACG |
| | | CCGTGCACAAGCTGAAGTACGAGAACTACACCAGCAGCTTCTTCATCAGAGATATCATCAA |
| | | GCCCGACCCCCCCAAGAACCTGCAGCTGAAGCCCCTGAAGAACAGCCGGCAGGTGGAGGTG |
| | | AGCTGGGAGTACCCCGACACCTGGAGCACCCCCCACAGCTACTTCAGCCTGACCTTCTGCG |
| | | TGCAGGTGCAGGGCAAGAGCAAGAGAGAGAAGAAAGATAGAGTGTTCACCGACAAGACCAG |
| | | CGCCACCGTGATCTGCAGAAAGAACGCCAGCATCAGCGTGAGAGCCCAAGATAGATACTAC |
| | | AGCAGCAGCTGGAGCGAGTGGGCCAGCGTGCCCTGCAGCGGCGGCGGCGGCGGCGGCAGCA |
| | | GAAACCTGCCCGTGGCCACCCCCGACCCCGGCATGTTCCCCTGCCTGCACCACAGCCAGAA |
| | | CCTGCTGAGAGCCGTGAGCAACATGCTGCAGAAGGCCCGGCAGACCCTGGAGTTCTACCCC |
| | | TGCACCAGCGAGGAGATCGACCACGAAGATATCACCAAAGATAAGACCAGCACCGTGGAGG |
| | | CCTGCCTGCCCCTGGAGCTGACCAAGAACGAGAGCTGCCTGAACAGCAGAGAGACCAGCTT |
| | | CATCACCAACGGCAGCTGCCTGGCCAGCAGAAAGACCAGCTTCATGATGGCCCTGTGCCTG |
| | | AGCAGCATCTACGAGGACCTGAAGATGTACCAGGTGGAGTTCAAGACCATGAACGCCAAGC |
| | | TGCTGATGGACCCCAAGCGGCAGATCTTCCTGGACCAGAACATGCTGGCCGTGATCGACGA |
| | | GCTGATGCAGGCCCTGAACTTCAACAGCGAGACCGTGCCCCAGAAGAGCAGCCTGGAGGAG |
| | | CCCGACTTCTACAAGACCAAGATCAAGCTGTGCATCCTGCTGCACGCCTTCAGAATCAGAG |
| | | CCGTGACCATCGACAGAGTGATGAGCTACCTGAACGCCAGCTGATAATAGGCTGGAGCCTC |
| | | GGTGGCCATGCTTCTTGCCCCTTGGGCCTCCCCCCAGCCCCTCCTCCCCTTCCTGCACCCG |
| | | TACCCCCCAAACACCATTGTCACACTCCAGTGGTCTTTGAATAAAGTCTGAGTGGGCGGC |
| 1083 | hIL12AB_003 | TCAAGCTTTTGGACCCTCGTACAGAAGCTAATACGACTCACTATAGGGAAATAAGAGAGAA |
| | | AAGAAGAGTAAGAAGAAATATAAGAGCCACCATGTGTCACCAGCAGTTGGTCATCTCTTGG |
| | | TTTTCCCTGGTTTTTCTGGCATCTCCCCTCGTGGCCATCTGGGAACTGAAGAAAGACGTTT |
| | | ACGTTGTAGAATTGGATTGGTATCCGGACGCTCCTGGAGAAATGGTGGTCCTCACCTGTGA |
| | | CACCCCTGAAGAAGACGGAATCACCTGGACCTTGGACCAGAGCAGTGAGGTCTTAGGCTCT |
| | | GGCAAAACCCTGACCATCCAAGTCAAAGAGTTTGGAGATGCTGGCCAGTACACCTGTCACA |
| | | AAGGAGGCGAGGTTCTAAGCCATTCGCTCCTGCTGCTTCACAAAAAGGAAGATGGAATTTG |
| | | GTCCACTGATATTTTAAAGGACCAGAAAGAACCCAAAAATAAGACCTTTCTAAGATGCGAG |
| | | GCCAAGAATTATTCTGGACGTTTCACCTGCTGGTGGCTGACGACAATCAGTACTGATTTGA |
| | | CATTCAGTGTCAAAAGCAGCAGAGGCTCTTCTGACCCCCAAGGGGTGACGTGCGGAGCTGC |
| | | TACACTCTCTGCAGAGAGAGTCAGAGGTGACAACAAGGAGTATGAGTACTCAGTGGAGTGC |
| | | CAGGAAGATAGTGCCTGCCCAGCTGCTGAGGAGAGTCTGCCCATTGAGGTCATGGTGGATG |
| | | CCGTTCACAAGCTCAAGTATGAAAACTACACCAGCAGCTTCTTCATCAGAGATATCATCAA |
| | | ACCTGACCCACCCAAGAACTTGCAGCTGAAGCCATTAAAGAATTCTCGGCAGGTGGAGGTC |
| | | AGCTGGGAGTACCCTGACACCTGGAGTACTCCACATTCCTACTTCTCCCTGACATTCTGCG |
| | | TTCAGGTCCAGGGCAAGAGCAAGAGAGAAAAGAAAGATAGAGTCTTCACAGATAAGACCTC |
| | | AGCCACGGTCATCTGCCGCAAAAATGCCAGCATTAGCGTGCGGGCCCAGGACCGCTACTAT |
| | | AGCTCATCTTGGAGCGAATGGGCATCTGTGCCCTGCAGTGGCGGAGGGGGCGGAGGGAGCA |
| | | GAAACCTCCCCGTGGCCACTCCAGACCCAGGAATGTTCCCATGCCTTCACCACTCCCAAAA |
| | | CCTGCTGAGGGCCGTCAGCAACATGCTCCAGAAGGCCCGGCAAACTTTAGAATTTTACCCT |
| | | TGCACTTCTGAAGAGATTGATCATGAAGATATCACAAAAGATAAAACCAGCACAGTGGAGG |
| | | CCTGTTTACCATTGGAATTAACCAAGAATGAGAGTTGCCTAAATTCCAGAGAGACCTCTTT |
| | | CATAACTAATGGGAGTTGCCTGGCCTCCAGAAAGACCTCTTTTATGATGGCCCTGTGCCTT |
| | | AGTAGTATTTATGAAGATTTGAAGATGTACCAGGTGGAGTTCAAGACCATGAATGCAAAGC |
| | | TTCTGATGGATCCTAAGAGGCAGATCTTTTTAGATCAAAACATGCTGGCAGTTATTGATGA |
| | | GCTGATGCAGGCCCTGAATTTCAACAGTGAGACGGTGCCACAAAAATCCTCCCTTGAAGAA |
| | | CCAGATTTCTACAAGACCAAGATCAAGCTCTGCATACTTCTTCATGCTTTCAGAATTCGGG |
| | | CAGTGACTATTGATAGAGTGATGAGCTATCTGAATGCTTCCTGATAATAGGCTGGAGCCTC |
| | | GGTGGCCATGCTTCTTGCCCCTTGGGCCTCCCCCCAGCCCCTCCTCCCCTTCCTGCACCCG |
| | | TACCCCCCAAACACCATTGTCACACTCCAGTGGTCTTTGAATAAAGTCTGAGTGGGCGGC |
| 1084 | hIL12AB_005 | TCAAGCTTTTGGACCCTCGTACAGAAGCTAATACGACTCACTATAGGGAAATAAGAGAGAA |
| | | AAGAAGAGTAAGAAGAAATATAAGAGCCACCATGTGCCACCAGCAGCTGGTCATCAGCTGG |
| | | TTCTCCCTGGTCTTCCTGGCCAGCCCCCTGGTGGCCATCTGGGAGCTGAAGAAAGACGTCT |
| | | ACGTAGTAGAGTTGGATTGGTACCCAGACGCACCTGGAGAAATGGTGGTTCTCACCTGTGA |
| | | CACGCCAGAAGAAGACGGTATCACCTGGACGCTGGACCAGAGCTCAGAAGTTCTTGGCAGT |
| | | GGAAAAACGCTGACCATACAAGTAAAAGAATTTGGGGATGCTGGCCAGTACACCTGCCACA |
| | | AAGGAGGAGAAGTTCTCAGCCACAGCCTGCTGCTGCTGCACAAGAAAGAAGATGGCATCTG |
| | | GAGCACAGATATTTTAAAAGACCAGAAGGAGCCCAAGAACAAAACCTTCCTTCGATGTGAG |
| | | GCCAAGAACTACAGTGGCCGCTTCACCTGCTGGTGGCTCACCACCATCAGCACAGACCTCA |
| | | CCTTCTCGGTGAAGAGCAGCCGTGGCAGCTCAGACCCCCAAGGAGTCACCTGTGGGGCGGC |
| | | CACGCTGTCGGCAGAAAGAGTTCGAGGTGACAACAAGGAATATGAATACTCGGTGGAATGT |
| | | CAAGAAGATTCGGCCTGCCCGGCGGCAGAAGAAAGTCTTCCCATAGAAGTCATGGTGGATG |
| | | CTGTTCACAAATTAAAATATGAAAACTACACCAGCAGCTTCTTCATCAGAGATATCATCAA |
| | | GCCAGACCCGCCCAAGAACCTGCAGCTGAAGCCCCTGAAGAACAGCCGGCAGGTGGAAGTT |
| | | TCCTGGGAGTACCCAGATACGTGGAGCACGCCGCACAGCTACTTCAGCCTCACCTTCTGTG |
| | | TACAAGTACAAGGCAAGAGCAAGAGAGAGAAGAAAGATCGTGTCTTCACAGATAAAACCTC |
| | | GGCGACGGTCATCTGCAGGAAGAATGCCTCCATCTCGGTTCGAGCCCAGGACCGCTACTAC |
| | | AGCAGCAGCTGGAGTGAGTGGGCCTCGGTGCCCTGCAGTGGTGGCGGCGGCGGCGGCAGCA |
| | | GAAACCTTCCTGTGGCCACGCCGGACCCTGGCATGTTCCCGTGCCTGCACCACAGCCAAAA |
| | | TTTACTTCGAGCTGTTTCTAACATGCTGCAGAAAGCACGGCAAACTTTAGAATTCTACCCC |
| | | TGCACCTCAGAAGAAATAGACCATGAAGATATCACCAAAGATAAAACCAGCACTGTAGAGG |
| | | CCTGCCTGCCCCTGGAGCTCACCAAGAATGAATCCTGCCTCAACAGCAGAGAGACCAGCTT |
| | | CATCACCAATGGCAGCTGCCTGGCCAGCAGGAAAACCAGCTTCATGATGGCGCTCTGCCTG |
| | | AGCAGCATCTATGAAGATTTGAAGATGTACCAAGTAGAATTTAAAACCATGAATGCCAAGC |
| | | TGCTCATGGACCCCAAGCGGCAGATATTTTTGGATCAAAACATGCTGGCTGTCATTGATGA |
| | | GCTCATGCAAGCATTAAACTTCAACTCAGAGACGGTGCCCCAGAAGAGCAGCCTGGAGGAG |
| | | CCAGATTTCTACAAAACCAAGATCAAGCTCTGCATCTTATTACATGCCTTCCGCATCCGGG |
| | | CGGTCACCATTGACCGTGTCATGTCCTACTTAAATGCCAGCTGATAATAGGCTGGAGCCTC |
| | | GGTGGCCATGCTTCTTGCCCCTTGGGCCTCCCCCCAGCCCCTCCTCCCCTTCCTGCACCCG |
| | | TACCCCCCAAACACCATTGTCACACTCCAGTGGTCTTTGAATAAAGTCTGAGTGGGCGGC |
| 1085 | hIL12AB_006 | TCAAGCTTTTGGACCCTCGTACAGAAGCTAATACGACTCACTATAGGGAAATAAGAGAGAA |
| | | AAGAAGAGTAAGAAGAAATATAAGAGCCACCATGTGCCACCAGCAGCTGGTGATCAGCTGG |
| | | TTCAGCCTGGTGTTCCTGGCCAGCCCCCTGGTGGCCATCTGGGAGCTGAAGAAGGACGTGT |
| | | ACGTGGTGGAGTTGGATTGGTACCCCGACGCCCCCGGCGAGATGGTGGTGCTGACCTGTGA |
| | | CACCCCCGAGGAGGACGGCATCACCTGGACCCTGGACCAGAGCAGCGAGGTGCTGGGCAGC |
| | | GGCAAGACCCTGACCATCCAGGTGAAGGAGTTCGGGGACGCCGGCCAGTACACCTGCCACA |
| | | AGGGCGGCGAGGTGCTGAGCCACAGCCTGCTGCTGCTGCACAAGAAGGAGGACGGCATCTG |
| | | GAGCACAGATATCCTGAAGGACCAGAAGGAGCCCAAGAACAAGACCTTCCTGAGATGCGAG |
| | | GCCAAGAACTACAGCGGCAGATTCACCTGCTGGTGGCTGACCACCATCAGCACAGATTTGA |
| | | CCTTCAGCGTGAAGAGCAGCAGAGGCAGCAGCGACCCCCAGGGCGTGACCTGCGGCGCCGC |
| | | CACCCTGAGCGCCGAGAGAGTGAGAGGTGACAACAAGGAGTACGAGTACAGCGTGGAGTGC |
| | | CAGGAAGATAGCGCCTGCCCCGCCGCCGAGGAGAGCCTGCCCATCGAGGTGATGGTGGACG |
| | | CCGTGCACAAGCTGAAGTACGAGAACTACACCAGCAGCTTCTTCATCAGAGATATCATCAA |
| | | GCCCGACCCGCCGAAGAACCTGCAGCTGAAGCCCCTGAAGAACAGCCGGCAGGTGGAGGTG |
| | | AGCTGGGAGTACCCCGACACCTGGAGCACCCCCCACAGCTACTTCAGCCTGACCTTCTGCG |
| | | TGCAGGTGCAGGGCAAGAGCAAGAGAGAGAAGAAAGATAGAGTGTTCACAGATAAGACCAG |
| | | CGCCACCGTGATCTGCAGAAAGAACGCCAGCATCAGCGTGAGAGCCCAAGATAGATACTAC |
| | | AGCAGCAGCTGGAGCGAGTGGGCCAGCGTGCCCTGCAGCGGCGGCGGCGGCGGCGGCAGCA |
| | | GAAACCTGCCCGTGGCCACCCCCGACCCCGGCATGTTCCCCTGCCTGCACCACAGCCAGAA |
| | | CCTGCTGAGAGCCGTGAGCAACATGCTGCAGAAGGCCCGGCAGACCCTGGAGTTCTACCCC |
| | | TGCACCAGCGAGGAGATCGACCACGAAGATATCACCAAAGATAAGACCAGCACCGTGGAGG |
| | | CCTGCCTGCCCCTGGAGCTGACCAAGAATGAAAGCTGCCTGAACAGCAGAGAGACCAGCTT |
| | | CATCACCAACGGCAGCTGCCTGGCCAGCAGAAAGACCAGCTTCATGATGGCCCTGTGCCTG |
| | | AGCAGCATCTACGAGGACCTGAAGATGTACCAGGTGGAGTTCAAGACCATGAACGCCAAGC |
| | | TGCTGATGGACCCCAAGCGGCAGATCTTCCTGGACCAGAACATGCTGGCCGTGATCGACGA |
| | | GCTGATGCAGGCCCTGAACTTCAACAGCGAGACCGTGCCCCAGAAGAGCAGCCTGGAGGAG |
| | | CCCGACTTCTACAAGACCAAGATCAAGCTGTGCATCCTGCTGCACGCCTTCAGAATCAGAG |
| | | CCGTGACCATCGACAGAGTGATGAGCTACCTGAACGCCAGCTGATAATAGGCTGGAGCCTC |
| | | GGTGGCCATGCTTCTTGCCCCTTGGGCCTCCCCCCAGCCCCTCCTCCCCTTCCTGCACCCG |
| | | TACCCCCCAAACACCATTGTCACACTCCAGTGGTCTTTGAATAAAGTCTGAGTGGGCGGC |
| 1086 | hIL12AB_007 | TCAAGCTTTTGGACCCTCGTACAGAAGCTAATACGACTCACTATAGGGAAATAAGAGAGAA |
| | | AAGAAGAGTAAGAAGAAATATAAGAGCCACCATGTGCCACCAGCAGCTTGTCATCTCCTGG |
| | | TTCTCTCTTGTCTTCCTTGCTTCTCCTCTTGTGGCCATCTGGGAGCTGAAGAAGGACGTTT |
| | | ACGTAGTGGAGTTGGATTGGTACCCTGACGCACCTGGAGAAATGGTGGTTCTCACCTGTGA |
| | | CACTCCTGAGGAGGACGGTATCACCTGGACGTTGGACCAGTCTTCTGAGGTTCTTGGCAGT |
| | | GGAAAAACTCTTACTATTCAGGTGAAGGAGTTTGGAGATGCTGGCCAGTACACCTGCCACA |
| | | AGGGTGGTGAAGTTCTCAGCCACAGTTTACTTCTTCTTCACAAGAAGGAGGATGGCATCTG |
| | | GTCTACTGACATTTTAAAAGACCAGAAGGAGCCCAAGAACAAAACATTCCTTCGTTGTGAA |
| | | GCCAAGAACTACAGTGGTCGTTTCACCTGCTGGTGGCTTACTACTATTTCTACTGACCTTA |
| | | CTTTCTCTGTGAAGTCTTCTCGTGGCTCTTCTGACCCTCAGGGTGTCACCTGTGGGGCTGC |
| | | TACTCTTTCTGCTGAGCGTGTGCGTGGTGACAACAAGGAGTATGAATACTCGGTGGAGTGC |
| | | CAGGAAGATTCTGCCTGCCCTGCTGCTGAGGAGTCTCTTCCTATTGAGGTGATGGTGGATG |
| | | CTGTGCACAAGTTAAAATATGAAAACTACACTTCTTCTTTCTTCATTCGTGACATTATAAA |
| | | ACCTGACCCTCCCAAGAACCTTCAGTTAAAACCTTTAAAAAACTCTCGTCAGGTGGAGGTG |
| | | TCCTGGGAGTACCCTGACACGTGGTCTACTCCTCACTCCTACTTCTCTCTTACTTTCTGTG |
| | | TCCAGGTGCAGGGCAAGTCCAAGCGTGAGAAGAAGGACCGTGTCTTCACTGACAAAACATC |
| | | TGCTACTGTCATCTGCAGGAAGAATGCATCCATCTCTGTGCGTGCTCAGGACCGTTACTAC |
| | | AGCTCTTCCTGGTCTGAGTGGGCTTCTGTGCCCTGCTCTGGCGGCGGCGGCGGCGGCAGCA |
| | | GAAATCTTCCTGTGGCTACTCCTGACCCTGGCATGTTCCCCTGCCTTCACCACTCGCAGAA |
| | | CCTTCTTCGTGCTGTGAGCAACATGCTTCAGAAGGCTCGTCAAACTTTAGAATTCTACCCC |
| | | TGCACTTCTGAGGAGATTGACCATGAAGATATCACCAAAGATAAAACATCTACTGTGGAGG |
| | | CCTGCCTTCCTTTAGAGCTGACCAAGAATGAATCCTGCTTAAATTCTCGTGAGACGTCTTT |
| | | CATCACCAATGGCAGCTGCCTTGCCTCGCGCAAAACATCTTTCATGATGGCTCTTTGCCTT |
| | | TCTTCCATCTATGAAGATTTAAAAATGTACCAGGTGGAGTTCAAGACCATGAATGCAAAGC |
| | | TTCTCATGGACCCCAAGCGTCAGATATTTTTGGACCAGAACATGCTTGCTGTCATTGATGA |
| | | GCTCATGCAGGCTTTAAACTTCAACTCTGAGACGGTGCCTCAGAAGTCTTCTTTAGAAGAG |
| | | CCTGACTTCTACAAGACCAAGATAAAACTTTGCATTCTTCTTCATGCTTTCCGCATCCGTG |
| | | CTGTGACTATTGACCGTGTGATGTCCTACTTAAATGCTTCTTGATAATAGGCTGGAGCCTC |
| | | GGTGGCCAAGCTTCTTGCCCCTTGGGCCTCCCCCCAGCCCCTCCTCCCCTTCCTGCACCCG |
| | | TACCCCCCAAACACCATTGTCACACTCCAGTGGTCTTTGAATAAAGTCTGAGTGGGCGGC |
| 1087 | hIL12AB_008 | TCAAGCTTTTGGACCCTCGTACAGAAGCTAATACGACTCACTATAGGGAAATAAGAGAGAA |
| | | AAGAAGAGTAAGAAGAAATATAAGAGCCACCATGTGTCATCAACAACTCGTGATTAGCTGG |
| | | TTCAGTCTCGTGTTCCTGGCCTCTCCGCTGGTGGCCATCTGGGAGCTTAAGAAGGACGTGT |
| | | ACGTGGTGGAGCTCGATTGGTACCCCGACGCACCTGGCGAGATGGTGGTGCTAACCTGCGA |
| | | TACCCCCGAGGAGGACGGGATCACTTGGACCCTGGATCAGAGTAGCGAAGTCCTGGGCTCT |
| | | GGCAAAACACTCACAATCCAGGTGAAGGAATTCGGAGACGCTGGTCAGTACACTTGCCACA |
| | | AGGGGGGTGAAGTGCTGTCTCACAGCCTGCTGTTACTGCACAAGAAGGAGGATGGGATCTG |
| | | GTCAACCGACATCCTGAAGGATCAGAAGGAGCCTAAGAACAAGACCTTTCTGAGGTGTGAA |
| | | GCTAAGAACTATTCCGGAAGATTCACTTGCTGGTGGTTGACCACAATCAGCACTGACCTGA |
| | | CCTTTTCCGTGAAGTCCAGCAGAGGAAGCAGCGATCCTCAGGGCGTAACGTGCGGCGCGGC |
| | | TACCCTGTCAGCTGAGCGGGTTAGAGGCGACAACAAAGAGTATGAGTACTCCGTGGAGTGT |
| | | CAGGAAGATAGCGCCTGCCCCGCAGCCGAGGAGAGTCTGCCCATCGAGGTGATGGTGGACG |
| | | CTGTCCATAAGTTAAAATACGAAAATTACACAAGTTCCTTTTTCATCCGCGATATTATCAA |
| | | ACCCGATCCCCCCAAGAACCTGCAGCTGAAGCCCCTGAAGAATAGCCGACAGGTGGAAGTC |
| | | TCTTGGGAGTATCCTGACACCTGGTCCACGCCTCACAGCTACTTTAGTCTGACTTTCTGTG |
| | | TCCAGGTCCAGGGCAAGAGCAAGAGAGAGAAAAAGGATAGAGTGTTTACTGACAAAACATC |
| | | TGCTACAGTCATCTGCAGAAAGAACGCCAGTATCTCAGTGAGGGCGCAAGATAGATACTAC |
| | | AGTAGTAGCTGGAGCGAATGGGCTAGCGTGCCCTGTTCAGGGGGCGGCGGAGGGGGCTCCA |
| | | GGAATCTGCCCGTGGCCACCCCCGACCCTGGGATGTTCCCTTGCCTCCATCACTCACAGAA |
| | | CCTGCTCAGAGCAGTGAGCAACATGCTCCAAAAGGCCCGCCAGACCCTGGAGTTTTACCCT |
| | | TGTACTTCAGAAGAGATCGATCACGAAGATATAACAAAGGATAAAACCAGCACCGTGGAGG |
| | | CCTGTCTGCCTCTGGAACTCACAAAGAATGAAAGCTGTCTGAATTCCAGGGAAACCTCCTT |
| | | CATTACTAACGGAAGCTGTCTCGCATCTCGCAAAACATCATTCATGATGGCCCTCTGCCTG |
| | | TCTTCTATCTATGAAGATCTCAAGATGTATCAGGTGGAGTTCAAAACAATGAACGCCAAGC |
| | | TGCTGATGGACCCCAAGCGGCAGATCTTCCTGGACCAGAACATGCTGGCAGTGATCGATGA |
| | | GCTGATGCAAGCCTTGAACTTCAACTCAGAGACGGTGCCGCAAAAGTCCTCGTTGGAGGAA |
| | | CCAGATTTTTACAAAACCAAAATCAAGCTGTGTATCCTTCTTCACGCCTTTCGGATCAGAG |
| | | CCGTGACTATCGACCGGGTGATGTCATACCTGAATGCTTCCTGATAATAGGCTGGAGCCTC |
| | | GGTGGCCATGCTTCTTGCCCCTTGGGCCTCCCCCCAGCCCCTCCTCCCCTTCCTGCACCCG |
| | | TACCCCCCAAACACCATTGTCACACTCCAGTGGTCTTTGAATAAAGTCTGAGTGGGCGGC |
| 1088 | hIL12AB_009 | TCAAGCTTTTGGACCCTCGTACAGAAGCTAATACGACTCACTATAGGGAAATAAGAGAGAA |
| | | AAGAAGAGTAAGAAGAAATATAAGAGCCACCATGTGCCACCAGCAGCTGGTCATCAGCTGG |
| | | TTTAGCCTGGTCTTCCTGGCCAGCCCCCTGGTGGCCATCTGGGAGCTGAAGAAAGACGTCT |
| | | ACGTAGTAGAGTTGGATTGGTACCCAGACGCACCTGGAGAAATGGTGGTTCTCACCTGCGA |
| | | CACGCCAGAAGAAGACGGTATCACCTGGACGCTGGACCAGAGCAGCGAAGTACTGGGCAGT |
| | | GGAAAAACGCTGACCATACAAGTAAAAGAATTTGGCGATGCTGGCCAGTACACCTGCCACA |
| | | AAGGAGGAGAAGTACTGAGCCACAGCCTGCTGCTGCTGCACAAGAAAGAAGATGGCATCTG |
| | | GAGCACCGACATTTTAAAAGACCAGAAGGAGCCCAAGAACAAAACCTTCCTTCGATGTGAG |
| | | GCGAAGAACTACAGTGGCCGCTTCACCTGCTGGTGGCTCACCACCATCAGCACCGACCTCA |
| | | CCTTCTCGGTGAAGAGCAGCCGTGGTAGCTCAGACCCCCAAGGAGTCACCTGTGGGGCGGC |
| | | CACGCTGTCGGCAGAAAGAGTTCGAGGCGACAACAAGGAATATGAATACTCGGTGGAATGT |
| | | CAAGAAGATTCGGCCTGCCCGGCGGCAGAAGAAAGTCTGCCCATAGAAGTCATGGTGGATG |
| | | CTGTTCACAAATTAAAATATGAAAACTACACCAGCAGCTTCTTCATCAGAGATATCATCAA |
| | | GCCAGACCCCCCCAAGAACCTGCAGCTGAAGCCCCTGAAGAACAGCCGGCAGGTGGAAGTT |
| | | TCCTGGGAGTACCCAGATACGTGGAGCACGCCGCACAGCTACTTCAGCCTCACCTTCTGTG |
| | | TACAAGTACAAGGCAAGAGCAAGAGAGAGAAGAAAGATCGTGTCTTCACCGACAAAACCTC |
| | | GGCGACGGTCATCTGCAGGAAGAATGCAAGCATCTCGGTTCGAGCCCAGGACCGCTACTAC |
| | | AGCAGCAGCTGGAGTGAGTGGGCCTCGGTGCCCTGCAGTGGTGGCGGCGGCGGCGGCAGCA |
| | | GAAACCTTCCTGTGGCCACGCCGGACCCTGGCATGTTTCCGTGCCTGCACCACAGCCAAAA |
| | | TTTATTACGAGCTGTTAGCAACATGCTGCAGAAAGCACGGCAAACTTTAGAATTCTACCCC |
| | | TGCACCTCAGAAGAAATAGACCATGAAGATATCACCAAAGATAAAACCAGCACTGTAGAGG |
| | | CCTGCCTGCCCCTGGAGCTCACCAAGAACGAGAGCTGCCTCAATAGCAGAGAGACCAGCTT |
| | | CATCACCAATGGCAGCTGCCTGGCCAGCAGGAAAACCAGCTTCATGATGGCGCTCTGCCTG |
| | | AGCAGCATCTATGAAGATCTGAAGATGTACCAAGTAGAATTTAAAACCATGAATGCCAAGC |
| | | TGCTCATGGACCCCAAGCGGCAGATATTCCTCGACCAAAACATGCTGGCTGTCATTGATGA |
| | | GCTCATGCAAGCATTAAACTTCAACTCAGAGACGGTGCCCCAGAAGAGCAGCCTGGAGGAG |
| | | CCAGATTTCTACAAAACCAAGATCAAGCTCTGCATCTTATTACATGCCTTCCGCATCCGGG |
| | | CGGTCACCATTGACCGTGTCATGTCCTACTTAAATGCCAGCTGATAATAGGCTGGAGCCTC |
| | | GGTGGCCATGCTTCTTGCCCCTTGGGCCTCCCCCCAGCCCCTCCTCCCCTTCCTGCACCCG |
| | | TACCCCCCAAACACCATTGTCACACTCCAGTGGTCTTTGAATAAAGTCTGAGTGGGCGGC |
| 1089 | hIL12AB_010 | TCAAGCTTTTGGACCCTCGTACAGAAGCTAATACGACTCACTATAGGGAAATAAGAGAGAA |
| | | AAGAAGAGTAAGAAGAAATATAAGAGCCACCATGTGCCACCAGCAGCTTGTCATCTCCTGG |
| | | TTTTCTCTTGTCTTCCTCGCTTCTCCTCTTGTGGCCATCTGGGAGCTGAAGAAAGACGTCT |
| | | ACGTAGTAGAGTTGGATTGGTACCCGGACGCTCCTGGAGAAATGGTGGTTCTCACCTGCGA |
| | | CACTCCTGAAGAAGACGGTATCACCTGGACGCTGGACCAAAGCAGCGAAGTTTTAGGCTCT |
| | | GGAAAAACGCTGACCATACAAGTAAAAGAATTTGGCGACGCTGGCCAGTACACGTGCCACA |
| | | AAGGAGGAGAAGTTTTAAGCCACAGTTTACTTCTTCTTCACAAGAAAGAAGATGGCATCTG |
| | | GAGTACAGATATTTTAAAAGACCAGAAGGAGCCTAAGAACAAAACCTTCCTCCGCTGTGAA |
| | | GCTAAGAACTACAGTGGTCGTTTCACCTGCTGGTGGCTCACCACCATCTCCACTGACCTCA |
| | | CCTTCTCTGTAAAATCAAGCCGTGGTTCTTCTGACCCCCAAGGAGTCACCTGTGGGGCTGC |
| | | CACGCTCAGCGCTGAAAGAGTTCGAGGCGACAACAAGGAATATGAATATTCTGTGGAATGT |
| | | CAAGAAGATTCTGCCTGCCCGGCGGCAGAAGAAAGTCTTCCCATAGAAGTCATGGTGGACG |
| | | CTGTTCACAAATTAAAATATGAAAACTACACCAGCAGCTTCTTCATTCGTGACATCATCAA |
| | | ACCAGACCCTCCTAAGAACCTTCAGTTAAAACCGCTGAAGAACAGCCGGCAGGTGGAAGTT |
| | | TCCTGGGAGTACCCAGATACGTGGAGTACGCCGCACTCCTACTTCAGTTTAACCTTCTGTG |
| | | TACAAGTACAAGGAAAATCAAAAAGAGAGAAGAAAGATCGTGTCTTCACTGACAAAACATC |
| | | TGCCACGGTCATCTGCCGTAAGAACGCTTCCATCTCGGTTCGAGCCCAGGACCGCTACTAC |
| | | AGCAGCAGCTGGAGTGAGTGGGCATCTGTTCCCTGCAGTGGTGGCGGCGGCGGCGGCAGCC |
| | | GCAACCTTCCTGTGGCCACGCCGGACCCTGGCATGTTCCCGTGCCTTCACCACTCGCAAAA |
| | | TCTTCTTCGTGCTGTTTCTAACATGCTGCAGAAGGCGCGGCAAACTTTAGAATTCTACCCG |
| | | TGCACTTCTGAAGAAATAGACCATGAAGATATCACCAAAGATAAAACCAGCACGGTGGAGG |
| | | CCTGCCTTCCTTTAGAACTTACTAAGAACGAAAGTTGCCTTAACAGCCGTGAGACCAGCTT |
| | | CATCACCAATGGCAGCTGCCTTGCTAGCAGGAAGACCAGCTTCATGATGGCGCTGTGCCTT |
| | | TCTTCCATCTATGAAGATCTTAAGATGTACCAAGTAGAATTTAAAACCATGAATGCCAAAT |
| | | TATTAATGGACCCCAAGCGGCAGATATTCCTCGACCAAAACATGCTGGCTGTCATTGATGA |
| | | GCTCATGCAAGCATTAAACTTCAACTCAGAAACTGTTCCCCAGAAGTCATCTTTAGAAGAA |
| | | CCAGATTTCTACAAAACAAAAATAAAACTCTGCATTCTTCTTCATGCCTTCCGCATCCGTG |
| | | CTGTCACCATTGACCGTGTCATGTCCTACTTAAATGCTTCTTGATAATAGGCTGGAGCCTC |
| | | GGTGGCCATGCTTCTTGCCCCTTGGGCCTCCCCCCAGCCCCTCCTCCCCTTCCTGCACCCG |
| | | TACCCCCCAAACACCATTGTCACACTCCAGTGGTCTTTGAATAAAGTCTGAGTGGGCGGC |
| 1090 | hIL12AB_011 | TCAAGCTTTTGGACCCTCGTACAGAAGCTAATACGACTCACTATAGGGAAATAAGAGAGAA |
| | | AAGAAGAGTAAGAAGAAATATAAGAGCCACCATGTGCCACCAGCAGCTGGTGATCAGCTGG |
| | | TTCAGCCTGGTGTTCCTGGCCAGCCCCCTGGTGGCCATCTGGGAGCTGAAGAAGGACGTGT |
| | | ACGTGGTGGAGTTGGATTGGTACCCGGACGCGCCGGGGGAGATGGTGGTGCTGACGTGCGA |
| | | CACGCCGGAGGAGGACGGGATCACGTGGACGCTGGACCAGAGCAGCGAGGTGCTGGGGAGC |
| | | GGGAAGACGCTGACGATCCAGGTGAAGGAGTTCGGGGACGCGGGGCAGTACACGTGCCACA |
| | | AGGGGGGGGAGGTGCTGAGCCACAGCCTGCTGCTGCTGCACAAGAAGGAGGACGGGATCTG |
| | | GAGCACAGATATCCTGAAGGACCAGAAGGAGCCGAAGAACAAGACGTTCCTGAGGTGCGAG |
| | | GCGAAGAACTACAGCGGGAGGTTCACGTGCTGGTGGCTGACGACGATCAGCACGGACCTGA |
| | | CGTTCAGCGTGAAGAGCAGCAGGGGGAGCAGCGACCCGCAGGGGGTGACGTGCGGGGCGGC |
| | | GACGCTGAGCGCGGAGAGGGTGAGGGGTGACAACAAGGAGTACGAGTACAGCGTGGAGTGC |
| | | CAGGAAGATAGCGCGTGCCCGGCGGCGGAGGAGAGCCTGCCGATCGAGGTGATGGTGGACG |
| | | CGGTGCACAAGCTGAAGTACGAGAACTACACGAGCAGCTTCTTCATCAGAGATATCATCAA |
| | | GCCGGACCCGCCGAAGAACCTGCAGCTGAAGCCGCTGAAGAACAGCAGGCAGGTGGAGGTG |
| | | AGCTGGGAGTACCCAGATACGTGGAGCACGCCGCACAGCTACTTCAGCCTGACGTTCTGCG |
| | | TGCAGGTGCAGGGGAAGAGCAAGAGGGAGAAGAAAGATAGGGTGTTCACAGATAAGACGAG |
| | | CGCGACGGTGATCTGCAGGAAGAACGCGAGCATCAGCGTGAGGGCGCAAGATAGGTACTAC |
| | | AGCAGCAGCTGGAGCGAGTGGGCGAGCGTGCCGTGCAGCGGGGGGGGGGGGGGGGGGAGCA |
| | | GGAACCTGCCGGTGGCGACGCCGGACCCGGGGATGTTCCCGTGCCTGCACCACAGCCAGAA |
| | | CCTGCTGAGGGCGGTGAGCAACATGCTGCAGAAGGCGAGGCAGACGCTGGAGTTCTACCCG |
| | | TGCACGAGCGAGGAGATCGACCACGAAGATATCACGAAAGATAAGACGAGCACGGTGGAGG |
| | | CGTGCCTGCCGCTGGAGCTGACGAAGAACGAGAGCTGCCTGAACAGCAGGGAGACGAGCTT |
| | | CATCACGAACGGGAGCTGCCTGGCGAGCAGGAAGACGAGCTTCATGATGGCGCTGTGCCTG |
| | | AGCAGCATCTACGAGGACCTGAAGATGTACCAGGTGGAGTTCAAGACGATGAACGCGAAGC |
| | | TGCTGATGGACCCGAAGAGGCAGATCTTCCTGGACCAGAACATGCTGGCGGTGATCGACGA |
| | | GCTGATGCAGGCGCTGAACTTCAACAGCGAGACGGTGCCGCAGAAGAGCAGCCTGGAGGAG |
| | | CCAGATTTCTACAAGACGAAGATCAAGCTGTGCATCCTGCTGCACGCGTTCAGGATCAGGG |
| | | CGGTGACGATCGACAGGGTGATGAGCTACCTGAACGCGAGCTGATAATAGGCTGGAGCCTC |
| | | GGTGGCCATGCTTCTTGCCCCTTGGGCCTCCCCCCAGCCCCTCCTCCCCTTCCTGCACCCG |
| | | TACCCCCCAAACACCATTGTCACACTCCAGTGGTCTTTGAATAAAGTCTGAGTGGGCGGC |
| 1091 | hIL12AB_012 | TCAAGCTTTTGGACCCTCGTACAGAAGCTAATACGACTCACTATAGGGAAATAAGAGAGAA |
| | | AAGAAGAGTAAGAAGAAATATAAGAGCCACCATGTGCCATCAGCAGCTGGTGATCAGCTGG |
| | | TTCAGCCTCGTGTTTCTGGCCAGCCCCCTGGTGGCCATTTGGGAACTCAAGAAGGACGTGT |
| | | ACGTTGTGGAACTCGACTGGTACCCTGACGCCCCAGGCGAAATGGTGGTCTTAACCTGCGA |
| | | CACCCCTGAGGAGGACGGAATCACCTGGACCTTGGACCAGAGCTCCGAGGTCCTCGGCAGT |
| | | GGCAAGACCCTGACCATACAGGTGAAAGAATTTGGAGACGCAGGGCAATACACATGTCACA |
| | | AGGGCGGGGAGGTTCTTTCTCACTCCCTTCTGCTTCTACATAAAAAGGAAGACGGAATTTG |
| | | GTCTACCGACATCCTCAAGGACCAAAAGGAGCCTAAGAATAAAACCTTCTTACGCTGTGAA |
| | | GCTAAAAACTACAGCGGCAGATTCACTTGCTGGTGGCTCACCACCATTTCTACCGACCTGA |
| | | CCTTCTCGGTGAAGTCTTCAAGGGGCTCTAGTGATCCACAGGGAGTGACATGCGGGGCCGC |
| | | CACACTGAGCGCTGAACGGGTGAGGGGCGATAACAAGGAGTATGAATACTCTGTCGAGTGT |
| | | CAGGAGGATTCAGCTTGTCCCGCAGCTGAAGAGTCACTCCCCATAGAGGTTATGGTCGATG |
| | | CTGTGCATAAACTGAAGTACGAAAACTACACCAGCAGCTTCTTCATTAGAGATATTATAAA |
| | | ACCTGACCCCCCCAAGAACCTGCAACTTAAACCCCTGAAAAACTCTCGGCAGGTCGAAGTT |
| | | AGCTGGGAGTACCCTGATACTTGGTCCACCCCCCACTCGTACTTCTCACTGACTTTCTGTG |
| | | TGCAGGTGCAGGGCAAGAGCAAGAGAGAGAAAAAAGATCGTGTATTCACAGATAAGACCTC |
| | | TGCCACCGTGATCTGCAGAAAAAACGCTTCCATCAGTGTCAGAGCCCAAGACCGGTACTAT |
| | | AGTAGTAGCTGGAGCGAGTGGGCAAGTGTCCCCTGCTCTGGCGGCGGAGGGGGCGGCTCTC |
| | | GAAACCTCCCCGTCGCTACCCCTGATCCAGGAATGTTCCCTTGCCTGCATCACTCACAGAA |
| | | TCTGCTGAGAGCGGTCAGCAACATGCTGCAGAAAGCTAGGCAAACACTGGAGTTTTATCCT |
| | | TGTACCTCAGAGGAGATCGACCACGAGGATATTACCAAAGATAAGACCAGCACGGTGGAGG |
| | | CCTGCTTGCCCCTGGAACTGACAAAGAATGAATCCTGCCTTAATAGCCGTGAGACCTCTTT |
| | | TATAACAAACGGATCCTGCCTGGCCAGCAGGAAGACCTCCTTCATGATGGCCCTCTGCCTG |
| | | TCCTCAATCTACGAAGACCTGAAGATGTACCAGGTGGAATTTAAAACTATGAACGCCAAGC |
| | | TGTTGATGGACCCCAAGCGGCAGATCTTTCTGGATCAAAATATGCTGGCTGTGATCGACGA |
| | | ACTGATGCAGGCCCTCAACTTTAACAGCGAGACCGTGCCACAAAAGAGCAGTCTTGAGGAG |
| | | CCCGACTTCTACAAGACCAAGATCAAGCTGTGCATCCTCCTTCATGCCTTCAGGATAAGAG |
| | | CTGTCACCATCGACAGAGTCATGAGTTACCTGAATGCATCCTGATAATAGGCTGGAGCCTC |
| | | GGTGGCCATGCTTCTTGCCCCTTGGGCCTCCCCCCAGCCCCTCCTCCCCTTCCTGCACCCG |
| | | TACCCCCCAAACACCATTGTCACACTCCAGTGGTCTTTGAATAAAGTCTGAGTGGGCGGC |
| 1092 | hIL12AB_013 | TCAAGCTTTTGGACCCTCGTACAGAAGCTAATACGACTCACTATAGGGAAATAAGAGAGAA |
| | | AAGAAGAGTAAGAAGAAATATAAGAGCCACCATGTGCCACCAGCAGCTGGTCATCTCCTGG |
| | | TTCAGTCTTGTCTTCCTGGCCTCGCCGCTGGTGGCCATCTGGGAGCTGAAGAAAGACGTTT |
| | | ACGTAGTAGAGTTGGATTGGTACCCAGACGCACCTGGAGAAATGGTGGTCCTCACCTGTGA |
| | | CACGCCAGAAGAAGACGGTATCACCTGGACGCTGGACCAGAGCAGTGAAGTTCTTGGAAGT |
| | | GGAAAAACGCTGACCATACAAGTAAAAGAATTTGGAGATGCTGGCCAGTACACCTGCCACA |
| | | AAGGAGGAGAAGTTCTCAGCCACAGTTTATTATTACTTCACAAGAAAGAAGATGGCATCTG |
| | | GTCCACAGATATTTTAAAAGACCAGAAGGAGCCCAAAAATAAAACATTTCTTCGATGTGAG |
| | | GCCAAGAACTACAGTGGTCGTTTCACCTGCTGGTGGCTGACCACCATCTCCACAGACCTCA |
| | | CCTTCAGTGTAAAAAGCAGCCGTGGTTCTTCTGACCCCCAAGGAGTCACCTGTGGGGCTGC |
| | | CACGCTCTCTGCAGAAAGAGTTCGAGGTGACAACAAAGAATATGAGTACTCGGTGGAATGT |
| | | CAAGAAGATTCGGCCTGCCCAGCTGCTGAGGAGAGTCTTCCCATAGAAGTCATGGTGGATG |
| | | CTGTTCACAAATTAAAATATGAAAACTACACCAGCAGCTTCTTCATCAGAGATATCATCAA |
| | | ACCTGACCCGCCCAAGAACTTACAGCTGAAGCCGCTGAAAAACAGCCGGCAGGTAGAAGTT |
| | | TCCTGGGAGTACCCAGATACCTGGTCCACGCCGCACTCCTACTTCTCCCTCACCTTCTGTG |
| | | TACAAGTACAAGGCAAGAGCAAGAGAGAGAAGAAAGATCGTGTCTTCACAGATAAAACATC |
| | | AGCCACGGTCATCTGCAGGAAAAATGCCAGCATCTCGGTGCGGGCCCAGGACCGCTACTAC |
| | | AGCAGCAGCTGGAGTGAGTGGGCATCTGTGCCCTGCAGTGGTGGTGGGGGTGGTGGCAGCA |
| | | GAAACCTTCCTGTGGCCACTCCAGACCCTGGCATGTTCCCGTGCCTTCACCACTCCCAAAA |
| | | TTTACTTCGAGCTGTTTCTAACATGCTGCAGAAAGCACGGCAAACTTTAGAATTCTACCCG |
| | | TGCACTTCTGAAGAAATTGACCATGAAGATATCACAAAAGATAAAACCAGCACAGTGGAGG |
| | | CCTGTCTTCCTTTAGAGCTGACCAAAAATGAATCCTGCCTCAACAGCAGAGAGACCAGCTT |
| | | CATCACCAATGGCAGCTGCCTGGCCTCCAGGAAAACCAGCTTCATGATGGCGCTCTGCCTC |
| | | AGCTCCATCTATGAAGATTTGAAGATGTACCAAGTAGAATTTAAAACCATGAATGCCAAAT |
| | | TATTAATGGACCCCAAGAGGCAGATATTTTTAGATCAAAACATGCTGGCAGTTATTGATGA |
| | | GCTCATGCAAGCATTAAACTTCAACAGTGAGACGGTACCTCAAAAAAGCAGCCTTGAAGAG |
| | | CCAGATTTCTACAAAACCAAGATCAAACTCTGCATTTTACTTCATGCCTTCCGCATCCGGG |
| | | CGGTCACCATTGACCGTGTCATGTCCTACTTAAATGCCTCGTGATAATAGGCTGGAGCCTC |
| | | GGTGGCCATGCTTCTTGCCCCTTGGGCCTCCCCCCAGCCCCTCCTCCCCTTCCTGCACCCG |
| | | TACCCCCCAAACACCATTGTCACACTCCAGTGGTCTTTGAATAAAGTCTGAGTGGGCGGC |
| 1093 | hIL12AB_014 | TCAAGCTTTTGGACCCTCGTACAGAAGCTAATACGACTCACTATAGGGAAATAAGAGAGAA |
| | | AAGAAGAGTAAGAAGAAATATAAGAGCCACCATGTGCCACCAGCAGCTTGTGATTTCTTGG |
| | | TTCTCTCTTGTGTTCCTTGCTTCTCCTCTTGTGGCTATTTGGGAGTTAAAAAAGGACGTGT |
| | | ACGTGGTGGAGCTTGACTGGTACCCTGACGCACCTGGCGAGATGGTGGTGCTTACTTGTGA |
| | | CACTCCTGAGGAGGACGGCATTACTTGGACGCTTGACCAGTCTTCTGAGGTGCTTGGCTCT |
| | | GGCAAAACACTTACTATTCAGGTGAAGGAGTTCGGGGATGCTGGCCAGTACACTTGCCACA |
| | | AGGGCGGCGAGGTGCTTTCTCACTCTCTTCTTCTTCTTCACAAGAAGGAGGACGGCATTTG |
| | | GTCTACTGACATTTTAAAAGACCAGAAGGAGCCCAAGAACAAAACATTCCTTCGTTGCGAG |
| | | GCCAAGAACTACTCTGGCCGTTTCACTTGCTGGTGGCTTACTACTATTTCTACTGACCTTA |
| | | CTTTCTCTGTGAAGTCTTCTCGTGGCTCTTCTGACCCTCAGGGCGTGACTTGTGGGGCTGC |
| | | TACTCTTTCTGCTGAGCGTGTGCGTGGTGACAACAAGGAGTACGAGTACTCTGTGGAGTGC |
| | | CAGGAAGATTCTGCTTGCCCTGCTGCTGAGGAGTCTCTTCCTATTGAGGTGATGGTGGATG |
| | | CTGTGCACAAGTTAAAATACGAGAACTACACTTCTTCTTTCTTCATTCGTGACATTATTAA |
| | | GCCTGACCCTCCCAAGAACCTTCAGTTAAAACCTTTAAAAAACTCTCGTCAGGTGGAGGTG |
| | | TCTTGGGAGTACCCTGACACTTGGTCTACTCCTCACTCTTACTTCTCTCTTACTTTCTGCG |
| | | TGCAGGTGCAGGGCAAGTCTAAGCGTGAGAAGAAGGACCGTGTGTTCACTGACAAAACATC |
| | | TGCTACTGTGATTTGCAGGAAGAATGCATCTATTTCTGTGCGTGCTCAGGACCGTTACTAC |
| | | TCTTCTTCTTGGTCTGAGTGGGCTTCTGTGCCTTGCTCTGGCGGCGGCGGCGGCGGCTCCA |
| | | GAAATCTTCCTGTGGCTACTCCTGACCCTGGCATGTTCCCTTGCCTTCACCACTCTCAGAA |
| | | CCTTCTTCGTGCTGTGAGCAACATGCTTCAGAAGGCTCGTCAAACTCTTGAGTTCTACCCT |
| | | TGCACTTCTGAGGAGATTGACCACGAAGATATCACCAAAGATAAAACATCTACTGTGGAGG |
| | | CTTGCCTTCCTCTTGAGCTTACCAAGAATGAATCTTGCTTAAATTCTCGTGAGACGTCTTT |
| | | CATCACCAACGGCTCTTGCCTTGCCTCGCGCAAAACATCTTTCATGATGGCTCTTTGCCTT |
| | | TCTTCTATTTACGAAGATTTAAAAATGTACCAGGTGGAGTTCAAAACAATGAATGCAAAGC |
| | | TTCTTATGGACCCCAAGCGTCAGATTTTCCTTGACCAGAACATGCTTGCTGTGATTGACGA |
| | | GCTTATGCAGGCTTTAAATTTCAACTCTGAGACGGTGCCTCAGAAGTCTTCTCTTGAGGAG |
| | | CCTGACTTCTACAAGACCAAGATTAAGCTTTGCATTCTTCTTCATGCTTTCCGTATTCGTG |
| | | CTGTGACTATTGACCGTGTGATGTCTTACTTAAATGCTTCTTGATAATAGGCTGGAGCCTC |
| | | GGTGGCCATGCTTCTTGCCCCTTGGGCCTCCCCCCAGCCCCTCCTCCCCTTCCTGCACCCG |
| | | TACCCCCCAAACACCATTGTCACACTCCAGTGGTCTTTGAATAAAGTCTGAGTGGGCGGC |
| 1094 | hIL12AB_015 | TCAAGCTTTTGGACCCTCGTACAGAAGCTAATACGACTCACTATAGGGAAATAAGAGAGAA |
| | | AAGAAGAGTAAGAAGAAATATAAGAGCCACCATGTGTCACCAGCAGCTGGTGATCAGCTGG |
| | | TTTAGCCTGGTGTTTCTGGCCAGCCCCCTGGTGGCCATCTGGGAACTGAAGAAAGACGTGT |
| | | ACGTGGTAGAACTGGATTGGTATCCGGACGCTCCCGGCGAAATGGTGGTGCTGACCTGTGA |
| | | CACCCCCGAAGAAGACGGAATCACCTGGACCCTGGACCAGAGCAGCGAGGTGCTGGGCAGC |
| | | GGCAAAACCCTGACCATCCAAGTGAAAGAGTTTGGCGATGCCGGCCAGTACACCTGTCACA |
| | | AAGGCGGCGAGGTGCTAAGCCATTCGCTGCTGCTGCTGCACAAAAAGGAAGATGGCATCTG |
| | | GAGCACCGATATCCTGAAGGACCAGAAAGAACCCAAAAATAAGACCTTTCTAAGATGCGAG |
| | | GCCAAGAATTATAGCGGCCGTTTCACCTGCTGGTGGCTGACGACCATCAGCACCGATCTGA |
| | | CCTTCAGCGTGAAAAGCAGCAGAGGCAGCAGCGACCCCCAAGGCGTGACGTGCGGCGCCGC |
| | | CACCCTGAGCGCCGAGAGAGTGAGAGGCGACAACAAGGAGTATGAGTACAGCGTGGAGTGC |
| | | CAGGAAGATAGCGCCTGCCCCGCCGCCGAGGAGAGCCTGCCCATCGAGGTGATGGTGGATG |
| | | CCGTGCACAAGCTGAAGTATGAAAACTACACCAGCAGCTTCTTCATCAGAGATATCATCAA |
| | | ACCCGACCCCCCCAAGAACCTGCAGCTGAAGCCCCTGAAGAATAGCCGGCAGGTGGAGGTG |
| | | AGCTGGGAGTACCCCGACACCTGGAGCACCCCCCATAGCTACTTCAGCCTGACCTTCTGCG |
| | | TGCAGGTGCAGGGCAAGAGCAAGAGAGAAAAGAAAGATAGAGTGTTCACAGATAAGACCAG |
| | | CGCCACGGTGATCTGCAGAAAAAATGCCAGCATCAGCGTGAGAGCCCAAGATAGATACTAT |
| | | AGCAGCAGCTGGAGCGAATGGGCCAGCGTGCCCTGCAGCGGCGGCGGCGGCGGCGGCAGCA |
| | | GAAACCTGCCCGTGGCCACCCCCGACCCCGGCATGTTCCCCTGCCTGCACCACAGCCAAAA |
| | | CCTGCTGAGAGCCGTGAGCAACATGCTGCAGAAGGCCCGGCAGACCCTGGAATTTTACCCC |
| | | TGCACCAGCGAAGAGATCGATCATGAAGATATCACCAAAGATAAAACCAGCACCGTGGAGG |
| | | CCTGTCTGCCCCTGGAACTGACCAAGAATGAGAGCTGCCTAAATAGCAGAGAGACCAGCTT |
| | | CATAACCAATGGCAGCTGCCTGGCCAGCAGAAAGACCAGCTTTATGATGGCCCTGTGCCTG |
| | | AGCAGCATCTATGAAGACCTGAAGATGTACCAGGTGGAGTTCAAGACCATGAATGCCAAGC |
| | | TGCTGATGGATCCCAAGCGGCAGATCTTTCTGGATCAAAACATGCTGGCCGTGATCGATGA |
| | | GCTGATGCAGGCCCTGAATTTCAACAGCGAGACCGTGCCCCAAAAAAGCAGCCTGGAAGAA |
| | | CCGGATTTTTATAAAACCAAAATCAAGCTGTGCATACTGCTGCATGCCTTCAGAATCAGAG |
| | | CCGTGACCATCGATAGAGTGATGAGCTATCTGAATGCCAGCTGATAATAGGCTGGAGCCTC |
| | | GGTGGCCATGCTTCTTGCCCCTTGGGCCTCCCCCCAGCCCCTCCTCCCCTTCCTGCACCCG |
| | | TACCCCCCAAACACCATTGTCACACTCCAGTGGTCTTTGAATAAAGTCTGAGTGGGCGGC |
| 1095 | hIL12AB_016 | TCAAGCTTTTGGACCCTCGTACAGAAGCTAATACGACTCACTATAGGGAAATAAGAGAGAA |
| | | AAGAAGAGTAAGAAGAAATATAAGAGCCACCATGTGCCACCAGCAGCTGGTCATCAGCTGG |
| | | TTCAGCCTGGTCTTCCTGGCCAGCCCCCTGGTGGCCATCTGGGAGCTGAAGAAGGACGTAT |
| | | ACGTAGTGGAGTTGGATTGGTACCCAGACGCTCCTGGGGAGATGGTGGTGCTGACCTGTGA |
| | | CACCCCAGAAGAGGACGGTATCACCTGGACCCTGGACCAGAGCTCAGAAGTGCTGGGCAGT |
| | | GGAAAAACCCTGACCATCCAGGTGAAGGAGTTTGGAGATGCTGGCCAGTACACCTGCCACA |
| | | AGGGTGGTGAAGTGCTGAGCCACAGCCTGCTGCTGCTGCACAAGAAGGAGGATGGCATCTG |
| | | GAGCACAGATATCCTGAAGGACCAGAAGGAGCCCAAGAACAAGACCTTCCTTCGCTGTGAA |
| | | GCCAAGAACTACAGTGGCCGCTTCACCTGCTGGTGGCTGACCACCATCAGCACAGACCTCA |
| | | CCTTCTCGGTGAAGAGCAGCAGAGGCAGCTCAGACCCCCAGGGTGTCACCTGTGGGGCGGC |
| | | CACGCTGTCGGCGGAGAGAGTTCGAGGTGACAACAAGGAGTATGAATACTCGGTGGAGTGC |
| | | CAGGAAGATTCGGCGTGCCCGGCGGCAGAAGAGAGCCTGCCCATAGAAGTGATGGTGGATG |
| | | CTGTGCACAAGCTGAAGTATGAAAACTACACCAGCAGCTTCTTCATCAGAGATATCATCAA |
| | | GCCAGACCCGCCCAAGAACCTGCAGCTGAAGCCCCTGAAGAACAGCCGGCAGGTGGAGGTT |
| | | TCCTGGGAGTACCCAGATACGTGGAGCACCCCCCACAGCTACTTCAGCCTGACCTTCTGTG |
| | | TCCAGGTGCAGGGCAAGAGCAAGAGAGAGAAGAAAGATAGAGTCTTCACAGATAAGACCTC |
| | | GGCCACGGTCATCTGCAGAAAGAATGCCTCCATCTCGGTTCGAGCCCAAGATAGATACTAC |
| | | AGCAGCAGCTGGTCAGAATGGGCCTCGGTGCCCTGCAGTGGTGGCGGCGGCGGCGGCAGCA |
| | | GAAACCTGCCTGTTGCCACCCCAGACCCTGGGATGTTCCCCTGCCTGCACCACAGCCAGAA |
| | | CTTATTACGAGCTGTTTCTAACATGCTGCAGAAGGCCCGGCAGACCCTGGAGTTCTACCCC |
| | | TGCACCTCAGAAGAGATTGACCATGAAGATATCACCAAAGATAAGACCAGCACTGTAGAGG |
| | | CCTGCCTGCCCCTGGAGCTGACCAAGAATGAAAGCTGCCTGAACAGCAGAGAGACCAGCTT |
| | | CATCACCAATGGAAGCTGCCTGGCCAGCAGAAAGACCAGCTTCATGATGGCCCTGTGCCTG |
| | | AGCAGCATCTATGAAGACCTGAAGATGTACCAGGTGGAGTTCAAGACCATGAATGCAAAGC |
| | | TGCTGATGGACCCCAAGCGGCAGATATTTTTGGACCAGAACATGCTGGCTGTCATTGATGA |
| | | GCTGATGCAGGCCCTGAACTTCAACTCAGAAACTGTACCCCAGAAGAGCAGCCTGGAGGAG |
| | | CCAGATTTCTACAAGACCAAGATCAAGCTGTGCATCCTGCTTCATGCTTTCAGAATCAGAG |
| | | CTGTCACCATTGACCGCGTGATGAGCTACTTAAATGCCTCGTGATAATAGGCTGGAGCCTC |
| | | GGTGGCCATGCTTCTTGCCCCTTGGGCCTCCCCCCAGCCCCTCCTCCCCTTCCTGCACCCG |
| | | TACCCCCCAAACACCATTGTCACACTCCAGTGGTCTTTGAATAAAGTCTGAGTGGGCGGC |
| 1096 | hIL12AB_017 | TCAAGCTTTTGGACCCTCGTACAGAAGCTAATACGACTCACTATAGGGAAATAAGAGAGAA |
| | | AAGAAGAGTAAGAAGAAATATAAGAGCCACCATGTGCCACCAGCAGCTGGTAATCAGCTGG |
| | | TTTTCCCTCGTCTTTCTGGCATCACCCCTGGTGGCTATCTGGGAGCTGAAGAAGGACGTGT |
| | | ACGTGGTGGAGCTGGATTGGTACCCTGACGCCCCGGGGGAAATGGTGGTGTTAACCTGCGA |
| | | CACGCCTGAGGAGGACGGCATCACCTGGACGCTGGACCAGAGCAGCGAGGTGCTTGGGTCT |
| | | GGTAAAACTCTGACTATTCAGGTGAAAGAGTTCGGGGATGCCGGCCAATATACTTGCCACA |
| | | AGGGTGGCGAGGTGCTTTCTCATTCTCTGCTCCTGCTGCACAAGAAAGAAGATGGCATTTG |
| | | GTCTACTGATATTCTGAAAGACCAGAAGGAGCCCAAGAACAAGACCTTTCTGAGATGCGAG |
| | | GCTAAAAACTACAGCGGAAGATTTACCTGCTGGTGGCTGACCACAATCTCAACCGACCTGA |
| | | CATTTTCAGTGAAGTCCAGCAGAGGGAGCTCCGACCCTCAGGGCGTGACCTGCGGAGCCGC |
| | | CACTCTGTCCGCAGAAAGAGTGAGAGGTGATAATAAGGAGTACGAGTATTCAGTCGAGTGC |
| | | CAAGAAGATTCTGCCTGCCCAGCCGCCGAGGAGAGCCTGCCAATCGAGGTGATGGTAGATG |
| | | CGGTACACAAGCTGAAGTATGAGAACTACACATCCTCCTTCTTCATAAGAGATATTATCAA |
| | | GCCTGACCCACCTAAAAATCTGCAACTCAAGCCTTTGAAAAATTCACGGCAGGTGGAGGTG |
| | | AGCTGGGAGTACCCTGATACTTGGAGCACCCCCCATAGCTACTTTTCGCTGACATTCTGCG |
| | | TCCAGGTGCAGGGCAAGTCAAAGAGAGAGAAGAAGGATCGCGTGTTCACTGATAAAACAAG |
| | | CGCCACAGTGATCTGCAGAAAAAACGCTAGCATTAGCGTCAGAGCACAGGACCGGTATTAC |
| | | TCCAGCTCCTGGAGCGAATGGGCATCTGTGCCCTGCAGCGGTGGGGGCGGAGGCGGATCCA |
| | | GAAACCTCCCCGTTGCCACACCTGATCCTGGAATGTTCCCCTGTCTGCACCACAGCCAGAA |
| | | CCTGCTGAGAGCAGTGTCTAACATGCTCCAGAAGGCCAGGCAGACCCTGGAGTTTTACCCC |
| | | TGCACCAGCGAGGAAATCGATCACGAAGATATCACCAAAGATAAAACCTCCACCGTGGAGG |
| | | CCTGCCTGCCCCTGGAACTGACCAAAAACGAGAGCTGCCTGAATAGCAGGGAGACCTCCTT |
| | | CATCACCAACGGCTCATGCCTTGCCAGCCGGAAAACTAGCTTCATGATGGCCCTGTGCCTG |
| | | TCTTCGATCTATGAGGACCTGAAAATGTACCAGGTCGAATTTAAGACGATGAACGCAAAGC |
| | | TGCTGATGGACCCCAAGCGGCAGATCTTTCTGGACCAGAACATGCTGGCAGTCATAGATGA |
| | | GTTGATGCAGGCATTAAACTTCAACAGCGAGACCGTGCCTCAGAAGTCCAGCCTCGAGGAG |
| | | CCAGATTTTTATAAGACCAAGATCAAACTATGCATCCTGCTGCATGCTTTCAGGATTAGAG |
| | | CCGTCACCATCGATCGAGTCATGTCTTACCTGAATGCTAGCTGATAATAGGCTGGAGCCTC |
| | | GGTGGCCATGCTTCTTGCCCCTTGGGCCTCCCCCCAGCCCCTCCTCCCCTTCCTGCACCCG |
| | | TACCCCCCAAACACCATTGTCACACTCCAGTGGTCTTTGAATAAAGTCTGAGTGGGCGGC |
| 1097 | hIL12AB_018 | TCAAGCTTTTGGACCCTCGTACAGAAGCTAATACGACTCACTATAGGGAAATAAGAGAGAA |
| | | AAGAAGAGTAAGAAGAAATATAAGAGCCACCATGTGTCACCAACAGTTAGTAATCTCCTGG |
| | | TTTTCTCTGGTGTTTCTGGCCAGCCCCCTCGTGGCCATCTGGGAGCTTAAAAAGGACGTTT |
| | | ACGTGGTGGAGTTGGATTGGTATCCCGACGCTCCAGGCGAAATGGTCGTGCTGACCTGCGA |
| | | TACCCCTGAAGAAGACGGTATCACCTGGACGCTGGACCAGTCTTCCGAGGTGCTTGGATCT |
| | | GGCAAAACACTGACAATACAAGTTAAGGAGTTCGGGGACGCAGGGCAGTACACCTGCCACA |
| | | AAGGCGGCGAGGTCCTGAGTCACTCCCTGTTACTGCTCCACAAGAAAGAGGACGGCATTTG |
| | | GTCCACCGACATTCTGAAGGACCAGAAGGAGCCTAAGAATAAAACTTTCCTGAGATGCGAG |
| | | GCAAAAAACTATAGCGGCCGCTTTACTTGCTGGTGGCTTACAACAATCTCTACCGATTTAA |
| | | CTTTCTCCGTGAAGTCTAGCAGAGGATCCTCTGACCCGCAAGGAGTGACTTGCGGAGCCGC |
| | | CACCTTGAGCGCCGAAAGAGTCCGTGGCGATAACAAAGAATACGAGTACTCCGTGGAGTGC |
| | | CAGGAAGATTCCGCCTGCCCAGCTGCCGAGGAGTCCCTGCCCATTGAAGTGATGGTGGATG |
| | | CCGTCCACAAGCTGAAGTACGAAAACTATACCAGCAGCTTCTTCATCCGGGATATCATTAA |
| | | GCCCGACCCTCCTAAAAACCTGCAACTTAAGCCCCTAAAGAATAGTCGGCAGGTTGAGGTC |
| | | AGCTGGGAATATCCTGACACATGGAGCACCCCCCACTCTTATTTCTCCCTGACCTTCTGCG |
| | | TGCAGGTGCAGGGCAAGAGTAAACGGGAGAAAAAAGATAGGGTCTTTACCGATAAAACCAG |
| | | CGCTACGGTTATCTGTCGGAAGAACGCTTCCATCTCCGTCCGCGCTCAGGATCGTTACTAC |
| | | TCGTCCTCATGGAGCGAGTGGGCCAGCGTGCCCTGCAGCGGCGGCGGTGGAGGCGGATCCA |
| | | GAAATCTGCCTGTTGCCACACCAGACCCTGGCATGTTCCCCTGTCTGCATCATAGCCAGAA |
| | | CCTGCTCAGAGCCGTGAGCAACATGCTCCAGAAGGCCAGGCAAACTTTGGAGTTCTACCCG |
| | | TGTACATCTGAGGAAATCGATCACGAAGATATAACCAAAGATAAAACCTCTACAGTAGAGG |
| | | CTTGTTTGCCCCTGGAGTTGACCAAAAACGAGAGTTGCCTGAACAGTCGCGAGACGAGCTT |
| | | CATTACTAACGGCAGCTGTCTCGCCTCCAGAAAAACATCCTTCATGATGGCCCTGTGTCTT |
| | | TCCAGCATATACGAAGACCTGAAAATGTACCAGGTCGAGTTCAAAACAATGAACGCCAAGC |
| | | TGCTTATGGACCCCAAGCGGCAGATCTTCCTCGACCAAAACATGCTCGCTGTGATCGATGA |
| | | GCTGATGCAGGCTCTCAACTTCAATTCCGAAACAGTGCCACAGAAGTCCAGTCTGGAAGAA |
| | | CCCGACTTCTACAAGACCAAGATTAAGCTGTGTATTTTGCTGCATGCGTTTAGAATCAGAG |
| | | CCGTGACCATTGATCGGGTGATGAGCTACCTGAACGCCTCGTGATAATAGGCTGGAGCCTC |
| | | GGTGGCCATGCTTCTTGCCCCTTGGGCCTCCCCCCAGCCCCTCCTCCCCTTCCTGCACCCG |
| | | TACCCCCCAAACACCATTGTCACACTCCAGTGGTCTTTGAATAAAGTCTGAGTGGGCGGC |
| 1098 | hIL12AB_019 | TCAAGCTTTTGGACCCTCGTACAGAAGCTAATACGACTCACTATAGGGAAATAAGAGAGAA |
| | | AAGAAGAGTAAGAAGAAATATAAGAGCCACCATGTGCCACCAGCAGCTTGTCATCTCCTGG |
| | | TTTTCTCTTGTCTTCCTGGCCTCGCCGCTGGTGGCCATCTGGGAGCTGAAGAAAGACGTTT |
| | | ACGTAGTAGAGTTGGATTGGTACCCAGACGCACCTGGAGAAATGGTGGTTCTCACCTGTGA |
| | | CACTCCTGAAGAAGACGGTATCACCTGGACGCTGGACCAAAGCTCAGAAGTTCTTGGCAGT |
| | | GGAAAAACGCTGACCATACAAGTAAAAGAATTTGGGGATGCTGGCCAGTACACGTGCCACA |
| | | AAGGAGGAGAAGTTCTCAGCCACAGTTTACTTCTTCTTCACAAGAAAGAAGATGGCATCTG |
| | | GTCCACAGATATTTTAAAAGACCAGAAGGAGCCCAAGAACAAAACCTTCCTCCGCTGTGAG |
| | | GCCAAGAACTACAGTGGTCGTTTCACCTGCTGGTGGCTCACCACCATCTCCACTGACCTCA |
| | | CCTTCTCTGTAAAAAGCAGCCGTGGTTCTTCTGACCCCCAAGGAGTCACCTGTGGGGCTGC |
| | | CACGCTCTCGGCAGAAAGAGTTCGAGGTGACAACAAGGAATATGAATATTCTGTGGAATGT |
| | | CAAGAAGATTCTGCCTGCCCGGCGGCAGAAGAAAGTCTTCCCATAGAAGTCATGGTGGATG |
| | | CTGTTCACAAATTAAAATATGAAAACTACACCAGCAGCTTCTTCATTCGTGACATCATCAA |
| | | ACCAGACCCGCCCAAGAACCTTCAGTTAAAACCTTTAAAAAACAGCCGGCAGGTAGAAGTT |
| | | TCCTGGGAGTACCCAGATACGTGGTCCACGCCGCACTCCTACTTCAGTTTAACCTTCTGTG |
| | | TACAAGTACAAGGAAAATCAAAAAGAGAGAAGAAAGATCGTGTCTTCACTGACAAAACATC |
| | | TGCCACGGTCATCTGCAGGAAGAATGCCTCCATCTCGGTTCGAGCCCAGGACCGCTACTAC |
| | | AGCAGCAGCTGGAGTGAGTGGGCATCTGTTCCCTGCAGTGGTGGCGGCGGCGGCGGCAGCC |
| | | GCAACCTTCCTGTGGCCACGCCGGACCCTGGCATGTTCCCGTGCCTTCACCACTCCCAAAA |
| | | TCTTCTTCGTGCTGTTTCTAACATGCTGCAGAAGGCGCGCCAAACTTTAGAATTCTACCCG |
| | | TGCACTTCTGAAGAAATAGACCATGAAGATATCACCAAAGATAAAACCAGCACGGTGGAGG |
| | | CCTGCCTTCCTTTAGAGCTGACCAAGAATGAATCCTGCCTCAACAGCAGAGAGACCAGCTT |
| | | CATCACCAATGGCAGCTGCCTGGCCTCGCGCAAGACCAGCTTCATGATGGCGCTGTGCCTT |
| | | TCTTCCATCTATGAAGATTTAAAGATGTACCAAGTAGAATTTAAAACCATGAATGCCAAAT |
| | | TATTAATGGACCCCAAACGGCAGATATTTTTGGATCAAAACATGCTGGCTGTCATTGATGA |
| | | GCTCATGCAAGCATTAAACTTCAACTCAGAAACTGTTCCCCAGAAGTCATCTTTAGAAGAG |
| | | CCAGATTTCTACAAAACAAAAATAAAACTCTGCATTCTTCTTCATGCCTTCCGCATCCGTG |
| | | CTGTCACCATTGACCGTGTCATGTCCTACTTAAATGCTTCTTGATAATAGGCTGGAGCCTC |
| | | GGTGGCCATGCTTCTTGCCCCTTGGGCCTCCCCCCAGCCCCTCCTCCCCTTCCTGCACCCG |
| | | TACCCCCCAAACACCATTGTCACACTCCAGTGGTCTTTGAATAAAGTCTGAGTGGGCGGC |
| 1099 | hIL12AB_020 | TCAAGCTTTTGGACCCTCGTACAGAAGCTAATACGACTCACTATAGGGAAATAAGAGAGAA |
| | | AAGAAGAGTAAGAAGAAATATAAGAGCCACCATGTGCCACCAGCAGCTGGTGATCAGCTGG |
| | | TTCAGCCTGGTGTTCCTGGCTAGCCCTCTGGTGGCCATCTGGGAGCTGAAGAAGGACGTGT |
| | | ACGTGGTGGAGTTGGATTGGTACCCCGACGCTCCCGGCGAGATGGTGGTGCTGACCTGCGA |
| | | CACCCCCGAGGAGGACGGGATCACCTGGACCCTGGATCAGTCAAGCGAGGTGCTGGGAAGC |
| | | GGCAAGACCCTGACCATCCAGGTGAAGGAGTTCGGCGACGCCGGCCAATACACTTGCCACA |
| | | AGGGAGGCGAGGTGCTGTCCCACTCCCTCCTGCTGCTGCACAAAAAGGAAGACGGCATCTG |
| | | GAGCACCGACATCCTGAAAGACCAGAAGGAGCCTAAGAACAAAACATTCCTCAGATGCGAG |
| | | GCCAAGAATTACTCCGGGAGATTCACCTGTTGGTGGCTGACCACCATCAGCACAGACCTGA |
| | | CCTTCAGCGTGAAGAGCAGCAGAGGCAGCAGCGACCCCCAGGGCGTGACCTGTGGCGCCGC |
| | | CACCCTGAGCGCCGAAAGAGTGCGCGGCGACAACAAGGAGTACGAGTACTCCGTGGAATGC |
| | | CAGGAAGATAGCGCCTGCCCCGCCGCCGAGGAGAGCCTGCCCATCGAGGTGATGGTGGACG |
| | | CCGTCCACAAGCTGAAGTACGAGAACTACACCTCTAGCTTCTTCATCAGAGATATCATCAA |
| | | GCCCGATCCCCCCAAGAACCTGCAGCTGAAACCCCTGAAGAACAGCCGGCAGGTGGAGGTG |
| | | AGCTGGGAGTATCCCGACACCTGGTCCACCCCCCACAGCTATTTTAGCCTGACCTTCTGCG |
| | | TGCAAGTGCAGGGCAAGAGCAAGAGAGAGAAGAAGGACCGCGTGTTCACCGACAAAACCAG |
| | | CGCCACCGTGATCTGCAGAAAGAACGCCAGCATCAGCGTGAGGGCCCAGGATAGATACTAC |
| | | AGTTCCAGCTGGAGCGAGTGGGCCAGCGTGCCCTGCAGCGGCGGCGGCGGGGGAGGCTCGA |
| | | GAAACCTGCCCGTGGCTACCCCCGATCCCGGAATGTTCCCCTGCCTGCACCACAGCCAGAA |
| | | CCTGCTGAGGGCGGTGTCCAACATGCTTCAGAAGGCCCGGCAGACCCTGGAGTTCTACCCC |
| | | TGTACCTCTGAGGAGATCGATCATGAAGATATCACAAAAGATAAAACCAGCACCGTGGAGG |
| | | CCTGCCTGCCCCTGGAGCTGACCAAGAACGAGAGCTGCCTGAACTCCCGCGAGACCAGCTT |
| | | CATCACGAACGGCAGCTGCCTGGCCAGCAGGAAGACCTCCTTCATGATGGCCCTGTGCCTG |
| | | AGCAGCATCTACGAGGACCTGAAAATGTACCAGGTGGAGTTTAAGACCATGAACGCCAAGC |
| | | TGCTGATGGACCCCAAGCGGCAAATCTTCCTGGACCAGAACATGCTGGCAGTGATCGACGA |
| | | GCTCATGCAGGCCCTGAACTTCAATAGCGAGACGGTCCCCCAGAAGAGCAGCCTGGAGGAG |
| | | CCCGACTTTTACAAGACCAAGATCAAGCTGTGCATCCTGCTGCACGCCTTTAGAATCCGTG |
| | | CCGTGACCATTGACAGAGTGATGAGCTACCTGAATGCCAGCTGATAATAGGCTGGAGCCTC |
| | | GGTGGCCATGCTTCTTGCCCCTTGGGCCTCCCCCCAGCCCCTCCTCCCCTTCCTGCACCCG |
| | | TACCCCCCAAACACCATTGTCACACTCCAGTGGTCTTTGAATAAAGTCTGAGTGGGCGGC |
| 1100 | hIL12AB_021 | TCAAGCTTTTGGACCCTCGTACAGAAGCTAATACGACTCACTATAGGGAAATAAGAGAGAA |
| | | AAGAAGAGTAAGAAGAAATATAAGAGCCACCATGTGCCACCAGCAGCTGGTGATCAGCTGG |
| | | TTCAGCCTGGTGTTCCTGGCCAGCCCTCTGGTTGCCATCTGGGAGCTGAAGAAAGACGTGT |
| | | ACGTCGTGGAACTGGACTGGTATCCGGACGCCCCGGGCGAGATGGTGGTGCTGACCTGTGA |
| | | CACCCCCGAGGAGGACGGCATCACCTGGACGCTGGACCAATCCTCCGAGGTGCTGGGAAGC |
| | | GGCAAGACCCTGACCATCCAGGTGAAGGAATTCGGGGACGCCGGGCAGTACACCTGCCACA |
| | | AGGGGGGCGAAGTGCTGTCCCACTCGCTGCTGCTCCTGCATAAGAAGGAGGATGGAATCTG |
| | | GTCCACCGACATCCTCAAAGATCAGAAGGAGCCCAAGAACAAGACGTTCCTGCGCTGTGAA |
| | | GCCAAGAATTATTCGGGGCGATTCACGTGCTGGTGGCTGACAACCATCAGCACCGACCTGA |
| | | CGTTTAGCGTGAAGAGCAGCAGGGGGTCCAGCGACCCCCAGGGCGTGACGTGCGGCGCCGC |
| | | CACCCTCTCCGCCGAGAGGGTGCGGGGGGACAATAAGGAGTACGAGTACAGCGTGGAATGC |
| | | CAGGAGGACAGCGCCTGCCCCGCCGCGGAGGAAAGCCTCCCGATAGAGGTGATGGTGGACG |
| | | CCGTGCACAAGCTCAAGTATGAGAATTACACCAGCAGCTTTTTCATCCGGGACATTATCAA |
| | | GCCCGACCCCCCGAAGAACCTCCAGCTGAAGCCCCTGAAGAACAGCCGGCAGGTGGAAGTC |
| | | TCCTGGGAGTATCCCGACACCTGGAGCACCCCGCACAGCTACTTCTCCCTGACCTTCTGTG |
| | | TGCAGGTGCAGGGCAAGTCCAAGAGGGAAAAGAAGGACAGGGTTTTCACCGACAAGACCAG |
| | | CGCGACCGTGATCTGCCGGAAGAACGCCAGCATAAGCGTCCGCGCCCAAGATAGGTACTAC |
| | | AGCAGCTCCTGGAGCGAGTGGGCTAGCGTGCCCTGCAGCGGGGGCGGGGGTGGGGGCTCCA |
| | | GGAACCTGCCAGTGGCGACCCCCGACCCCGGCATGTTCCCCTGCCTCCATCACAGCCAGAA |
| | | CCTGCTGAGGGCCGTCAGCAATATGCTGCAGAAGGCCAGGCAGACCCTGGAATTCTACCCC |
| | | TGCACGTCGGAGGAGATCGATCACGAGGATATCACAAAAGACAAGACTTCCACCGTGGAGG |
| | | CCTGCCTGCCCCTGGAGCTCACCAAGAATGAGTCCTGTCTGAACTCCCGGGAAACCAGCTT |
| | | CATCACCAACGGGTCCTGCCTGGCCAGCAGGAAGACCAGCTTTATGATGGCCCTGTGCCTG |
| | | TCGAGCATCTACGAGGACCTGAAGATGTACCAGGTCGAGTTCAAGACAATGAACGCCAAGC |
| | | TGCTGATGGACCCCAAGAGGCAAATCTTCCTGGACCAGAATATGCTTGCCGTCATCGACGA |
| | | GCTCATGCAGGCCCTGAACTTCAACTCCGAGACCGTGCCCCAGAAGAGCAGCCTGGAGGAG |
| | | CCCGACTTCTACAAGACCAAGATCAAGCTGTGCATCCTGCTGCACGCGTTCAGGATCCGGG |
| | | CAGTCACCATCGACCGTGTGATGTCCTACCTGAACGCCAGCTGATAATAGGCTGGAGCCTC |
| | | GGTGGCCATGCTTCTTGCCCCTTGGGCCTCCCCCCAGCCCCTCCTCCCCTTCCTGCACCCG |
| | | TACCCCCCAAACACCATTGTCACACTCCAGTGGTCTTTGAATAAAGTCTGAGTGGGCGGC |
| 1101 | hIL12AB_022 | TCAAGCTTTTGGACCCTCGTACAGAAGCTAATACGACTCACTATAGGGAAATAAGAGAGAA |
| | | AAGAAGAGTAAGAAGAAATATAAGAGCCACCATGTGCCATCAGCAGCTGGTGATCAGCTGG |
| | | TTCAGCCTGGTGTTCCTCGCCTCTCCCCTGGTGGCCATCTGGGAGCTCAAAAAGGACGTGT |
| | | ACGTGGTGGAGCTCGACTGGTACCCAGACGCCCCCGGGGAGATGGTGGTGCTGACCTGCGA |
| | | CACCCCCGAAGAAGACGGCATCACGTGGACCCTCGACCAGTCCAGCGAGGTGCTGGGGAGC |
| | | GGGAAGACTCTGACCATCCAGGTCAAGGAGTTCGGGGACGCCGGGCAGTACACGTGCCACA |
| | | AGGGCGGCGAAGTCTTAAGCCACAGCCTGCTCCTGCTGCACAAGAAGGAGGACGGGATCTG |
| | | GTCCACAGACATACTGAAGGACCAGAAGGAGCCGAAGAATAAAACCTTTCTGAGGTGCGAG |
| | | GCCAAGAACTATTCCGGCAGGTTCACGTGCTGGTGGCTTACAACAATCAGCACAGACCTGA |
| | | CGTTCAGCGTGAAGTCCAGCCGCGGCAGCAGCGACCCCCAGGGGGTGACCTGCGGCGCCGC |
| | | CACCCTGAGCGCCGAGCGGGTGCGCGGGGACAACAAGGAGTACGAGTACTCCGTGGAGTGC |
| | | CAGGAAGACAGCGCCTGTCCCGCCGCCGAAGAGAGCCTGCCTATCGAGGTCATGGTAGATG |
| | | CAGTGCATAAGCTGAAGTACGAGAACTATACGAGCAGCTTTTTCATACGCGACATCATCAA |
| | | GCCCGACCCCCCCAAGAACCTGCAGCTTAAGCCCCTGAAGAATAGCCGGCAGGTGGAGGTC |
| | | TCCTGGGAGTACCCCGACACCTGGTCAACGCCCCACAGCTACTTCTCCCTGACCTTTTGTG |
| | | TCCAAGTCCAGGGAAAGAGCAAGAGGGAGAAGAAAGATCGGGTGTTCACCGACAAGACCTC |
| | | CGCCACGGTGATCTGCAGGAAGAACGCCAGCATCTCCGTGAGGGCGCAAGACAGGTACTAC |
| | | TCCAGCAGCTGGTCCGAATGGGCCAGCGTGCCCTGCTCCGGCGGCGGGGGCGGCGGCAGCC |
| | | GAAACCTACCCGTGGCCACGCCGGATCCCGGCATGTTTCCCTGCCTGCACCACAGCCAGAA |
| | | CCTCCTGAGGGCCGTGTCCAACATGCTGCAGAAGGCCAGGCAGACTCTGGAGTTCTACCCC |
| | | TGCACGAGCGAGGAGATCGATCACGAGGACATCACCAAGGATAAGACCAGCACTGTGGAGG |
| | | CCTGCCTTCCCCTGGAGCTGACCAAGAACGAGAGCTGTCTGAACTCCAGGGAGACCTCATT |
| | | CATCACCAACGGCTCCTGCCTGGCCAGCAGGAAAACCAGCTTCATGATGGCCTTGTGTCTC |
| | | AGCTCCATCTACGAGGACCTGAAGATGTATCAGGTCGAGTTCAAGACAATGAACGCCAAGC |
| | | TGCTGATGGACCCCAAAAGGCAGATCTTCCTGGACCAGAACATGCTGGCCGTCATCGACGA |
| | | GCTGATGCAGGCCCTGAACTTCAACAGCGAGACGGTGCCCCAGAAAAGCTCCCTGGAGGAG |
| | | CCCGACTTCTACAAGACCAAGATCAAGCTGTGCATCCTGCTGCACGCCTTCAGGATCAGGG |
| | | CAGTGACCATCGACCGGGTGATGTCATACCTTAACGCCAGCTGATAATAGGCTGGAGCCTC |
| | | GGTGGCCATGCTTCTTGCCCCTTGGGCCTCCCCCCAGCCCCTCCTCCCCTTCCTGCACCCG |
| | | TACCCCCCAAACACCATTGTCACACTCCAGTGGTCTTTGAATAAAGTCTGAGTGGGCGGC |
| 1102 | hIL12AB_023 | TCAAGCTTTTGGACCCTCGTACAGAAGCTAATACGACTCACTATAGGGAAATAAGAGAGAA |
| | | AAGAAGAGTAAGAAGAAATATAAGAGCCACCATGTGCCATCAGCAGCTGGTGATCTCCTGG |
| | | TTCAGCCTGGTGTTTCTGGCCTCGCCCCTGGTCGCCATCTGGGAGCTGAAGAAAGACGTGT |
| | | ACGTCGTCGAACTGGACTGGTACCCCGACGCCCCCGGGGAGATGGTGGTGCTGACCTGCGA |
| | | CACGCCGGAGGAGGACGGCATCACCTGGACCCTGGATCAAAGCAGCGAGGTGCTGGGCAGC |
| | | GGCAAGACCCTGACCATCCAAGTGAAGGAATTCGGCGATGCCGGCCAGTACACCTGTCACA |
| | | AAGGGGGCGAGGTGCTCAGCCACAGCCTGCTGCTGCTGCACAAGAAGGAGGATGGCATCTG |
| | | GAGCACCGATATCCTGAAGGACCAGAAAGAGCCCAAGAACAAGACGTTCCTGAGGTGCGAG |
| | | GCCAAGAACTACAGCGGTAGGTTCACGTGTTGGTGGCTGACCACCATCAGCACCGACCTGA |
| | | CGTTCAGCGTGAAGAGCTCCAGGGGCAGCTCCGACCCACAGGGGGTGACGTGCGGGGCCGC |
| | | AACCCTCAGCGCCGAAAGGGTGCGGGGGGACAACAAGGAGTACGAATACTCCGTGGAGTGC |
| | | CAGGAAGATTCGGCCTGCCCCGCCGCGGAGGAGAGCCTCCCCATCGAGGTAATGGTGGACG |
| | | CCGTGCATAAGCTGAAGTACGAGAACTACACCAGCTCGTTCTTCATCCGAGACATCATCAA |
| | | ACCCGACCCGCCCAAAAATCTGCAGCTCAAGCCCCTGAAGAACTCCAGGCAGGTGGAGGTG |
| | | AGCTGGGAGTACCCCGACACCTGGTCCACCCCGCACAGCTACTTCTCCCTGACATTCTGCG |
| | | TGCAGGTGCAGGGCAAGAGCAAGCGGGAGAAGAAGGACAGGGTGTTCACCGACAAGACGAG |
| | | CGCCACCGTGATCTGCCGAAAGAACGCCAGCATCTCGGTGCGCGCCCAGGATAGGTACTAT |
| | | TCCAGCTCCTGGAGCGAGTGGGCCTCGGTACCCTGCAGCGGCGGCGGGGGCGGCGGCAGTA |
| | | GGAATCTGCCCGTGGCTACCCCGGACCCGGGCATGTTCCCCTGCCTCCACCACAGCCAGAA |
| | | CCTGCTGAGGGCCGTGAGCAACATGCTGCAGAAGGCCAGACAGACGCTGGAGTTCTACCCC |
| | | TGCACGAGCGAGGAGATCGACCACGAGGACATCACCAAGGATAAAACTTCCACCGTCGAGG |
| | | CCTGCCTGCCCTTGGAGCTGACCAAGAATGAATCCTGTCTGAACAGCAGGGAGACCTCGTT |
| | | TATCACCAATGGCAGCTGCCTCGCCTCCAGGAAGACCAGCTTCATGATGGCCCTCTGTCTG |
| | | AGCTCCATCTATGAGGACCTGAAGATGTACCAGGTGGAGTTCAAGACCATGAACGCGAAGC |
| | | TGCTGATGGACCCCAAGAGGCAGATCTTCCTGGATCAGAATATGCTGGCGGTGATCGACGA |
| | | GCTCATGCAGGCCCTCAATTTCAATAGCGAGACAGTGCCCCAGAAGTCCTCCCTGGAGGAG |
| | | CCCGACTTCTACAAGACCAAGATCAAGCTGTGTATCCTGCTGCACGCCTTCCGGATCCGGG |
| | | CCGTCACCATCGACCGGGTCATGAGCTACCTCAATGCCAGCTGATAATAGGCTGGAGCCTC |
| | | GGTGGCCATGCTTCTTGCCCCTTGGGCCTCCCCCCAGCCCCTCCTCCCCTTCCTGCACCCG |
| | | TACCCCCCAAACACCATTGTCACACTCCAGTGGTCTTTGAATAAAGTCTGAGTGGGCGGC |
| 1103 | hIL12AB_024 | TCAAGCTTTTGGACCCTCGTACAGAAGCTAATACGACTCACTATAGGGAAATAAGAGAGAA |
| | | AAGAAGAGTAAGAAGAAATATAAGAGCCACCATGTGCCACCAGCAGCTGGTGATCTCCTGG |
| | | TTCTCCCTGGTGTTCCTGGCCTCGCCCCTGGTGGCCATCTGGGAGCTGAAGAAGGACGTGT |
| | | ACGTCGTGGAGCTCGACTGGTACCCCGACGCCCCTGGCGAGATGGTGGTGCTGACCTGCGA |
| | | CACCCCAGAGGAGGATGGCATCACCTGGACCCTGGATCAGTCCTCCGAGGTGCTGGGCTCC |
| | | GGCAAGACGCTGACCATCCAAGTGAAGGAGTTCGGTGACGCCGGACAGTATACCTGCCATA |
| | | AGGGCGGCGAGGTCCTGTCCCACAGCCTCCTCCTCCTGCATAAGAAGGAGGACGGCATCTG |
| | | GAGCACCGACATCCTGAAGGACCAGAAGGAGCCCAAGAACAAGACCTTTCTGAGGTGCGAG |
| | | GCCAAGAACTACAGCGGCCGATTCACCTGCTGGTGGCTCACCACCATATCCACCGACCTGA |
| | | CTTTCTCCGTCAAGTCCTCCCGGGGGTCCAGCGACCCCCAGGGAGTGACCTGCGGCGCCGC |
| | | CACCCTCAGCGCCGAGCGGGTGCGGGGGGACAACAAGGAGTACGAATACTCCGTCGAGTGC |
| | | CAGGAGGACTCCGCCTGCCCGGCCGCCGAGGAGAGCCTGCCCATCGAGGTGATGGTCGACG |
| | | CGGTGCACAAGCTGAAGTACGAGAACTACACCAGCAGTTTCTTCATCAGGGATATCATCAA |
| | | GCCAGATCCCCCGAAGAATCTGCAACTGAAGCCGCTGAAAAACTCACGACAGGTGGAGGTG |
| | | AGCTGGGAGTACCCCGACACGTGGAGCACCCCACATTCCTACTTCAGCCTGACCTTCTGCG |
| | | TGCAGGTCCAGGGCAAGAGCAAGCGGGAGAAGAAGGACAGGGTGTTCACGGATAAGACCAG |
| | | TGCCACCGTGATCTGCAGGAAGAACGCCTCTATTAGCGTGAGGGCCCAGGATCGGTATTAC |
| | | TCCTCGAGCTGGAGCGAATGGGCCTCCGTGCCCTGCAGTGGGGGGGGTGGAGGCGGGAGCA |
| | | GGAACCTGCCCGTAGCAACCCCCGACCCCGGGATGTTCCCCTGTCTGCACCACTCGCAGAA |
| | | CCTGCTGCGCGCGGTGAGCAACATGCTCCAAAAAGCCCGTCAGACCTTAGAGTTCTACCCC |
| | | TGCACCAGCGAAGAAATCGACCACGAAGACATCACCAAGGACAAAACCAGCACCGTGGAGG |
| | | CGTGCCTGCCGCTGGAGCTGACCAAGAACGAGAGCTGCCTCAACTCCAGGGAGACCAGCTT |
| | | TATCACCAACGGCTCGTGCCTAGCCAGCCGGAAAACCAGCTTCATGATGGCCCTGTGCCTG |
| | | AGCTCCATTTACGAGGACCTGAAGATGTATCAGGTGGAGTTCAAGACCATGAATGCCAAAC |
| | | TCCTGATGGACCCCAAGAGGCAGATCTTCCTGGACCAGAACATGCTCGCGGTGATCGATGA |
| | | GCTGATGCAGGCCCTGAACTTTAATAGCGAGACCGTGCCCCAGAAAAGCAGCCTGGAGGAG |
| | | CCGGACTTCTACAAGACCAAAATCAAGCTGTGCATCCTGCTCCACGCCTTCCGCATCCGGG |
| | | CCGTGACCATCGACAGGGTGATGAGCTACCTGAACGCCAGCTGATAATAGGCTGGAGCCTC |
| | | GGTGGCCATGCTTCTTGCCCCTTGGGCCTCCCCCCAGCCCCTCCTCCCCTTCCTGCACCCG |
| | | TACCCCCCAAACACCATTGTCACACTCCAGTGGTCTTTGAATAAAGTCTGAGTGGGCGGC |
| 1104 | hIL12AB_025 | TCAAGCTTTTGGACCCTCGTACAGAAGCTAATACGACTCACTATAGGGAAATAAGAGAGAA |
| | | AAGAAGAGTAAGAAGAAATATAAGAGCCACCATGTGCCATCAGCAGCTGGTGATTTCCTGG |
| | | TTCTCCCTGGTGTTCCTGGCCAGCCCCCTCGTGGCGATCTGGGAGCTAAAGAAGGACGTGT |
| | | ACGTGGTGGAGCTGGACTGGTACCCGGACGCACCCGGCGAGATGGTCGTTCTGACCTGCGA |
| | | TACGCCAGAGGAGGACGGCATCACCTGGACCCTCGATCAGAGCAGCGAGGTCCTGGGGAGC |
| | | GGAAAGACCCTGACCATCCAGGTCAAGGAGTTCGGCGACGCCGGCCAGTACACCTGCCACA |
| | | AAGGTGGCGAGGTCCTGAGCCACTCGCTGCTGCTCCTGCATAAGAAGGAGGACGGAATCTG |
| | | GAGCACAGACATCCTGAAAGACCAGAAGGAGCCCAAGAACAAGACCTTCCTGAGGTGCGAG |
| | | GCCAAGAACTACAGCGGGCGCTTCACGTGCTGGTGGCTGACCACCATCAGCACGGACCTCA |
| | | CCTTCTCCGTGAAGAGCAGCCGGGGATCCAGCGATCCCCAAGGCGTCACCTGCGGCGCGGC |
| | | CACCCTGAGCGCGGAGAGGGTCAGGGGCGATAATAAGGAGTATGAGTACAGCGTGGAGTGC |
| | | CAGGAGGACAGCGCCTGCCCGGCCGCCGAGGAGTCCCTGCCAATCGAAGTGATGGTCGACG |
| | | CCGTGCACAAGCTGAAGTACGAGAACTACACCAGCAGCTTCTTCATCCGGGATATCATCAA |
| | | GCCCGATCCCCCGAAGAACCTGCAGCTGAAGCCCCTCAAGAACAGCCGGCAGGTGGAGGTG |
| | | AGTTGGGAGTACCCCGACACCTGGTCAACGCCCCACAGCTACTTCTCCCTGACCTTCTGTG |
| | | TGCAGGTGCAGGGAAAGAGCAAGAGGGAGAAGAAAGACCGGGTCTTCACCGACAAGACCAG |
| | | CGCCACGGTGATCTGCAGGAAGAACGCAAGCATCTCCGTGAGGGCCCAGGACAGGTACTAC |
| | | AGCTCCAGCTGGTCCGAATGGGCCAGCGTGCCCTGTAGCGGCGGCGGGGGCGGTGGCAGCC |
| | | GCAACCTCCCAGTGGCCACCCCCGACCCCGGCATGTTCCCCTGCCTGCACCACAGCCAGAA |
| | | TCTGCTGAGGGCCGTGAGTAACATGCTGCAGAAGGCAAGGCAAACCCTCGAATTCTATCCC |
| | | TGCACCTCCGAGGAGATCGACCACGAGGATATCACCAAGGACAAGACCAGCACCGTCGAGG |
| | | CCTGTCTCCCCCTGGAGCTGACCAAGAATGAGAGCTGCCTGAACAGCCGGGAGACCAGCTT |
| | | CATCACCAACGGGAGCTGCCTGGCCTCCAGGAAGACCTCGTTCATGATGGCGCTGTGCCTC |
| | | TCAAGCATATACGAGGATCTGAAGATGTACCAGGTGGAGTTTAAGACGATGAACGCCAAGC |
| | | TGCTGATGGACCCGAAGAGGCAGATCTTCCTGGACCAGAACATGCTGGCCGTGATAGACGA |
| | | GCTCATGCAGGCCCTGAACTTCAACTCCGAGACCGTGCCGCAGAAGTCATCCCTCGAGGAG |
| | | CCCGACTTCTATAAGACCAAGATCAAGCTGTGCATCCTGCTCCACGCCTTCCGGATAAGGG |
| | | CCGTGACGATCGACAGGGTGATGAGCTACCTTAACGCCAGCTGATAATAGGCTGGAGCCTC |
| | | GGTGGCCATGCTTCTTGCCCCTTGGGCCTCCCCCCAGCCCCTCCTCCCCTTCCTGCACCCG |
| | | TACCCCCCAAACACCATTGTCACACTCCAGTGGTCTTTGAATAAAGTCTGAGTGGGCGGC |
| 1105 | hIL12AB_026 | TCAAGCTTTTGGACCCTCGTACAGAAGCTAATACGACTCACTATAGGGAAATAAGAGAGAA |
| | | AAGAAGAGTAAGAAGAAATATAAGAGCCACCATGTGCCACCAGCAGCTCGTGATCAGCTGG |
| | | TTCTCCCTGGTGTTTCTCGCCAGCCCCCTGGTGGCCATCTGGGAGCTGAAGAAGGACGTGT |
| | | ACGTGGTGGAGCTGGACTGGTACCCTGACGCCCCGGGGGAGATGGTCGTGCTGACCTGCGA |
| | | CACCCCCGAAGAGGACGGTATCACCTGGACCCTGGACCAGTCCAGCGAGGTGCTGGGCAGC |
| | | GGCAAGACCCTGACTATTCAAGTCAAGGAGTTCGGAGACGCCGGCCAGTACACCTGCCACA |
| | | AGGGTGGAGAGGTGTTATCACACAGCCTGCTGCTGCTGCACAAGAAGGAAGACGGGATCTG |
| | | GAGCACCGACATCCTGAAGGACCAGAAGGAGCCCAAAAACAAGACCTTCCTGCGGTGCGAG |
| | | GCCAAGAACTATTCGGGCCGCTTTACGTGCTGGTGGCTGACCACCATCAGCACTGATCTCA |
| | | CCTTCAGCGTGAAGTCCTCCCGGGGGTCGTCCGACCCCCAGGGGGTGACCTGCGGGGCCGC |
| | | CACCCTGTCCGCCGAGAGAGTGAGGGGCGATAATAAGGAGTACGAGTACAGCGTTGAGTGC |
| | | CAGGAAGATAGCGCCTGTCCCGCCGCCGAGGAGAGCCTGCCCATCGAGGTGATGGTGGACG |
| | | CCGTCCACAAGCTGAAGTATGAGAACTACACCTCAAGCTTCTTCATCAGGGACATCATCAA |
| | | ACCCGATCCGCCCAAGAATCTGCAGCTGAAGCCCCTGAAAAATAGCAGGCAGGTGGAGGTG |
| | | AGCTGGGAGTACCCCGACACCTGGTCCACCCCCCATAGCTATTTCTCCCTGACGTTCTGCG |
| | | TGCAGGTGCAAGGGAAGAGCAAGCGGGAGAAGAAGGACCGGGTGTTCACCGACAAGACCTC |
| | | CGCCACCGTGATCTGTAGGAAGAACGCGTCGATCTCGGTCAGGGCCCAGGACAGGTATTAC |
| | | AGCAGCAGCTGGAGCGAGTGGGCGAGCGTGCCCTGCTCGGGCGGCGGCGGCGGCGGGAGCA |
| | | GAAATCTGCCCGTGGCCACCCCAGACCCCGGAATGTTCCCCTGCCTGCACCATTCGCAGAA |
| | | CCTCCTGAGGGCCGTGAGCAACATGCTGCAGAAGGCCCGCCAGACGCTGGAGTTCTACCCC |
| | | TGCACGAGCGAGGAGATCGACCACGAAGACATCACCAAGGACAAAACCAGCACCGTGGAGG |
| | | CCTGCCTGCCCCTGGAGCTGACCAAAAACGAATCCTGCCTCAACAGCCGGGAGACCAGCTT |
| | | CATCACCAACGGCAGCTGCCTGGCCAGCCGAAAGACCTCCTTCATGATGGCCCTCTGCCTG |
| | | AGCAGCATCTATGAGGATCTGAAGATGTATCAGGTGGAGTTCAAGACCATGAATGCCAAGC |
| | | TGCTGATGGACCCCAAGAGGCAGATATTCCTGGACCAGAATATGCTGGCCGTGATCGACGA |
| | | GCTGATGCAGGCCCTGAACTTCAACAGCGAGACCGTCCCCCAGAAGTCCAGCCTGGAGGAG |
| | | CCGGACTTTTACAAAACGAAGATCAAGCTGTGCATACTGCTGCACGCCTTCAGGATCCGGG |
| | | CCGTGACAATCGACAGGGTGATGTCCTACCTGAACGCCAGCTGATAATAGGCTGGAGCCTC |
| | | GGTGGCCATGCTTCTTGCCCCTTGGGCCTCCCCCCAGCCCCTCCTCCCCTTCCTGCACCCG |
| | | TACCCCCCAAACACCATTGTCACACTCCAGTGGTCTTTGAATAAAGTCTGAGTGGGCGGC |
| 1106 | hIL12AB_027 | TCAAGCTTTTGGACCCTCGTACAGAAGCTAATACGACTCACTATAGGGAAATAAGAGAGAA |
| | | AAGAAGAGTAAGAAGAAATATAAGAGCCACCATGTGTCACCAGCAGCTGGTGATCAGCTGG |
| | | TTCTCCCTGGTGTTCCTGGCCAGCCCCCTGGTGGCCATCTGGGAGCTCAAGAAGGACGTCT |
| | | ACGTCGTGGAGCTGGATTGGTACCCCGACGCTCCCGGGGAGATGGTGGTGCTGACCTGCGA |
| | | CACCCCCGAGGAGGACGGCATCACCTGGACGCTGGACCAGAGCTCAGAGGTGCTGGGAAGC |
| | | GGAAAGACACTGACCATCCAGGTGAAGGAGTTCGGGGATGCCGGGCAGTATACCTGCCACA |
| | | AGGGCGGCGAAGTGCTGAGCCATTCCCTGCTGCTGCTGCACAAGAAGGAGGACGGCATATG |
| | | GTCCACCGACATCCTGAAGGATCAGAAGGAGCCGAAGAATAAAACCTTCCTGAGGTGCGAG |
| | | GCCAAGAATTACAGCGGCCGATTCACCTGCTGGTGGCTGACCACCATCAGCACCGACCTGA |
| | | CCTTCAGTGTGAAGTCCTCACGGGGCAGCTCAGATCCCCAGGGCGTGACCTGCGGGGCCGC |
| | | GACACTCAGCGCCGAGCGGGTGAGGGGTGATAACAAGGAGTACGAGTATTCTGTGGAGTGC |
| | | CAGGAAGACTCCGCCTGTCCCGCCGCCGAGGAGTCCCTGCCCATCGAGGTGATGGTGGACG |
| | | CCGTGCATAAACTGAAGTACGAGAACTACACCTCCAGCTTCTTCATCCGGGATATAATCAA |
| | | GCCCGACCCTCCGAAAAACCTGCAGCTGAAGCCCCTTAAAAACAGCCGGCAGGTGGAGGTG |
| | | AGCTGGGAGTACCCCGACACCTGGAGCACCCCCCATAGCTATTTCAGCCTGACCTTCTGCG |
| | | TGCAGGTGCAGGGGAAGTCCAAGCGCGAGAAAAAGGACCGGGTGTTCACCGACAAGACGAG |
| | | CGCCACCGTGATCTGCCGGAAGAACGCCAGTATAAGCGTAAGGGCCCAGGATAGGTACTAC |
| | | AGCTCCAGCTGGTCGGAGTGGGCCTCCGTGCCCTGTTCCGGCGGCGGGGGGGGTGGCAGCA |
| | | GGAACCTCCCCGTGGCCACGCCGGACCCCGGCATGTTCCCGTGCCTGCACCACTCCCAAAA |
| | | CCTCCTGCGGGCCGTCAGCAACATGCTGCAAAAGGCGCGGCAGACCCTGGAGTTTTACCCC |
| | | TGTACCTCCGAAGAGATCGACCACGAGGATATCACCAAGGATAAGACCTCCACCGTGGAGG |
| | | CCTGTCTCCCCCTGGAGCTGACCAAGAACGAGAGCTGTCTTAACAGCAGAGAGACCTCGTT |
| | | CATAACGAACGGCTCCTGCCTCGCTTCCAGGAAGACGTCGTTCATGATGGCGCTGTGCCTG |
| | | TCCAGCATCTACGAGGACCTGAAGATGTATCAGGTCGAGTTCAAAACCATGAACGCCAAGC |
| | | TGCTGATGGACCCCAAGAGGCAGATCTTCCTGGACCAGAACATGCTCGCCGTGATCGACGA |
| | | GCTGATGCAGGCCCTGAACTTCAACAGCGAAACCGTGCCCCAGAAGTCAAGCCTGGAGGAG |
| | | CCGGACTTCTATAAGACCAAGATCAAGCTGTGTATCCTGCTACACGCTTTTCGTATCCGGG |
| | | CCGTGACCATCGACAGGGTTATGTCGTACTTGAACGCCAGCTGATAATAGGCTGGAGCCTC |
| | | GGTGGCCATGCTTCTTGCCCCTTGGGCCTCCCCCCAGCCCCTCCTCCCCTTCCTGCACCCG |
| | | TACCCCCCAAACACCATTGTCACACTCCAGTGGTCTTTGAATAAAGTCTGAGTGGGCGGC |
| 1107 | hIL12AB_028 | TCAAGCTTTTGGACCCTCGTACAGAAGCTAATACGACTCACTATAGGGAAATAAGAGAGAA |
| | | AAGAAGAGTAAGAAGAAATATAAGAGCCACCATGTGCCACCAACAGCTCGTGATCAGCTGG |
| | | TTCAGCCTGGTGTTCCTGGCCAGCCCGCTGGTGGCCATCTGGGAGCTGAAGAAGGACGTGT |
| | | ACGTGGTGGAGCTGGACTGGTACCCCGACGCCCCCGGCGAGATGGTGGTCCTGACCTGCGA |
| | | CACGCCGGAAGAGGACGGCATCACCTGGACCCTGGATCAGTCCAGCGAGGTGCTGGGCTCC |
| | | GGCAAGACCCTGACCATTCAGGTGAAGGAGTTCGGCGACGCCGGTCAGTACACCTGCCACA |
| | | AGGGCGGCGAGGTGCTGAGCCACAGCCTACTGCTCCTGCACAAAAAGGAGGATGGAATCTG |
| | | GTCCACCGACATCCTCAAGGACCAGAAGGAGCCGAAGAACAAGACGTTCCTCCGGTGCGAG |
| | | GCCAAGAACTACAGCGGCAGGTTTACCTGCTGGTGGCTGACCACCATCAGCACCGACCTGA |
| | | CATTTTCCGTGAAGAGCAGCCGCGGCAGCAGCGATCCCCAGGGCGTGACCTGCGGGGCGGC |
| | | CACCCTGTCCGCCGAGCGTGTGAGGGGCGACAACAAGGAGTACGAGTACAGCGTGGAATGC |
| | | CAGGAGGACAGCGCCTGTCCCGCCGCCGAGGAGAGCCTGCCAATCGAGGTCATGGTGGACG |
| | | CCGTGCACAAGCTGAAGTACGAGAACTACACGAGCAGCTTCTTCATCAGGGACATCATCAA |
| | | ACCGGACCCGCCCAAGAACCTGCAGCTGAAACCCTTGAAAAACAGCAGGCAGGTGGAAGTG |
| | | TCTTGGGAGTACCCCGACACCTGGTCCACCCCCCACAGCTACTTTAGCCTGACCTTCTGTG |
| | | TGCAGGTCCAGGGCAAGTCCAAGAGGGAGAAGAAGGACAGGGTGTTCACCGACAAAACCAG |
| | | CGCCACCGTGATCTGCAGGAAGAACGCCTCCATCAGCGTGCGGGCCCAGGACAGGTATTAC |
| | | AGCTCGTCGTGGAGCGAGTGGGCCAGCGTGCCCTGCTCCGGGGGAGGCGGCGGCGGAAGCC |
| | | GGAATCTGCCCGTGGCCACCCCCGATCCCGGCATGTTCCCGTGTCTGCACCACAGCCAGAA |
| | | CCTGCTGCGGGCCGTGAGCAACATGCTGCAGAAGGCCCGCCAAACCCTGGAGTTCTACCCC |
| | | TGTACAAGCGAGGAGATCGACCATGAGGACATTACCAAGGACAAGACCAGCACCGTGGAGG |
| | | CCTGCCTGCCCCTCGAGCTCACAAAGAACGAATCCTGCCTGAATAGCCGCGAGACCAGCTT |
| | | TATCACGAACGGGTCCTGCCTCGCCAGCCGGAAGACAAGCTTCATGATGGCCCTGTGCCTG |
| | | AGCAGCATCTACGAGGACCTGAAAATGTACCAAGTGGAGTTCAAAACGATGAACGCCAAGC |
| | | TGCTGATGGACCCCAAGCGCCAGATCTTCCTGGACCAGAACATGCTGGCCGTCATCGACGA |
| | | GCTCATGCAGGCCCTGAACTTCAACAGCGAGACCGTGCCCCAGAAGAGCAGCCTGGAGGAG |
| | | CCCGACTTCTACAAGACGAAGATCAAGCTCTGCATCCTGCTGCACGCTTTCCGCATCCGCG |
| | | CGGTGACCATCGACCGGGTGATGAGCTACCTCAACGCCAGTTGATAATAGGCTGGAGCCTC |
| | | GGTGGCCATGCTTCTTGCCCCTTGGGCCTCCCCCCAGCCCCTCCTCCCCTTCCTGCACCCG |
| | | TACCCCCCAAACACCATTGTCACACTCCAGTGGTCTTTGAATAAAGTCTGAGTGGGCGGC |
| 1108 | hIL12AB_029 | TCAAGCTTTTGGACCCTCGTACAGAAGCTAATACGACTCACTATAGGGAAATAAGAGAGAA |
| | | AAGAAGAGTAAGAAGAAATATAAGAGCCACCATGTGCCACCAACAGCTGGTGATCAGCTGG |
| | | TTCAGCCTGGTGTTTCTGGCCTCCCCTCTGGTGGCCATCTGGGAGCTGAAGAAGGACGTGT |
| | | ACGTGGTGGAGCTGGACTGGTACCCTGACGCCCCCGGCGAAATGGTGGTGCTGACGTGCGA |
| | | CACCCCCGAGGAGGATGGCATCACCTGGACCCTGGACCAAAGCAGCGAGGTCCTCGGAAGC |
| | | GGCAAGACCCTCACTATCCAAGTGAAGGAGTTCGGGGATGCGGGCCAGTACACCTGCCACA |
| | | AGGGCGGCGAGGTGCTGTCTCATAGCCTGCTGCTCCTGCATAAGAAGGAAGACGGCATCTG |
| | | GAGCACCGACATACTGAAGGATCAGAAGGAGCCCAAGAACAAGACCTTCCTGAGGTGCGAG |
| | | GCCAAGAACTACTCCGGGCGCTTCACCTGTTGGTGGCTGACCACCATCTCCACCGACCTGA |
| | | CCTTCAGCGTGAAGAGCAGCAGGGGGAGCAGCGACCCCCAGGGGGTGACCTGCGGAGCCGC |
| | | GACCTTGTCGGCCGAGCGGGTGAGGGGCGACAATAAGGAGTACGAGTACTCGGTCGAATGC |
| | | CAGGAGGACTCCGCCTGCCCCGCCGCCGAGGAGTCCCTCCCCATCGAAGTGATGGTGGACG |
| | | CCGTCCACAAGCTGAAGTACGAGAACTACACCAGCAGCTTCTTCATACGGGATATCATCAA |
| | | GCCCGACCCCCCGAAGAACCTGCAGCTGAAACCCTTGAAGAACTCCAGGCAGGTGGAGGTG |
| | | AGCTGGGAGTACCCCGACACCTGGTCCACCCCGCACTCATACTTCAGCCTGACCTTCTGTG |
| | | TACAGGTCCAGGGCAAGAGCAAGAGGGAAAAGAAGGATAGGGTGTTCACCGACAAGACCTC |
| | | CGCCACGGTGATCTGTCGGAAAAACGCCAGCATCTCCGTGCGGGCCCAGGACAGGTACTAT |
| | | TCCAGCAGCTGGAGCGAGTGGGCCTCCGTCCCCTGCTCCGGCGGCGGTGGCGGGGGCAGCA |
| | | GGAACCTCCCCGTGGCCACCCCCGATCCCGGGATGTTCCCATGCCTGCACCACAGCCAAAA |
| | | CCTGCTGAGGGCCGTCTCCAATATGCTGCAGAAGGCGAGGCAGACCCTGGAGTTCTACCCC |
| | | TGTACCTCCGAGGAGATCGACCACGAGGATATCACCAAGGACAAGACCTCCACGGTCGAGG |
| | | CGTGCCTGCCCCTGGAGCTCACGAAGAACGAGAGCTGCCTTAACTCCAGGGAAACCTCGTT |
| | | TATCACGAACGGCAGCTGCCTGGCGTCACGGAAGACCTCCTTTATGATGGCCCTATGTCTG |
| | | TCCTCGATCTACGAGGACCTGAAGATGTACCAGGTGGAGTTCAAGACCATGAACGCCAAGC |
| | | TGCTGATGGATCCCAAGAGGCAGATTTTCCTGGACCAGAACATGCTGGCCGTGATTGACGA |
| | | GCTGATGCAGGCGCTGAACTTCAACAGCGAGACAGTGCCGCAGAAGAGCTCCCTGGAGGAG |
| | | CCGGACTTTTACAAGACCAAGATAAAGCTGTGCATCCTGCTCCACGCCTTCAGAATACGGG |
| | | CCGTCACCATCGATAGGGTGATGTCTTACCTGAACGCCTCCTGATAATAGGCTGGAGCCTC |
| | | GGTGGCCATGCTTCTTGCCCCTTGGGCCTCCCCCCAGCCCCTCCTCCCCTTCCTGCACCCG |
| | | TACCCCCCAAACACCATTGTCACACTCCAGTGGTCTTTGAATAAAGTCTGAGTGGGCGGC |
| 1109 | hIL12AB_030 | TCAAGCTTTTGGACCCTCGTACAGAAGCTAATACGACTCACTATAGGGAAATAAGAGAGAA |
| | | AAGAAGAGTAAGAAGAAATATAAGAGCCACCATGTGCCACCAGCAGCTGGTGATTAGCTGG |
| | | TTTAGCCTGGTGTTCCTGGCAAGCCCCCTGGTGGCCATCTGGGAACTGAAAAAGGACGTGT |
| | | ACGTGGTCGAGCTGGATTGGTACCCCGACGCCCCCGGCGAAATGGTGGTGCTGACGTGTGA |
| | | TACCCCCGAGGAGGACGGGATCACCTGGACCCTGGATCAGAGCAGCGAGGTGCTGGGGAGC |
| | | GGGAAGACCCTGACGATCCAGGTCAAGGAGTTCGGCGACGCTGGGCAGTACACCTGTCACA |
| | | AGGGCGGGGAGGTGCTGTCCCACTCCCTGCTGCTCCTGCATAAGAAAGAGGACGGCATCTG |
| | | GTCCACCGACATCCTCAAGGACCAGAAGGAGCCCAAGAACAAGACCTTCCTGCGGTGTGAG |
| | | GCGAAGAACTACAGCGGCCGTTTCACCTGCTGGTGGCTGACGACAATCAGCACCGACTTGA |
| | | CGTTCTCCGTGAAGTCCTCCAGAGGCAGCTCCGACCCCCAAGGGGTGACGTGCGGCGCGGC |
| | | CACCCTGAGCGCCGAGCGGGTGCGGGGGGACAACAAGGAGTACGAGTACTCCGTGGAGTGC |
| | | CAGGAGGACAGCGCCTGTCCCGCAGCCGAGGAGTCCCTGCCCATCGAAGTCATGGTGGACG |
| | | CCGTCCACAAGCTGAAGTACGAGAACTACACCAGCAGCTTCTTCATCCGCGATATCATCAA |
| | | GCCCGATCCCCCCAAAAACCTGCAACTGAAGCCGCTGAAGAATAGCAGGCAGGTGGAGGTG |
| | | TCCTGGGAGTACCCGGACACCTGGAGCACGCCCCACAGCTATTTCAGCCTGACCTTTTGCG |
| | | TGCAGGTCCAGGGGAAGAGCAAGCGGGAGAAGAAGGACCGCGTGTTTACGGACAAAACCAG |
| | | CGCCACCGTGATCTGCAGGAAGAACGCCAGCATCAGCGTGAGGGCCCAGGACAGGTACTAC |
| | | AGCAGCTCCTGGAGCGAGTGGGCCTCCGTGCCCTGTTCCGGAGGCGGCGGGGGCGGTTCCC |
| | | GGAACCTCCCGGTGGCCACCCCCGACCCGGGCATGTTCCCGTGCCTGCACCACTCACAGAA |
| | | TCTGCTGAGGGCCGTGAGCAATATGCTGCAGAAGGCAAGGCAGACCCTGGAGTTTTATCCC |
| | | TGCACCAGCGAGGAGATCGACCACGAAGACATCACCAAGGACAAGACCAGCACAGTGGAGG |
| | | CCTGCCTGCCCCTGGAACTGACCAAGAACGAGTCCTGTCTGAACTCCCGGGAAACCAGCTT |
| | | CATAACCAACGGCTCCTGTCTCGCCAGCAGGAAGACCAGCTTCATGATGGCCCTGTGCCTC |
| | | AGCTCCATCTACGAGGACCTCAAGATGTACCAGGTTGAGTTCAAGACCATGAACGCCAAGC |
| | | TCCTGATGGACCCCAAGAGGCAGATCTTCCTGGACCAGAATATGCTGGCCGTGATCGATGA |
| | | GTTAATGCAGGCGCTGAACTTCAACAGCGAGACGGTGCCCCAAAAGTCCTCGCTGGAGGAG |
| | | CCCGACTTCTACAAGACCAAGATCAAGCTGTGCATCCTCCTGCACGCCTTCCGAATCCGGG |
| | | CCGTAACCATCGACAGGGTGATGAGCTATCTCAACGCCTCCTGATAATAGGCTGGAGCCTC |
| | | GGTGGCCATGCTTCTTGCCCCTTGGGCCTCCCCCCAGCCCCTCCTCCCCTTCCTGCACCCG |
| | | TACCCCCCAAACACCATTGTCACACTCCAGTGGTCTTTGAATAAAGTCTGAGTGGGCGGC |
| 1110 | hIL12AB_031 | TCAAGCTTTTGGACCCTCGTACAGAAGCTAATACGACTCACTATAGGGAAATAAGAGAGAA |
| | | AAGAAGAGTAAGAAGAAATATAAGAGCCACCATGTGCCACCAGCAGCTCGTGATCAGCTGG |
| | | TTCTCGCTTGTGTTCCTGGCCTCCCCCCTCGTCGCCATCTGGGAGCTGAAGAAAGACGTGT |
| | | ACGTGGTGGAGCTGGACTGGTATCCCGACGCCCCGGGGGAGATGGTGGTGCTGACCTGCGA |
| | | CACCCCGGAAGAGGACGGCATCACCTGGACGCTCGACCAGTCGTCCGAAGTGCTGGGGTCG |
| | | GGCAAGACCCTCACCATCCAGGTGAAGGAGTTCGGAGACGCCGGCCAGTACACCTGTCATA |
| | | AGGGGGGGGAGGTGCTGAGCCACAGCCTCCTGCTCCTGCACAAAAAGGAGGACGGCATCTG |
| | | GAGCACCGATATCCTCAAGGACCAGAAGGAGCCCAAGAACAAGACGTTCCTGAGGTGTGAG |
| | | GCCAAGAACTACAGCGGGCGGTTCACGTGTTGGTGGCTCACCACCATCTCCACCGACCTCA |
| | | CCTTCTCCGTGAAGTCAAGCAGGGGCAGCTCCGACCCCCAAGGCGTCACCTGCGGCGCCGC |
| | | CACCCTGAGCGCCGAGAGGGTCAGGGGGGATAACAAGGAATACGAGTACAGTGTGGAGTGC |
| | | CAAGAGGATAGCGCCTGTCCCGCCGCCGAAGAGAGCCTGCCCATCGAAGTGATGGTGGACG |
| | | CCGTGCACAAGCTGAAGTACGAGAACTACACCTCCAGCTTCTTCATCAGGGATATCATCAA |
| | | GCCCGATCCCCCCAAGAACCTGCAGCTGAAGCCCCTGAAGAACAGCAGGCAGGTGGAGGTG |
| | | AGCTGGGAGTATCCCGACACGTGGAGCACCCCGCACAGCTACTTCTCGCTGACCTTCTGCG |
| | | TGCAGGTGCAAGGGAAGTCCAAGAGGGAGAAGAAGGATAGGGTGTTCACCGACAAAACGAG |
| | | CGCCACCGTGATCTGCCGGAAGAATGCCAGCATCTCTGTGAGGGCCCAGGACAGGTACTAT |
| | | TCCAGCTCCTGGTCGGAGTGGGCCAGCGTGCCCTGTAGCGGCGGGGGCGGGGGCGGCAGCA |
| | | GGAACCTCCCGGTTGCCACCCCCGACCCCGGCATGTTTCCGTGCCTGCACCACTCGCAAAA |
| | | CCTGCTGCGCGCGGTCTCCAACATGCTGCAAAAAGCGCGCCAGACGCTGGAGTTCTACCCC |
| | | TGCACCAGCGAGGAGATCGATCATGAAGATATCACCAAAGACAAGACCTCGACCGTGGAGG |
| | | CCTGCCTGCCCCTGGAGCTCACCAAGAACGAAAGCTGCCTGAACAGCAGGGAGACAAGCTT |
| | | CATCACCAACGGCAGCTGCCTGGCCTCCCGGAAGACCAGCTTCATGATGGCCCTGTGCCTG |
| | | TCCAGCATCTACGAGGATCTGAAGATGTACCAAGTGGAGTTTAAGACCATGAACGCCAAGC |
| | | TGTTAATGGACCCCAAAAGGCAGATCTTCCTGGATCAGAACATGCTGGCCGTCATCGACGA |
| | | GCTGATGCAAGCCCTGAACTTCAACAGCGAGACGGTGCCCCAGAAGAGCAGCCTCGAGGAG |
| | | CCCGACTTCTATAAGACCAAGATAAAGCTGTGCATTCTGCTGCACGCCTTCAGAATCAGGG |
| | | CCGTGACCATCGATAGGGTGATGAGCTACCTGAACGCCAGCTGATAATAGGCTGGAGCCTC |
| | | GGTGGCCATGCTTCTTGCCCCTTGGGCCTCCCCCCAGCCCCTCCTCCCCTTCCTGCACCCG |
| | | TACCCCCCAAACACCATTGTCACACTCCAGTGGTCTTTGAATAAAGTCTGAGTGGGCGGC |
| 1111 | hIL12AB_032 | TCAAGCTTTTGGACCCTCGTACAGAAGCTAATACGACTCACTATAGGGAAATAAGAGAGAA |
| | | AAGAAGAGTAAGAAGAAATATAAGAGCCACCATGTGTCACCAGCAGCTGGTGATTTCCTGG |
| | | TTCAGTCTGGTGTTTCTTGCCAGCCCCCTGGTGGCCATCTGGGAGCTGAAGAAAGACGTAT |
| | | ACGTCGTGGAGCTGGACTGGTATCCCGACGCTCCCGGCGAGATGGTGGTCCTCACCTGCGA |
| | | CACCCCAGAGGAGGACGGCATCACCTGGACCCTGGACCAGAGCTCCGAGGTCCTGGGCAGC |
| | | GGTAAGACCCTCACCATCCAGGTGAAGGAGTTTGGTGATGCCGGGCAGTATACCTGCCACA |
| | | AGGGCGGCGAGGTGCTGTCCCACAGCCTCCTGTTACTGCATAAGAAGGAGGATGGCATCTG |
| | | GAGCACCGACATCCTCAAGGACCAGAAAGAGCCCAAGAACAAGACCTTTCTGCGGTGCGAG |
| | | GCGAAAAATTACTCCGGCCGGTTCACCTGCTGGTGGCTGACCACCATCAGCACGGACCTGA |
| | | CGTTCTCCGTGAAGTCGAGCAGGGGGAGCTCCGATCCCCAGGGCGTGACCTGCGGCGCGGC |
| | | CACCCTGAGCGCCGAGCGCGTCCGCGGGGACAATAAGGAATACGAATATAGCGTGGAGTGC |
| | | CAGGAGGACAGCGCCTGCCCCGCGGCCGAGGAGAGCCTCCCGATCGAGGTGATGGTGGATG |
| | | CCGTCCACAAGCTCAAATACGAAAACTACACCAGCAGCTTCTTCATTAGGGACATCATCAA |
| | | GCCCGACCCCCCCAAAAACCTGCAGCTGAAGCCCCTGAAGAACAGCCGCCAGGTCGAGGTG |
| | | TCATGGGAGTACCCAGACACCTGGAGCACCCCCCACTCCTACTTCAGCCTGACCTTCTGCG |
| | | TCCAGGTGCAGGGAAAGTCCAAACGGGAGAAGAAGGATAGGGTCTTTACCGATAAGACGTC |
| | | GGCCACCGTCATCTGCAGGAAGAACGCCAGCATAAGCGTGCGGGCGCAGGATCGGTACTAC |
| | | AGCTCGAGCTGGTCCGAATGGGCCTCCGTGCCCTGTAGCGGAGGGGGTGGCGGGGGCAGCA |
| | | GGAACCTGCCCGTGGCCACCCCGGACCCGGGCATGTTTCCCTGCCTGCATCACAGTCAGAA |
| | | CCTGCTGAGGGCCGTGAGCAACATGCTCCAGAAGGCCCGCCAGACCCTGGAGTTTTACCCC |
| | | TGCACCAGCGAAGAGATCGATCACGAAGACATCACCAAAGACAAGACCTCCACCGTGGAGG |
| | | CCTGTCTGCCCCTGGAGCTGACCAAGAACGAGAGCTGTCTGAACAGCAGGGAGACCTCCTT |
| | | CATCACCAACGGCTCCTGCCTGGCATCCCGGAAGACCAGCTTCATGATGGCCCTGTGTCTG |
| | | AGCTCTATCTACGAGGACCTGAAGATGTACCAGGTCGAGTTCAAGACCATGAACGCCAAGC |
| | | TGCTGATGGACCCCAAGCGACAGATATTCCTGGACCAGAACATGCTCGCCGTGATCGATGA |
| | | ACTGATGCAAGCCCTGAACTTCAATAGCGAGACCGTGCCCCAGAAAAGCAGCCTGGAGGAG |
| | | CCCGACTTCTACAAGACCAAGATCAAACTGTGCATACTGCTGCACGCGTTCAGGATCCGGG |
| | | CCGTCACCATCGACCGGGTGATGTCCTATCTGAATGCCAGCTGATAATAGGCTGGAGCCTC |
| | | GGTGGCCATGCTTCTTGCCCCTTGGGCCTCCCCCCAGCCCCTCCTCCCCTTCCTGCACCCG |
| | | TACCCCCCAAACACCATTGTCACACTCCAGTGGTCTTTGAATAAAGTCTGAGTGGGCGGC |
| 1112 | hIL12AB_033 | TCAAGCTTTTGGACCCTCGTACAGAAGCTAATACGACTCACTATAGGGAAATAAGAGAGAA |
| | | AAGAAGAGTAAGAAGAAATATAAGAGCCACCATGTGCCACCAGCAGCTCGTGATTAGCTGG |
| | | TTTTCGCTGGTGTTCCTGGCCAGCCCTCTCGTGGCCATCTGGGAGCTGAAAAAAGACGTGT |
| | | ACGTGGTGGAGCTGGACTGGTACCCGGACGCCCCCGGCGAGATGGTGGTGCTGACGTGCGA |
| | | CACCCCGGAAGAGGACGGCATCACCTGGACCCTGGACCAGTCATCCGAGGTCCTGGGCAGC |
| | | GGCAAGACGCTCACCATCCAGGTGAAGGAGTTCGGCGACGCCGGCCAGTACACATGCCATA |
| | | AGGGCGGGGAGGTGCTGAGCCACAGCCTGCTCCTCCTGCACAAGAAGGAGGATGGCATCTG |
| | | GTCTACAGACATCCTGAAGGACCAGAAAGAGCCCAAGAACAAGACCTTCCTCCGGTGCGAG |
| | | GCCAAGAACTACTCCGGGCGGTTTACTTGTTGGTGGCTGACCACCATCAGCACCGACCTCA |
| | | CCTTCAGCGTGAAGAGCTCCCGAGGGAGCTCCGACCCCCAGGGGGTCACCTGCGGCGCCGC |
| | | CACCCTGAGCGCCGAGCGGGTGAGGGGCGACAACAAGGAGTATGAATACAGCGTGGAATGC |
| | | CAAGAGGACAGCGCCTGTCCCGCGGCCGAGGAAAGCCTGCCCATCGAGGTGATGGTGGACG |
| | | CCGTCCACAAACTCAAGTACGAGAACTACACCAGCAGTTTCTTCATTCGCGACATCATCAA |
| | | GCCGGACCCCCCCAAAAACCTGCAGCTCAAACCCCTGAAGAACAGCAGGCAGGTGGAGGTC |
| | | AGCTGGGAGTACCCGGACACCTGGAGCACCCCCCATAGCTACTTCAGCCTGACCTTCTGCG |
| | | TGCAGGTGCAGGGCAAGAGCAAACGCGAGAAGAAGGACCGGGTGTTTACCGACAAGACCAG |
| | | CGCCACGGTGATCTGCCGAAAGAATGCAAGCATCTCCGTGAGGGCGCAGGACCGCTACTAC |
| | | TCTAGCAGCTGGAGCGAGTGGGCCAGCGTGCCCTGCAGCGGTGGCGGCGGAGGCGGCAGCC |
| | | GTAACCTCCCCGTGGCCACCCCCGACCCCGGCATGTTCCCGTGTCTGCACCACTCCCAGAA |
| | | CCTGCTGAGGGCCGTCAGCAATATGCTGCAGAAGGCCCGGCAGACGCTGGAGTTCTACCCC |
| | | TGCACCTCCGAGGAGATCGACCATGAGGACATTACCAAGGACAAGACGAGCACTGTGGAGG |
| | | CCTGCCTGCCCCTGGAGCTCACCAAAAACGAGAGCTGCCTGAATAGCAGGGAGACGTCCTT |
| | | CATCACCAACGGCAGCTGTCTGGCCAGCAGGAAGACCAGCTTCATGATGGCCCTGTGCCTC |
| | | TCCTCCATATATGAGGATCTGAAGATGTACCAGGTGGAGTTCAAGACCATGAACGCCAAGC |
| | | TGCTGATGGATCCCAAGAGGCAGATCTTCCTGGACCAGAATATGCTGGCCGTGATTGACGA |
| | | GCTGATGCAGGCCCTGAACTTTAATAGCGAGACCGTCCCCCAGAAGAGCAGCCTGGAGGAG |
| | | CCCGACTTCTATAAGACCAAGATCAAGCTGTGCATACTGCTGCACGCGTTTAGGATAAGGG |
| | | CCGTCACCATCGACAGGGTGATGAGCTACCTGAATGCCAGCTGATAATAGGCTGGAGCCTC |
| | | GGTGGCCATGCTTCTTGCCCCTTGGGCCTCCCCCCAGCCCCTCCTCCCCTTCCTGCACCCG |
| | | TACCCCCCAAACACCATTGTCACACTCCAGTGGTCTTTGAATAAAGTCTGAGTGGGCGGC |
| 1113 | hIL12AB_034 | TCAAGCTTTTGGACCCTCGTACAGAAGCTAATACGACTCACTATAGGGAAATAAGAGAGAA |
| | | AAGAAGAGTAAGAAGAAATATAAGAGCCACCATGTGCCACCAACAGCTGGTGATCTCCTGG |
| | | TTCAGCCTGGTGTTCCTCGCCAGCCCCCTGGTGGCCATCTGGGAGCTGAAGAAAGACGTGT |
| | | ACGTGGTGGAGCTGGACTGGTATCCCGACGCCCCCGGCGAGATGGTCGTGCTGACCTGCGA |
| | | CACCCCGGAGGAGGACGGCATCACCTGGACCCTGGATCAGTCCTCCGAGGTGCTGGGCAGC |
| | | GGGAAGACCCTGACCATCCAGGTGAAAGAGTTCGGAGATGCCGGCCAGTATACCTGTCACA |
| | | AGGGGGGTGAGGTGCTGAGCCATAGCCTCTTGCTTCTGCACAAGAAGGAGGACGGCATCTG |
| | | GTCCACCGACATCCTCAAGGACCAAAAGGAGCCGAAGAATAAAACGTTCCTGAGGTGCGAA |
| | | GCCAAGAACTATTCCGGACGGTTCACCTGCTGGTGGCTGACCACCATCAGCACCGACCTCA |
| | | CCTTCTCCGTAAAGTCAAGCAGGGGCAGCTCCGACCCCCAGGGCGTGACCTGCGGAGCCGC |
| | | CACCCTGAGCGCAGAGAGGGTGAGGGGCGACAACAAGGAGTACGAATACTCCGTCGAGTGC |
| | | CAGGAGGACAGCGCCTGCCCCGCCGCCGAGGAAAGTCTGCCCATCGAGGTGATGGTGGACG |
| | | CCGTGCACAAGCTCAAATACGAGAACTACACCAGCAGCTTCTTCATCCGGGATATCATCAA |
| | | GCCCGACCCTCCAAAGAATCTGCAGCTGAAACCCCTTAAGAACAGCAGGCAGGTGGAGGTC |
| | | AGCTGGGAGTACCCCGACACCTGGAGCACGCCCCACTCCTACTTTAGCCTGACCTTTTGCG |
| | | TGCAGGTGCAGGGGAAAAGCAAGCGGGAGAAGAAGGACAGGGTGTTCACCGATAAGACCTC |
| | | CGCTACCGTGATCTGCAGGAAGAACGCCTCAATCAGCGTGAGGGCCCAGGATCGGTACTAC |
| | | TCCAGCTCCTGGAGCGAGTGGGCCAGCGTGCCCTGCTCTGGCGGTGGCGGCGGGGGCAGCC |
| | | GGAACCTGCCGGTGGCCACTCCCGACCCGGGCATGTTCCCGTGCCTCCACCATTCCCAGAA |
| | | CCTGCTGCGGGCCGTGTCCAATATGCTCCAGAAGGCAAGGCAGACCCTGGAGTTCTACCCC |
| | | TGCACCAGCGAGGAGATCGATCACGAGGACATCACCAAAGACAAAACCAGCACGGTCGAGG |
| | | CCTGCCTGCCCCTGGAACTCACCAAGAACGAAAGCTGTCTCAACAGCCGCGAGACCAGCTT |
| | | CATAACCAACGGTTCCTGTCTGGCCTCCCGCAAGACCAGCTTTATGATGGCCCTCTGTCTG |
| | | AGCTCCATCTATGAAGACCTGAAAATGTACCAGGTGGAGTTCAAAACCATGAACGCCAAGC |
| | | TTCTGATGGACCCCAAGAGGCAGATCTTCCTGGATCAGAACATGCTGGCCGTGATCGACGA |
| | | GCTGATGCAGGCCCTGAACTTTAACTCCGAGACCGTGCCCCAGAAAAGCAGCCTGGAAGAG |
| | | CCCGATTTCTACAAAACGAAGATCAAGCTGTGCATCCTGCTGCACGCCTTCCGGATCCGTG |
| | | CGGTGACCATCGATAGGGTGATGAGCTACCTGAACGCCAGCTGATAATAGGCTGGAGCCTC |
| | | GGTGGCCATGCTTCTTGCCCCTTGGGCCTCCCCCCAGCCCCTCCTCCCCTTCCTGCACCCG |
| | | TACCCCCCAAACACCATTGTCACACTCCAGTGGTCTTTGAATAAAGTCTGAGTGGGCGGC |
| 1114 | hIL12AB_035 | TCAAGCTTTTGGACCCTCGTACAGAAGCTAATACGACTCACTATAGGGAAATAAGAGAGAA |
| | | AAGAAGAGTAAGAAGAAATATAAGAGCCACCATGTGCCACCAACAGCTGGTAATCAGCTGG |
| | | TTCAGCCTGGTTTTCCTCGCGTCGCCCCTGGTGGCCATCTGGGAGTTAAAGAAGGACGTGT |
| | | ACGTGGTGGAGCTGGATTGGTACCCCGACGCCCCGGGCGAGATGGTCGTGCTCACCTGCGA |
| | | TACCCCCGAGGAGGACGGGATCACCTGGACCCTGGACCAATCCAGCGAGGTGCTGGGCAGC |
| | | GGCAAGACCCTGACCATACAGGTGAAGGAATTTGGGGACGCCGGGCAGTACACCTGCCACA |
| | | AGGGCGGGGAAGTGCTGTCCCACTCCCTCCTGCTGCTGCATAAGAAGGAGGACGGCATCTG |
| | | GAGCACCGACATCCTGAAGGACCAAAAGGAGCCCAAGAACAAGACCTTCCTGAGGTGCGAG |
| | | GCCAAAAACTATTCCGGCCGCTTTACCTGTTGGTGGCTGACCACCATCTCCACCGATCTGA |
| | | CCTTCAGCGTGAAGTCGTCTAGGGGCTCCTCCGACCCCCAGGGCGTAACCTGCGGCGCCGC |
| | | GACCCTGAGCGCCGAGAGGGTGCGGGGCGATAACAAAGAGTACGAGTACTCGGTGGAGTGC |
| | | CAGGAGGACAGCGCCTGTCCGGCGGCCGAGGAGAGCCTGCCCATCGAGGTGATGGTGGACG |
| | | CCGTCCACAAGCTGAAGTACGAGAACTACACCAGTTCGTTCTTCATCAGGGACATCATCAA |
| | | GCCGGACCCCCCCAAGAACCTCCAGCTGAAGCCCCTGAAGAACAGCAGGCAGGTGGAAGTG |
| | | TCCTGGGAGTATCCCGACACCTGGAGCACCCCCCACAGCTACTTCAGCCTGACCTTTTGCG |
| | | TGCAGGTGCAGGGCAAAAGCAAGAGGGAAAAGAAGGACCGGGTGTTCACCGATAAGACGAG |
| | | CGCCACCGTTATCTGCAGGAAGAACGCCTCCATAAGCGTGAGGGCGCAGGACCGTTACTAC |
| | | AGCAGCAGCTGGAGTGAGTGGGCAAGCGTGCCCTGTAGCGGCGGGGGCGGGGGCGGGTCCC |
| | | GCAACCTCCCCGTCGCCACCCCCGACCCAGGCATGTTTCCGTGCCTGCACCACAGCCAGAA |
| | | CCTGCTGCGGGCCGTTAGCAACATGCTGCAGAAGGCCAGGCAGACCCTCGAGTTCTATCCC |
| | | TGCACATCTGAGGAGATCGACCACGAAGACATCACTAAGGATAAGACCTCCACCGTGGAGG |
| | | CCTGTCTGCCCCTCGAGCTGACCAAGAATGAATCCTGCCTGAACAGCCGAGAGACCAGCTT |
| | | TATCACCAACGGCTCCTGCCTGGCCAGCAGGAAGACCTCCTTCATGATGGCCCTGTGCCTC |
| | | TCCAGCATCTACGAGGATCTGAAGATGTACCAGGTAGAGTTCAAGACGATGAACGCCAAGC |
| | | TCCTGATGGACCCCAAGAGGCAGATATTCCTGGACCAGAACATGCTGGCGGTGATCGACGA |
| | | GCTGATGCAGGCCCTGAATTTCAACAGCGAGACGGTGCCACAGAAGTCCAGCCTGGAGGAG |
| | | CCAGACTTCTACAAGACCAAGATCAAACTGTGCATCCTCCTGCACGCGTTCAGGATCCGCG |
| | | CCGTCACCATAGACAGGGTGATGAGTTATCTGAACGCCAGCTGATAATAGGCTGGAGCCTC |
| | | GGTGGCCATGCTTCTTGCCCCTTGGGCCTCCCCCCAGCCCCTCCTCCCCTTCCTGCACCCG |
| | | TACCCCCCAAACACCATTGTCACACTCCAGTGGTCTTTGAATAAAGTCTGAGTGGGCGGC |
| 1115 | hIL12AB_036 | TCAAGCTTTTGGACCCTCGTACAGAAGCTAATACGACTCACTATAGGGAAATAAGAGAGAA |
| | | AAGAAGAGTAAGAAGAAATATAAGAGCCACCATGTGCCATCAGCAGCTGGTAATCAGCTGG |
| | | TTTAGCCTGGTGTTCCTGGCCAGCCCACTGGTGGCCATCTGGGAGCTGAAGAAGGACGTGT |
| | | ACGTGGTGGAACTGGACTGGTACCCCGACGCCCCTGGCGAGATGGTGGTACTGACCTGTGA |
| | | CACCCCGGAGGAAGACGGTATCACCTGGACCCTGGATCAGAGCTCCGAGGTGCTGGGCTCC |
| | | GGCAAGACACTGACCATCCAAGTTAAGGAATTTGGGGACGCCGGCCAGTACACCTGCCACA |
| | | AGGGGGGCGAGGTGCTGTCCCACTCCCTGCTGCTTCTGCATAAGAAGGAGGATGGCATCTG |
| | | GTCCACCGACATACTGAAGGACCAGAAGGAGCCCAAGAATAAGACCTTCCTGAGATGCGAG |
| | | GCCAAGAACTACTCGGGAAGGTTCACCTGCTGGTGGCTGACCACCATCAGCACCGACCTGA |
| | | CCTTCTCCGTGAAGAGCTCCCGGGGCAGCTCCGACCCCCAGGGCGTAACCTGTGGGGCCGC |
| | | TACCCTGTCCGCCGAGAGGGTCCGGGGCGACAACAAGGAATACGAGTACAGCGTGGAGTGC |
| | | CAGGAGGACTCCGCCTGCCCCGCCGCCGAGGAGTCGCTGCCCATAGAGGTGATGGTGGACG |
| | | CCGTGCACAAGCTCAAGTACGAGAATTACACCAGCAGCTTCTTTATCAGGGACATAATTAA |
| | | GCCGGACCCCCCAAAGAATCTGCAGCTGAAGCCCCTGAAGAATAGCCGGCAGGTGGAAGTG |
| | | TCCTGGGAGTACCCCGACACCTGGAGCACCCCCCACTCCTATTTCTCACTGACATTCTGCG |
| | | TGCAGGTGCAAGGGAAAAGCAAGAGGGAGAAGAAGGATAGGGTGTTCACCGACAAGACAAG |
| | | CGCCACCGTGATCTGCCGAAAAAATGCCAGCATCAGCGTGAGGGCCCAGGATCGGTATTAC |
| | | AGCAGCTCCTGGAGCGAGTGGGCCAGCGTGCCCTGTTCCGGCGGGGGAGGGGGCGGCTCCC |
| | | GGAACCTGCCGGTGGCCACCCCCGACCCTGGCATGTTCCCCTGCCTGCATCACAGCCAGAA |
| | | CCTGCTCCGGGCCGTGTCGAACATGCTGCAGAAGGCCCGGCAGACCCTCGAGTTTTACCCC |
| | | TGCACCAGCGAAGAGATCGACCACGAAGACATAACCAAGGACAAGACCAGCACGGTGGAGG |
| | | CCTGCCTGCCCCTGGAGCTTACCAAAAACGAGTCCTGCCTGAACAGCCGGGAAACCAGCTT |
| | | CATAACGAACGGGAGCTGCCTGGCCTCCAGGAAGACCAGCTTCATGATGGCGCTGTGTCTG |
| | | TCCAGCATATACGAGGATCTGAAGATGTATCAGGTGGAATTCAAAACTATGAATGCCAAGC |
| | | TCCTGATGGACCCCAAGAGGCAGATCTTCCTGGACCAGAACATGCTAGCCGTGATCGACGA |
| | | GCTGATGCAGGCCCTCAACTTCAACTCGGAGACGGTGCCCCAGAAGTCCAGCCTCGAGGAG |
| | | CCCGACTTCTACAAGACCAAGATCAAGCTGTGCATACTGCTGCATGCCTTCAGGATAAGGG |
| | | CGGTGACTATCGACAGGGTCATGTCCTACCTGAACGCCAGCTGATAATAGGCTGGAGCCTC |
| | | GGTGGCCATGCTTCTTGCCCCTTGGGCCTCCCCCCAGCCCCTCCTCCCCTTCCTGCACCCG |
| | | TACCCCCCAAACACCATTGTCACACTCCAGTGGTCTTTGAATAAAGTCTGAGTGGGCGGC |
| 1116 | hIL12AB_037 | TCAAGCTTTTGGACCCTCGTACAGAAGCTAATACGACTCACTATAGGGAAATAAGAGAGAA |
| | | AAGAAGAGTAAGAAGAAATATAAGAGCCACCATGTGCCACCAACAACTGGTGATCAGCTGG |
| | | TTCTCCCTGGTGTTCCTGGCCAGCCCCCTGGTGGCCATCTGGGAGCTCAAAAAAGACGTGT |
| | | ACGTGGTGGAGCTCGATTGGTACCCAGACGCGCCGGGGGAAATGGTGGTGCTGACCTGCGA |
| | | CACCCCAGAGGAGGATGGCATCACGTGGACGCTGGATCAGTCCAGCGAGGTGCTGGGGAGC |
| | | GGCAAGACGCTCACCATCCAGGTGAAGGAATTTGGCGACGCGGGCCAGTATACCTGTCACA |
| | | AGGGCGGCGAGGTGCTGAGCCACTCCCTGCTGCTGCTGCACAAGAAGGAGGATGGGATCTG |
| | | GTCAACCGATATCCTGAAAGACCAGAAGGAGCCCAAGAACAAGACCTTCCTGCGCTGCGAG |
| | | GCCAAGAACTATAGCGGCAGGTTCACCTGCTGGTGGCTGACCACCATCAGCACCGACCTGA |
| | | CCTTCAGCGTGAAATCCTCCAGGGGCAGCAGCGACCCCCAGGGCGTGACCTGCGGTGCCGC |
| | | CACGCTCTCCGCCGAGCGAGTGAGGGGTGACAACAAGGAGTACGAGTACAGCGTGGAATGT |
| | | CAGGAGGACAGCGCCTGTCCCGCCGCCGAGGAGTCGCTGCCCATCGAGGTGATGGTCGACG |
| | | CGGTGCACAAGCTCAAATACGAGAATTACACCAGCAGCTTCTTCATCAGGGACATCATCAA |
| | | GCCCGACCCCCCCAAGAACCTGCAGCTGAAGCCCTTGAAGAACAGCAGGCAGGTGGAGGTG |
| | | AGCTGGGAGTACCCGGACACCTGGAGCACCCCCCACTCCTACTTCAGCCTGACGTTCTGTG |
| | | TGCAGGTGCAGGGGAAGTCCAAGAGGGAGAAGAAGGACCGGGTGTTCACCGACAAGACCAG |
| | | CGCCACCGTGATATGCCGCAAGAACGCGTCCATCAGCGTTCGCGCCCAGGACCGCTACTAC |
| | | AGCAGCTCCTGGTCCGAATGGGCCAGCGTGCCCTGCAGCGGTGGAGGGGGCGGGGGCTCCA |
| | | GGAATCTGCCGGTGGCCACCCCCGACCCCGGGATGTTCCCGTGTCTGCATCACTCCCAGAA |
| | | CCTGCTGCGGGCCGTGAGCAATATGCTGCAGAAGGCCAGGCAGACGCTCGAGTTCTACCCC |
| | | TGCACCTCCGAAGAGATCGACCATGAGGACATCACCAAGGACAAGACCAGCACCGTGGAGG |
| | | CCTGCCTCCCCCTGGAGCTGACCAAAAACGAGAGCTGCCTGAACTCCAGGGAGACCAGCTT |
| | | TATAACCAACGGCAGCTGCCTCGCCTCCAGGAAGACCTCGTTTATGATGGCCCTCTGCCTG |
| | | TCCAGCATCTACGAGGACCTGAAGATGTACCAGGTGGAGTTCAAGACCATGAACGCGAAGT |
| | | TGCTCATGGACCCCAAGAGGCAGATCTTCCTGGACCAGAACATGCTCGCGGTGATCGACGA |
| | | GCTGATGCAAGCCCTGAACTTCAACAGCGAGACCGTGCCCCAGAAGAGCAGCCTGGAAGAG |
| | | CCCGACTTCTACAAGACCAAGATCAAGCTGTGCATCCTGCTGCACGCCTTCCGGATCCGGG |
| | | CCGTGACCATCGACAGGGTGATGAGCTACCTCAACGCCTCCTGATAATAGGCTGGAGCCTC |
| | | GGTGGCCATGCTTCTTGCCCCTTGGGCCTCCCCCCAGCCCCTCCTCCCCTTCCTGCACCCG |
| | | TACCCCCCAAACACCATTGTCACACTCCAGTGGTCTTTGAATAAAGTCTGAGTGGGCGGC |
| 1117 | hIL12AB_038 | TCAAGCTTTTGGACCCTCGTACAGAAGCTAATACGACTCACTATAGGGAAATAAGAGAGAA |
| | | AAGAAGAGTAAGAAGAAATATAAGAGCCACCATGTGCCACCAGCAGCTCGTGATCAGCTGG |
| | | TTCTCCCTCGTCTTCCTGGCCTCCCCGCTGGTGGCCATCTGGGAGCTGAAGAAGGACGTGT |
| | | ACGTGGTGGAGCTGGACTGGTATCCCGACGCCCCCGGCGAGATGGTGGTGCTGACGTGCGA |
| | | CACACCAGAAGAGGACGGGATCACATGGACCCTGGATCAGTCGTCCGAGGTGCTGGGGAGC |
| | | GGCAAGACCCTCACCATCCAAGTGAAGGAGTTCGGGGACGCCGGCCAGTACACCTGCCACA |
| | | AGGGCGGGGAGGTGCTCTCCCATAGCCTGCTCCTCCTGCACAAAAAGGAGGATGGCATCTG |
| | | GAGCACCGACATCCTGAAGGACCAGAAGGAGCCCAAGAACAAGACATTTCTCAGGTGTGAG |
| | | GCCAAGAACTATTCGGGCAGGTTTACCTGTTGGTGGCTCACCACCATCTCTACCGACCTGA |
| | | CGTTCTCCGTCAAGTCAAGCAGGGGGAGCTCGGACCCCCAGGGGGTGACATGTGGGGCCGC |
| | | CACCCTGAGCGCGGAGCGTGTCCGCGGCGACAACAAGGAGTACGAGTATTCCGTGGAGTGC |
| | | CAGGAGGACAGCGCCTGCCCCGCCGCCGAGGAGTCCCTGCCCATAGAGGTGATGGTGGACG |
| | | CCGTCCACAAGTTGAAGTACGAAAATTATACCTCCTCGTTCTTCATTAGGGACATCATCAA |
| | | GCCTGACCCCCCGAAGAACCTACAACTCAAGCCCCTCAAGAACTCCCGCCAGGTGGAGGTG |
| | | TCCTGGGAGTACCCCGACACCTGGTCCACCCCGCACAGCTACTTCAGCCTGACCTTCTGCG |
| | | TGCAGGTCCAGGGGAAGAGCAAGCGTGAAAAGAAAGACAGGGTGTTCACCGACAAGACGAG |
| | | CGCCACCGTGATCTGCAGGAAAAACGCCTCCATCTCCGTGCGCGCCCAGGACAGGTACTAC |
| | | AGTAGCTCCTGGAGCGAATGGGCCAGCGTGCCGTGCAGCGGCGGGGGAGGAGGCGGCAGTC |
| | | GCAACCTGCCCGTGGCCACCCCCGACCCCGGCATGTTCCCATGCCTGCACCACAGCCAGAA |
| | | CCTGCTGAGGGCAGTCAGCAATATGCTGCAGAAGGCCAGGCAGACCCTGGAGTTTTATCCC |
| | | TGCACCAGCGAGGAGATCGACCACGAGGACATCACCAAGGACAAGACCTCCACCGTCGAGG |
| | | CCTGCCTGCCACTGGAGCTGACCAAAAACGAGAGCTGCCTGAACTCCAGGGAGACCTCCTT |
| | | CATCACCAACGGGAGCTGCCTGGCCAGCCGGAAGACCAGCTTCATGATGGCGCTGTGCCTC |
| | | AGCAGCATCTACGAGGATCTCAAGATGTACCAGGTGGAGTTCAAGACCATGAACGCGAAGC |
| | | TGCTGATGGACCCCAAGCGGCAGATCTTCCTGGACCAGAACATGCTGGCCGTGATTGACGA |
| | | GCTCATGCAGGCCCTGAACTTCAATAGCGAGACCGTCCCCCAAAAGAGCAGCCTGGAGGAA |
| | | CCCGACTTCTACAAAACGAAGATCAAGCTCTGCATCCTGCTGCACGCCTTCCGGATCCGGG |
| | | CCGTGACCATCGATCGTGTGATGAGCTACCTGAACGCCTCGTGATAATAGGCTGGAGCCTC |
| | | GGTGGCCATGCTTCTTGCCCCTTGGGCCTCCCCCCAGCCCCTCCTCCCCTTCCTGCACCCG |
| | | TACCCCCCAAACACCATTGTCACACTCCAGTGGTCTTTGAATAAAGTCTGAGTGGGCGGC |
| 1118 | hIL12AB_039 | TCAAGCTTTTGGACCCTCGTACAGAAGCTAATACGACTCACTATAGGGAAATAAGAGAGAA |
| | | AAGAAGAGTAAGAAGAAATATAAGAGCCACCATGTGCCACCAGCAGCTCGTCATCTCCTGG |
| | | TTTAGCCTGGTGTTTCTGGCCTCCCCCCTGGTCGCCATCTGGGAGCTGAAGAAAGACGTGT |
| | | ACGTGGTGGAGCTGGACTGGTACCCGGACGCTCCCGGGGAGATGGTGGTGCTGACCTGCGA |
| | | CACCCCCGAGGAGGACGGCATCACCTGGACCCTGGACCAGAGCTCCGAGGTGCTGGGGAGC |
| | | GGCAAGACCCTGACCATTCAGGTGAAAGAGTTCGGCGACGCCGGCCAATATACCTGCCACA |
| | | AGGGGGGGGAGGTCCTGTCGCATTCCCTGCTGCTGCTTCACAAAAAGGAGGATGGCATCTG |
| | | GAGCACCGACATCCTGAAGGACCAGAAAGAACCCAAGAACAAGACGTTCCTGCGCTGCGAG |
| | | GCCAAGAACTACAGCGGCCGGTTCACCTGTTGGTGGCTGACCACCATCTCCACCGACCTGA |
| | | CTTTCTCGGTGAAGAGCAGCCGCGGGAGCAGCGACCCCCAGGGAGTGACCTGCGGCGCCGC |
| | | CACCCTGAGCGCCGAAAGGGTGAGGGGCGACAATAAAGAGTACGAGTATTCCGTGGAGTGC |
| | | CAGGAGGACAGCGCCTGTCCCGCCGCCGAGGAGTCCCTGCCTATCGAGGTGATGGTCGACG |
| | | CGGTGCACAAGCTCAAGTACGAAAACTACACCAGCAGCTTTTTCATCAGGGATATCATCAA |
| | | ACCAGACCCCCCCAAGAACCTGCAGCTGAAGCCCCTGAAAAACAGCAGGCAGGTGGAAGTG |
| | | AGCTGGGAATACCCCGATACCTGGTCCACCCCCCACAGCTACTTCAGCCTGACCTTCTGCG |
| | | TGCAGGTGCAGGGGAAGTCCAAGCGGGAGAAGAAAGATCGGGTGTTCACGGACAAGACCAG |
| | | CGCCACCGTGATTTGCAGGAAAAACGCCAGCATCTCCGTGAGGGCTCAGGACAGGTACTAC |
| | | AGCTCCAGCTGGAGCGAGTGGGCCTCCGTGCCTTGCAGCGGGGGAGGAGGCGGCGGCAGCA |
| | | GGAATCTGCCCGTCGCAACCCCCGACCCCGGCATGTTCCCCTGCCTGCACCACAGCCAGAA |
| | | TCTGCTGCGAGCCGTGAGCAACATGCTCCAGAAGGCCCGGCAGACGCTGGAGTTCTACCCC |
| | | TGCACCTCCGAGGAGATCGACCACGAGGACATCACCAAGGATAAGACGAGCACCGTCGAGG |
| | | CCTGTCTCCCCCTGGAGCTCACCAAGAACGAGTCCTGCCTGAATAGCAGGGAGACGTCCTT |
| | | CATAACCAACGGCAGCTGTCTGGCGTCCAGGAAGACCAGCTTCATGATGGCCCTCTGCCTG |
| | | AGCTCCATCTACGAGGACCTCAAGATGTACCAGGTCGAGTTCAAGACCATGAACGCAAAAC |
| | | TGCTCATGGATCCAAAGAGGCAGATCTTTCTGGACCAGAACATGCTGGCCGTGATCGATGA |
| | | ACTCATGCAGGCCCTGAATTTCAATTCCGAGACCGTGCCCCAGAAGAGCTCCCTGGAGGAA |
| | | CCCGACTTCTACAAAACAAAGATCAAGCTGTGTATCCTCCTGCACGCCTTCCGGATCAGGG |
| | | CCGTCACCATTGACCGGGTGATGTCCTACCTGAACGCCAGCTGATAATAGGCTGGAGCCTC |
| | | GGTGGCCATGCTTCTTGCCCCTTGGGCCTCCCCCCAGCCCCTCCTCCCCTTCCTGCACCCG |
| | | TACCCCCCAAACACCATTGTCACACTCCAGTGGTCTTTGAATAAAGTCTGAGTGGGCGGC |
| 1119 | hIL12AB_040 | TCAAGCTTTTGGACCCTCGTACAGAAGCTAATACGACTCACTATAGGGAAATAAGAGAGAA |
| | | AAGAAGAGTAAGAAGAAATATAAGAGCCACCATGTGCCATCAGCAGCTGGTGATCAGCTGG |
| | | TTCAGCCTCGTGTTCCTCGCCAGCCCCCTCGTGGCCATCTGGGAGCTGAAAAAGGACGTGT |
| | | ACGTGGTGGAGCTGGACTGGTATCCCGACGCCCCGGGCGAGATGGTGGTGCTGACCTGCGA |
| | | CACCCCCGAGGAGGACGGCATTACCTGGACACTGGACCAGAGCAGCGAGGTCCTGGGCAGC |
| | | GGGAAGACCCTGACAATTCAGGTGAAGGAGTTCGGCGACGCCGGACAGTACACGTGCCACA |
| | | AGGGGGGGGAGGTGCTGTCCCACAGCCTCCTCCTGCTGCACAAGAAGGAGGATGGCATCTG |
| | | GAGCACCGACATCCTGAAGGATCAGAAGGAGCCCAAGAACAAGACCTTTCTGAGATGCGAG |
| | | GCCAAGAATTACAGCGGCCGTTTCACCTGCTGGTGGCTCACCACCATCAGCACCGACCTGA |
| | | CCTTCAGCGTGAAATCCTCCAGGGGCTCCTCCGACCCGCAGGGAGTGACCTGCGGCGCCGC |
| | | CACACTGAGCGCCGAGCGGGTCAGAGGGGACAACAAGGAGTACGAGTACAGCGTTGAGTGC |
| | | CAGGAGGACAGCGCCTGTCCCGCGGCCGAGGAATCCCTGCCCATCGAGGTGATGGTGGACG |
| | | CAGTGCACAAGCTGAAGTACGAGAACTATACCTCGAGCTTCTTCATCCGGGATATCATTAA |
| | | GCCCGATCCCCCGAAGAACCTGCAGCTCAAACCCCTGAAGAACAGCAGGCAGGTGGAGGTC |
| | | TCCTGGGAGTACCCCGACACATGGTCCACCCCCCATTCCTATTTCTCCCTGACCTTTTGCG |
| | | TGCAGGTGCAGGGCAAGAGCAAGAGGGAGAAAAAGGACAGGGTGTTCACCGACAAGACCTC |
| | | CGCCACCGTGATCTGCCGTAAGAACGCTAGCATCAGCGTCAGGGCCCAGGACAGGTACTAT |
| | | AGCAGCTCCTGGTCCGAGTGGGCCAGCGTCCCGTGCAGCGGCGGGGGCGGTGGAGGCTCCC |
| | | GGAACCTCCCCGTGGCCACCCCGGACCCCGGGATGTTTCCCTGCCTGCATCACAGCCAGAA |
| | | CCTGCTGAGGGCCGTGTCCAACATGCTGCAGAAGGCCAGGCAGACACTCGAGTTTTACCCC |
| | | TGCACCAGCGAGGAGATCGACCACGAAGACATCACCAAGGACAAGACCTCCACCGTGGAGG |
| | | CATGCCTGCCCCTGGAGCTGACCAAAAACGAAAGCTGTCTGAACTCCAGGGAGACCTCCTT |
| | | TATCACGAACGGCTCATGCCTGGCCTCCAGAAAGACCAGCTTCATGATGGCCCTGTGCCTG |
| | | AGCTCCATCTACGAGGACTTGAAAATGTACCAGGTCGAGTTCAAGACCATGAACGCCAAGC |
| | | TGCTCATGGACCCCAAAAGGCAGATCTTTCTGGACCAGAATATGCTGGCCGTGATCGACGA |
| | | GCTCATGCAAGCCCTGAATTTCAACAGCGAGACCGTGCCCCAGAAGTCCTCCCTGGAGGAG |
| | | CCCGACTTCTACAAGACCAAGATCAAGCTGTGCATACTCCTGCACGCGTTTAGGATCAGGG |
| | | CGGTGACCATCGATAGGGTGATGAGCTACCTGAATGCCTCCTGATAATAGGCTGGAGCCTC |
| | | GGTGGCCATGCTTCTTGCCCCTTGGGCCTCCCCCCAGCCCCTCCTCCCCTTCCTGCACCCG |
| | | TACCCCCCAAACACCATTGTCACACTCCAGTGGTCTTTGAATAAAGTCTGAGTGGGCGGC |

TABLE 16A
mRNA Sequences (with T100 tail)

| SEQ ID | | |
|---|---|---|
| NO | Description | Sequence |
| 1120 | hIL12AB_001 | G*GGGAAATAAGAGAGAAAAGAAGAGTAAGAAGAANFATAAGAGCCACCATGTGTCACCAG |
| | | CAGCTGGTCATTAGCTGGTTTAGCCTTGTGTTCCTGGCCTCCCCCCTTGTCGCTATTTGGG |
| | | AGCTCAAGAAGGACGTGTACGTGGTGGAGTTGGATTGGTACCCAGACGCGCCCGGAGAGAT |
| | | GGTAGTTCTGACCTGTGATACCCCAGAGGAGGACGGCATCACCTGGACGCTGGACCAAAGC |
| | | AGCGAGGTTTTGGGCTCAGGGAAAACGCTGACCATCCAGGTGAAGGAATTCGGCGACGCCG |
| | | GGCAGTACACCTGCCATAAGGGAGGAGAGGTGCTGAGCCATTCCCTTCTTCTGCTGCACAA |
| | | GAAAGAGGACGGCATCTGGTCTACCGACATCCTGAAAGACCAGAAGGAGCCCAAGAACAAA |
| | | ACCTTCCTGAGGTGCGAGGCCAAGAACTACTCCGGCAGGTTCACTTGTTGGTGGCTGACCA |
| | | CCATCAGTACAGACCTGACTTTTAGTGTAAAAAGCTCCAGAGGCTCGTCCGATCCCCAAGG |
| | | GGTGACCTGCGGCGCAGCCACTCTGAGCGCTGAGCGCGTGCGCGGTGACAATAAAGAGTAC |
| | | GAGTACAGCGTTGAGTGTCAAGAAGATAGCGCTTGCCCTGCCGCCGAGGAGAGCCTGCCTA |
| | | TCGAGGTGATGGTTGACGCAGTGCACAAGCTTAAGTACGAGAATTACACCAGCTCATTCTT |
| | | CATTAGAGATATAATCAAGCCTGACCCACCCAAGAACCTGCAGCTGAAGCCACTGAAAAAC |
| | | TCACGGCAGGTCGAAGTGAGCTGGGAGTACCCCGACACCTGGAGCACTCCTCATTCCTATT |
| | | TCTCTCTTACATTCTGCGTCCAGGTGCAGGGCAAGAGCAAGCGGGAAAAGAAGGATCGAGT |
| | | CTTCACCGACAAAACAAGCGCGACCGTGATTTGCAGGAAGAACGCCAGCATCTCCGTCAGA |
| | | GCCCAGGATAGATACTATAGTAGCAGCTGGAGCGAGTGGGCAAGCGTGCCCTGTTCCGGCG |
| | | GCGGGGGCGGGGGCAGCCGAAACTTGCCTGTCGCTACCCCGGACCCTGGAATGTTTCCGTG |
| | | TCTGCACCACAGCCAGAACCTGCTGAGAGCCGTGTCGAATATGCTCCAGAAGGCCCGGCAG |
| | | ACCCTTGAGTTCTACCCCTGTACCAGCGAAGAGATCGATCATGAAGATATCACGAAAGATA |
| | | AAACATCCACCGTCGAGGCTTGTCTCCCGCTGGAGCTGACCAAGAACGAGAGCTGTCTGAA |
| | | TAGCCGGGAGACGTCTTTCATCACGAATGGTAGCTGTCTGGCCAGCAGGAAAACTTCCTTC |
| | | ATGATGGCTCTCTGCCTGAGCTCTATCTATGAAGATCTGAAGATGTATCAGGTGGAGTTTA |
| | | AAACAATGAACGCCAAACTCCTGATGGACCCAAAAAGGCAAATCTTTCTGGACCAGAATAT |
| | | GCTGGCCGTGATAGACGAGCTGATGCAGGCACTGAACTTCAACAGCGAGACGGTGCCACAG |
| | | AAATCCAGCCTGGAGGAGCCTGACTTTTACAAAACTAAGATCAAGCTGTGTATCCTGCTGC |
| | | ACGCCTTTAGAATCCGTGCCGTGACTATCGACAGGGTGATGTCATACCTCAACGCTTCATG |
| | | ATAATAGGCTGGAGCCTCGGTGGCCATGCTTCTTGCCCCTTGGGCCTCCCCCCAGCCCCTC |
| | | CTCCCCTTCCTGCACCCGTACCCCCCAAACACCATTGTCACACTCCAGTGGTCTTTGAATA |
| | | AAGTCTGAGTGGGCGGCAAAAAAAAAAAAAAAAAAAAAAAAAAAAAAAAAAAAAAAAAAAA |
| | | AAAAAAAAAAAAAAAAAAAAAAAAAAAAAAAAAAAAAAAAAAAAAAAAAAAAAAAATCTAG |
| 1121 | hIL12AB_002 | G*GGGAAATAAGAGAGAAAAGAAGAGTAAGAAGAAATATAAGAGCCACCATGTGCCACCAG |
| | | CAGCTGGTGATCAGCTGGTTCAGCCTGGTGTTCCTGGCCAGCCCCCTGGTGGCCATCTGGG |
| | | AGCTGAAGAAGGACGTGTACGTGGTGGAGTTGGATTGGTACCCCGACGCCCCCGGCGAGAT |
| | | GGTGGTGCTGACCTGCGACACCCCCGAGGAGGACGGCATCACCTGGACCCTGGACCAGAGC |
| | | AGCGAGGTGCTGGGCAGCGGCAAGACCCTGACCATCCAGGTGAAGGAGTTCGGCGACGCCG |
| | | GCCAGTACACCTGCCACAAGGGCGGCGAGGTGCTGAGCCACAGCCTGCTGCTGCTGCACAA |
| | | GAAGGAGGACGGCATCTGGAGCACCGACATCCTGAAGGACCAGAAGGAGCCCAAGAACAAG |
| | | ACCTTCCTGAGATGCGAGGCCAAGAACTACAGCGGCAGATTCACCTGCTGGTGGCTGACCA |
| | | CCATCAGCACCGACCTGACCTTCAGCGTGAAGAGCAGCAGAGGCAGCAGCGACCCCCAGGG |
| | | CGTGACCTGCGGCGCCGCCACCCTGAGCGCCGAGAGAGTGAGAGGCGACAACAAGGAGTAC |
| | | GAGTACAGCGTGGAGTGCCAGGAAGATAGCGCCTGCCCCGCCGCCGAGGAGAGCCTGCCCA |
| | | TCGAGGTGATGGTGGACGCCGTGCACAAGCTGAAGTACGAGAACTACACCAGCAGCTTCTT |
| | | CATCAGAGATATCATCAAGCCCGACCCCCCCAAGAACCTGCAGCTGAAGCCCCTGAAGAAC |
| | | AGCCGGCAGGTGGAGGTGAGCTGGGAGTACCCCGACACCTGGAGCACCCCCCACAGCTACT |
| | | TCAGCCTGACCTTCTGCGTGCAGGTGCAGGGCAAGAGCAAGAGAGAGAAGAAAGATAGAGT |
| | | GTTCACCGACAAGACCAGCGCCACCGTGATCTGCAGAAAGAACGCCAGCATCAGCGTGAGA |
| | | GCCCAAGATAGATACTACAGCAGCAGCTGGAGCGAGTGGGCCAGCGTGCCCTGCAGCGGCG |
| | | GCGGCGGCGGCGGCAGCAGAAACCTGCCCGTGGCCACCCCCGACCCCGGCATGTTCCCCTG |
| | | CCTGCACCACAGCCAGAACCTGCTGAGAGCCGTGAGCAACATGCTGCAGAAGGCCCGGCAG |
| | | ACCCTGGAGTTCTACCCCTGCACCAGCGAGGAGATCGACCACGAAGATATCACCAAAGATA |
| | | AGACCAGCACCGTGGAGGCCTGCCTGCCCCTGGAGCTGACCAAGAACGAGAGCTGCCTGAA |
| | | CAGCAGAGAGACCAGCTTCATCACCAACGGCAGCTGCCTGGCCAGCAGAAAGACCAGCTTC |
| | | ATGATGGCCCTGTGCCTGAGCAGCATCTACGAGGACCTGAAGATGTACCAGGTGGAGTTCA |
| | | AGACCATGAACGCCAAGCTGCTGATGGACCCCAAGCGGCAGATCTTCCTGGACCAGAACAT |
| | | GCTGGCCGTGATCGACGAGCTGATGCAGGCCCTGAACTTCAACAGCGAGACCGTGCCCCAG |
| | | AAGAGCAGCCTGGAGGAGCCCGACTTCTACAAGACCAAGATCAAGCTGTGCATCCTGCTGC |
| | | ACGCCTTCAGAATCAGAGCCGTGACCATCGACAGAGTGATGAGCTACCTGAACGCCAGCTG |
| | | ATAATAGGCTGGAGCCTCGGTGGCCATGCTTCTTGCCCCTTGGGCCTCCCCCCAGCCCCTC |
| | | CTCCCCTTCCTGCACCCGTACCCCCCAAACACCATTGTCACACTCCAGTGGTCTTTGAATA |
| | | AAGTCTGAGTGGGCGGCAAAAAAAAAAAAAAAAAAAAAAAAAAAAAAAAAAAAAAAAAAAA |
| | | AAAAAAAAAAAAAAAAAAAAAAAAAAAAAAAAAAAAAAAAAAAAAAAAAAAAAAAATCTAG |
| 1122 | hIL12AB_003 | G*GGGAAATAAGAGAGAAAAGAAGAGTAAGAAGAAATATAAGAGCCACCATGTGTCACCAG |
| | | CAGTTGGTCATCTCTTGGTTTTCCCTGGTTTTTCTGGCATCTCCCCTCGTGGCCATCTGGG |
| | | AACTGAAGAAAGACGTTTACGTTGTAGAATTGGATTGGTATCCGGACGCTCCTGGAGAAAT |
| | | GGTGGTCCTCACCTGTGACACCCCTGAAGAAGACGGAATCACCTGGACCTTGGACCAGAGC |
| | | AGTGAGGTCTTAGGCTCTGGCAAAACCCTGACCATCCAAGTCAAAGAGTTTGGAGATGCTG |
| | | GCCAGTACACCTGTCACAAAGGAGGCGAGGTTCTAAGCCATTCGCTCCTGCTGCTTCACAA |
| | | AAAGGAAGATGGAATTTGGTCCACTGATATTTTAAAGGACCAGAAAGAACCCAAAAATAAG |
| | | ACCTTTCTAAGATGCGAGGCCAAGAATTATTCTGGACGTTTCACCTGCTGGTGGCTGACGA |
| | | CAATCAGTACTGATTTGACATTCAGTGTCAAAAGCAGCAGAGGCTCTTCTGACCCCCAAGG |
| | | GGTGACGTGCGGAGCTGCTACACTCTCTGCAGAGAGAGTCAGAGGTGACAACAAGGAGTAT |
| | | GAGTACTCAGTGGAGTGCCAGGAAGATAGTGCCTGCCCAGCTGCTGAGGAGAGTCTGCCCA |
| | | TTGAGGTCATGGTGGATGCCGTTCACAAGCTCAAGTATGAAAACTACACCAGCAGCTTCTT |
| | | CATCAGAGATATCATCAAACCTGACCCACCCAAGAACTTGCAGCTGAAGCCATTAAAGAAT |
| | | TCTCGGCAGGTGGAGGTCAGCTGGGAGTACCCTGACACCTGGAGTACTCCACATTCCTACT |
| | | TCTCCCTGACATTCTGCGTTCAGGTCCAGGGCAAGAGCAAGAGAGAAAAGAAAGATAGAGT |
| | | CTTCACAGATAAGACCTCAGCCACGGTCATCTGCCGCAAAAATGCCAGCATTAGCGTGCGG |
| | | GCCCAGGACCGCTACTATAGCTCATCTTGGAGCGAATGGGCATCTGTGCCCTGCAGTGGCG |
| | | GAGGGGGCGGAGGGAGCAGAAACCTCCCCGTGGCCACTCCAGACCCAGGAATGTTCCCATG |
| | | CCTTCACCACTCCCAAAACCTGCTGAGGGCCGTCAGCAACATGCTCCAGAAGGCCCGGCAA |
| | | ACTTTAGAATTTTACCCTTGCACTTCTGAAGAGATTGATCATGAAGATATCACAAAAGATA |
| | | AAACCAGCACAGTGGAGGCCTGTTTACCATTGGAATTAACCAAGAATGAGAGTTGCCTAAA |
| | | TTCCAGAGAGACCTCTTTCATAACTAATGGGAGTTGCCTGGCCTCCAGAAAGACCTCTTTT |
| | | ATGATGGCCCTGTGCCTTAGTAGTATTTATGAAGATTTGAAGATGTACCAGGTGGAGTTCA |
| | | AGACCATGAATGCAAAGCTTCTGATGGATCCTAAGAGGCAGATCTTTTTAGATCAAAACAT |
| | | GCTGGCAGTTATTGATGAGCTGATGCAGGCCCTGAATTTCAACAGTGAGACGGTGCCACAA |
| | | AAATCCTCCCTTGAAGAACCAGATTTCTACAAGACCAAGATCAAGCTCTGCATACTTCTTC |
| | | ATGCTTTCAGAATTCGGGCAGTGACTATTGATAGAGTGATGAGCTATCTGAATGCTTCCTG |
| | | ATAATAGGCTGGAGCCTCGGTGGCCATGCTTCTTGCCCCTTGGGCCTCCCCCCAGCCCCTC |
| | | CTCCCCTTCCTGCACCCGTACCCCCCAAACACCATTGTCACACTCCAGTGGTCTTTGAATA |
| | | AAGTCTGAGTGGGCGGCAAAAAAAAAAAAAAAAAAAAAAAAAAAAAAAAAAAAAAAAAAAA |
| | | AAAAAAAAAAAAAAAAAAAAAAAAAAAAAAAAAAAAAAAAAAAAAAAAAAAAAAAATCTAG |
| 1123 | hIL12AB_005 | G*GGGAAATAAGAGAGAAAAGAAGAGTAAGAAGAAATATAAGAGCCACCATGTGCCACCAG |
| | | CAGCTGGTCATCAGCTGGTTCTCCCTGGTCTTCCTGGCCAGCCCCCTGGTGGCCATCTGGG |
| | | AGCTGAAGAAAGACGTCTACGTAGTAGAGTTGGATTGGTACCCAGACGCACCTGGAGAAAT |
| | | GGTGGTTCTCACCTGTGACACGCCAGAAGAAGACGGTATCACCTGGACGCTGGACCAGAGC |
| | | TCAGAAGTTCTTGGCAGTGGAAAAACGCTGACCATACAAGTAAAAGAATTTGGGGATGCTG |
| | | GCCAGTACACCTGCCACAAAGGAGGAGAAGTTCTCAGCCACAGCCTGCTGCTGCTGCACAA |
| | | GAAAGAAGATGGCATCTGGAGCACAGATATTTTAAAAGACCAGAAGGAGCCCAAGAACAAA |
| | | ACCTTCCTTCGATGTGAGGCCAAGAACTACAGTGGCCGCTTCACCTGCTGGTGGCTCACCA |
| | | CCATCAGCACAGACCTCACCTTCTCGGTGAAGAGCAGCCGTGGCAGCTCAGACCCCCAAGG |
| | | AGTCACCTGTGGGGCGGCCACGCTGTCGGCAGAAAGAGTTCGAGGTGACAACAAGGAATAT |
| | | GAATACTCGGTGGAATGTCAAGAAGATTCGGCCTGCCCGGCGGCAGAAGAAAGTCTTCCCA |
| | | TAGAAGTCATGGTGGATGCTGTTCACAAATTAAAATATGAAAACTACACCAGCAGCTTCTT |
| | | CATCAGAGATATCATCAAGCCAGACCCGCCCAAGAACCTGCAGCTGAAGCCCCTGAAGAAC |
| | | AGCCGGCAGGTGGAAGTTTCCTGGGAGTACCCAGATACGTGGAGCACGCCGCACAGCTACT |
| | | TCAGCCTCACCTTCTGTGTACAAGTACAAGGCAAGAGCAAGAGAGAGAAGAAAGATCGTGT |
| | | CTTCACAGATAAAACCTCGGCGACGGTCATCTGCAGGAAGAATGCCTCCATCTCGGTTCGA |
| | | GCCCAGGACCGCTACTACAGCAGCAGCTGGAGTGAGTGGGCCTCGGTGCCCTGCAGTGGTG |
| | | GCGGCGGCGGCGGCAGCAGAAACCTTCCTGTGGCCACGCCGGACCCTGGCATGTTCCCGTG |
| | | CCTGCACCACAGCCAAAATTTACTTCGAGCTGTTTCTAACATGCTGCAGAAAGCACGGCAA |
| | | ACTTTAGAATTCTACCCCTGCACCTCAGAAGAAATAGACCATGAAGATATCACCAAAGATA |
| | | AAACCAGCACTGTAGAGGCCTGCCTGCCCCTGGAGCTCACCAAGAATGAATCCTGCCTCAA |
| | | CAGCAGAGAGACCAGCTTCATCACCAATGGCAGCTGCCTGGCCAGCAGGAAAACCAGCTTC |
| | | ATGATGGCGCTCTGCCTGAGCAGCATCTATGAAGATTTGAAGATGTACCAAGTAGAATTTA |
| | | AAACCATGAATGCCAAGCTGCTCATGGACCCCAAGCGGCAGATATTTTTGGATCAAAACAT |
| | | GCTGGCTGTCATTGATGAGCTCATGCAAGCATTAAACTTCAACTCAGAGACGGTGCCCCAG |
| | | AAGAGCAGCCTGGAGGAGCCAGATTTCTACAAAACCAAGATCAAGCTCTGCATCTTATTAC |
| | | ATGCCTTCCGCATCCGGGCGGTCACCATTGACCGTGTCATGTCCTACTTAAATGCCAGCTG |
| | | ATAATAGGCTGGAGCCTCGGTGGCCATGCTTCTTGCCCCTTGGGCCTCCCCCCAGCCCCTC |
| | | CTCCCCTTCCTGCACCCGTACCCCCCAAACACCATTGTCACACTCCAGTGGTCTTTGAATA |
| | | AAGTCTGAGTGGGCGGCAAAAAAAAAAAAAAAAAAAAAAAAAAAAAAAAAAAAAAAAAAAA |
| | | AAAAAAAAAAAAAAAAAAAAAAAAAAAAAAAAAAAAAAAAAAAAAAAAAAAAAAAATCTAG |
| 1124 | hIL12AB_006 | G*GGGAAATAAGAGAGAAAAGAAGAGTAAGAAGAAATATAAGAGCCACCATGTGCCACCAG |
| | | CAGCTGGTGATCAGCTGGTTCAGCCTGGTGTTCCTGGCCAGCCCCCTGGTGGCCATCTGGG |
| | | AGCTGAAGAAGGACGTGTACGTGGTGGAGTTGGATTGGTACCCCGACGCCCCCGGCGAGAT |
| | | GGTGGTGCTGACCTGTGACACCCCCGAGGAGGACGGCATCACCTGGACCCTGGACCAGAGC |
| | | AGCGAGGTGCTGGGCAGCGGCAAGACCCTGACCATCCAGGTGAAGGAGTTCGGGGACGCCG |
| | | GCCAGTACACCTGCCACAAGGGCGGCGAGGTGCTGAGCCACAGCCTGCTGCTGCTGCACAA |
| | | GAAGGAGGACGGCATCTGGAGCACAGATATCCTGAAGGACCAGAAGGAGCCCAAGAACAAG |
| | | ACCTTCCTGAGATGCGAGGCCAAGAACTACAGCGGCAGATTCACCTGCTGGTGGCTGACCA |
| | | CCATCAGCACAGATTTGACCTTCAGCGTGAAGAGCAGCAGAGGCAGCAGCGACCCCCAGGG |
| | | CGTGACCTGCGGCGCCGCCACCCTGAGCGCCGAGAGAGTGAGAGGTGACAACAAGGAGTAC |
| | | GAGTACAGCGTGGAGTGCCAGGAAGATAGCGCCTGCCCCGCCGCCGAGGAGAGCCTGCCCA |
| | | TCGAGGTGATGGTGGACGCCGTGCACAAGCTGAAGTACGAGAACTACACCAGCAGCTTCTT |
| | | CATCAGAGATATCATCAAGCCCGACCCGCCGAAGAACCTGCAGCTGAAGCCCCTGAAGAAC |
| | | AGCCGGCAGGTGGAGGTGAGCTGGGAGTACCCCGACACCTGGAGCACCCCCCACAGCTACT |
| | | TCAGCCTGACCTTCTGCGTGCAGGTGCAGGGCAAGAGCAAGAGAGAGAAGAAAGATAGAGT |
| | | GTTCACAGATAAGACCAGCGCCACCGTGATCTGCAGAAAGAACGCCAGCATCAGCGTGAGA |
| | | GCCCAAGATAGATACTACAGCAGCAGCTGGAGCGAGTGGGCCAGCGTGCCCTGCAGCGGCG |
| | | GCGGCGGCGGCGGCAGCAGAAACCTGCCCGTGGCCACCCCCGACCCCGGCATGTTCCCCTG |
| | | CCTGCACCACAGCCAGAACCTGCTGAGAGCCGTGAGCAACATGCTGCAGAAGGCCCGGCAG |
| | | ACCCTGGAGTTCTACCCCTGCACCAGCGAGGAGATCGACCACGAAGATATCACCAAAGATA |
| | | AGACCAGCACCGTGGAGGCCTGCCTGCCCCTGGAGCTGACCAAGAATGAAAGCTGCCTGAA |
| | | CAGCAGAGAGACCAGCTTCATCACCAACGGCAGCTGCCTGGCCAGCAGAAAGACCAGCTTC |
| | | ATGATGGCCCTGTGCCTGAGCAGCATCTACGAGGACCTGAAGATGTACCAGGTGGAGTTCA |
| | | AGACCATGAACGCCAAGCTGCTGATGGACCCCAAGCGGCAGATCTTCCTGGACCAGAACAT |
| | | GCTGGCCGTGATCGACGAGCTGATGCAGGCCCTGAACTTCAACAGCGAGACCGTGCCCCAG |
| | | AAGAGCAGCCTGGAGGAGCCCGACTTCTACAAGACCAAGATCAAGCTGTGCATCCTGCTGC |
| | | ACGCCTTCAGAATCAGAGCCGTGACCATCGACAGAGTGATGAGCTACCTGAACGCCAGCTG |
| | | ATAATAGGCTGGAGCCTCGGTGGCCATGCTTCTTGCCCCTTGGGCCTCCCCCCAGCCCCTC |
| | | CTCCCCTTCCTGCACCCGTACCCCCCAAACACCATTGTCACACTCCAGTGGTCTTTGAATA |
| | | AAGTCTGAGTGGGCGGCAAAAAAAAAAAAAAAAAAAAAAAAAAAAAAAAAAAAAAAAAAAA |
| | | AAAAAAAAAAAAAAAAAAAAAAAAAAAAAAAAAAAAAAAAAAAAAAAAAAAAAAAATCTAG |
| 1125 | hIL12AB_007 | G*GGGAAATAAGAGAGAAAAGAAGAGTAAGAAGAAATATAAGAGCCACCATGTGCCACCAG |
| | | CAGCTTGTCATCTCCTGGTTCTCTCTTGTCTTCCTTGCTTCTCCTCTTGTGGCCATCTGGG |
| | | AGCTGAAGAAGGACGTTTACGTAGTGGAGTTGGATTGGTACCCTGACGCACCTGGAGAAAT |
| | | GGTGGTTCTCACCTGTGACACTCCTGAGGAGGACGGTATCACCTGGACGTTGGACCAGTCT |
| | | TCTGAGGTTCTTGGCAGTGGAAAAACTCTTACTATTCAGGTGAAGGAGTTTGGAGATGCTG |
| | | GCCAGTACACCTGCCACAAGGGTGGTGAAGTTCTCAGCCACAGTTTACTTCTTCTTCACAA |
| | | GAAGGAGGATGGCATCTGGTCTACTGACATTTTAAAAGACCAGAAGGAGCCCAAGAACAAA |
| | | ACATTCCTTCGTTGTGAAGCCAAGAACTACAGTGGTCGTTTCACCTGCTGGTGGCTTACTA |
| | | CTATTTCTACTGACCTTACTTTCTCTGTGAAGTCTTCTCGTGGCTCTTCTGACCCTCAGGG |
| | | TGTCACCTGTGGGGCTGCTACTCTTTCTGCTGAGCGTGTGCGTGGTGACAACAAGGAGTAT |
| | | GAATACTCGGTGGAGTGCCAGGAAGATTCTGCCTGCCCTGCTGCTGAGGAGTCTCTTCCTA |
| | | TTGAGGTGATGGTGGATGCTGTGCACAAGTTAAAATATGAAAACTACACTTCTTCTTTCTT |
| | | CATTCGTGACATTATAAAACCTGACCCTCCCAAGAACCTTCAGTTAAAACCTTTAAAAAAC |
| | | TCTCGTCAGGTGGAGGTGTCCTGGGAGTACCCTGACACGTGGTCTACTCCTCACTCCTACT |
| | | TCTCTCTTACTTTCTGTGTCCAGGTGCAGGGCAAGTCCAAGCGTGAGAAGAAGGACCGTGT |
| | | CTTCACTGACAAAACATCTGCTACTGTCATCTGCAGGAAGAATGCATCCATCTCTGTGCGT |
| | | GCTCAGGACCGTTACTACAGCTCTTCCTGGTCTGAGTGGGCTTCTGTGCCCTGCTCTGGCG |
| | | GCGGCGGCGGCGGCAGCAGAAATCTTCCTGTGGCTACTCCTGACCCTGGCATGTTCCCCTG |
| | | CCTTCACCACTCGCAGAACCTTCTTCGTGCTGTGAGCAACATGCTTCAGAAGGCTCGTCAA |
| | | ACTTTAGAATTCTACCCCTGCACTTCTGAGGAGATTGACCATGAAGATATCACCAAAGATA |
| | | AAACATCTACTGTGGAGGCCTGCCTTCCTTTAGAGCTGACCAAGAATGAATCCTGCTTAAA |
| | | TTCTCGTGAGACGTCTTTCATCACCAATGGCAGCTGCCTTGCCTCGCGCAAAACATCTTTC |
| | | ATGATGGCTCTTTGCCTTTCTTCCATCTATGAAGATTTAAAAATGTACCAGGTGGAGTTCA |
| | | AGACCATGAATGCAAAGCTTCTCATGGACCCCAAGCGTCAGATATTTTTGGACCAGAACAT |
| | | GCTTGCTGTCATTGATGAGCTCATGCAGGCTTTAAACTTCAACTCTGAGACGGTGCCTCAG |
| | | AAGTCTTCTTTAGAAGAGCCTGACTTCTACAAGACCAAGATAAAACTTTGCATTCTTCTTC |
| | | ATGCTTTCCGCATCCGTGCTGTGACTATTGACCGTGTGATGTCCTACTTAAATGCTTCTTG |
| | | ATAATAGGCTGGAGCCTCGGTGGCCAAGCTTCTTGCCCCTTGGGCCTCCCCCCAGCCCCTC |
| | | CTCCCCTTCCTGCACCCGTACCCCCCAAACACCATTGTCACACTCCAGTGGTCTTTGAATA |
| | | AAGTCTGAGTGGGCGGCAAAAAAAAAAAAAAAAAAAAAAAAAAAAAAAAAAAAAAAAAAAA |
| | | AAAAAAAAAAAAAAAAAAAAAAAAAAAAAAAAAAAAAAAAAAAAAAAAAAAAAAAATCTAG |
| 1126 | hIL12AB_008 | G*GGGAAATAAGAGAGAAAAGAAGAGTAAGAAGAAATATAAGAGCCACCATGTGTCATCAA |
| | | CAACTCGTGATTAGCTGGTTCAGTCTCGTGTTCCTGGCCTCTCCGCTGGTGGCCATCTGGG |
| | | AGCTTAAGAAGGACGTGTACGTGGTGGAGCTCGATTGGTACCCCGACGCACCTGGCGAGAT |
| | | GGTGGTGCTAACCTGCGATACCCCCGAGGAGGACGGGATCACTTGGACCCTGGATCAGAGT |
| | | AGCGAAGTCCTGGGCTCTGGCAAAACACTCACAATCCAGGTGAAGGAATTCGGAGACGCTG |
| | | GTCAGTACACTTGCCACAAGGGGGGTGAAGTGCTGTCTCACAGCCTGCTGTTACTGCACAA |
| | | GAAGGAGGATGGGATCTGGTCAACCGACATCCTGAAGGATCAGAAGGAGCCTAAGAACAAG |
| | | ACCTTTCTGAGGTGTGAAGCTAAGAACTATTCCGGAAGATTCACTTGCTGGTGGTTGACCA |
| | | CAATCAGCACTGACCTGACCTTTTCCGTGAAGTCCAGCAGAGGAAGCAGCGATCCTCAGGG |
| | | CGTAACGTGCGGCGCGGCTACCCTGTCAGCTGAGCGGGTTAGAGGCGACAACAAAGAGTAT |
| | | GAGTACTCCGTGGAGTGTCAGGAAGATAGCGCCTGCCCCGCAGCCGAGGAGAGTCTGCCCA |
| | | TCGAGGTGATGGTGGACGCTGTCCATAAGTTAAAATACGAAAATTACACAAGTTCCTTTTT |
| | | CATCCGCGATATTATCAAACCCGATCCCCCCAAGAACCTGCAGCTGAAGCCCCTGAAGAAT |
| | | AGCCGACAGGTGGAAGTCTCTTGGGAGTATCCTGACACCTGGTCCACGCCTCACAGCTACT |
| | | TTAGTCTGACTTTCTGTGTCCAGGTCCAGGGCAAGAGCAAGAGAGAGAAAAAGGATAGAGT |
| | | GTTTACTGACAAAACATCTGCTACAGTCATCTGCAGAAAGAACGCCAGTATCTCAGTGAGG |
| | | GCGCAAGATAGATACTACAGTAGTAGCTGGAGCGAATGGGCTAGCGTGCCCTGTTCAGGGG |
| | | GCGGCGGAGGGGGCTCCAGGAATCTGCCCGTGGCCACCCCCGACCCTGGGATGTTCCCTTG |
| | | CCTCCATCACTCACAGAACCTGCTCAGAGCAGTGAGCAACATGCTCCAAAAGGCCCGCCAG |
| | | ACCCTGGAGTTTTACCCTTGTACTTCAGAAGAGATCGATCACGAAGATATAACAAAGGATA |
| | | AAACCAGCACCGTGGAGGCCTGTCTGCCTCTGGAACTCACAAAGAATGAAAGCTGTCTGAA |
| | | TTCCAGGGAAACCTCCTTCATTACTAACGGAAGCTGTCTCGCATCTCGCAAAACATCATTC |
| | | ATGATGGCCCTCTGCCTGTCTTCTATCTATGAAGATCTCAAGATGTATCAGGTGGAGTTCA |
| | | AAACAATGAACGCCAAGCTGCTGATGGACCCCAAGCGGCAGATCTTCCTGGACCAGAACAT |
| | | GCTGGCAGTGATCGATGAGCTGATGCAAGCCTTGAACTTCAACTCAGAGACGGTGCCGCAA |
| | | AAGTCCTCGTTGGAGGAACCAGATTTTTACAAAACCAAAATCAAGCTGTGTATCCTTCTTC |
| | | ACGCCTTTCGGATCAGAGCCGTGACTATCGACCGGGTGATGTCATACCTGAATGCTTCCTG |
| | | ATAATAGGCTGGAGCCTCGGTGGCCATGCTTCTTGCCCCTTGGGCCTCCCCCCAGCCCCTC |
| | | CTCCCCTTCCTGCACCCGTACCCCCCAAACACCATTGTCACACTCCAGTGGTCTTTGAATA |
| | | AAGTCTGAGTGGGCGGCAAAAAAAAAAAAAAAAAAAAAAAAAAAAAAAAAAAAAAAAAAAA |
| | | AAAAAAAAAAAAAAAAAAAAAAAAAAAAAAAAAAAAAAAAAAAAAAAAAAAAAAAATCTAG |
| 1127 | hIL12AB_009 | G*GGGAAATAAGAGAGAAAAGAAGAGTAAGAAGAAATATAAGAGCCACCATGTGCCACCAG |
| | | CAGCTGGTCATCAGCTGGTTTAGCCTGGTCTTCCTGGCCAGCCCCCTGGTGGCCATCTGGG |
| | | AGCTGAAGAAAGACGTCTACGTAGTAGAGTTGGATTGGTACCCAGACGCACCTGGAGAAAT |
| | | GGTGGTTCTCACCTGCGACACGCCAGAAGAAGACGGTATCACCTGGACGCTGGACCAGAGC |
| | | AGCGAAGTACTGGGCAGTGGAAAAACGCTGACCATACAAGTAAAAGAATTTGGCGATGCTG |
| | | GCCAGTACACCTGCCACAAAGGAGGAGAAGTACTGAGCCACAGCCTGCTGCTGCTGCACAA |
| | | GAAAGAAGATGGCATCTGGAGCACCGACATTTTAAAAGACCAGAAGGAGCCCAAGAACAAA |
| | | ACCTTCCTTCGATGTGAGGCGAAGAACTACAGTGGCCGCTTCACCTGCTGGTGGCTCACCA |
| | | CCATCAGCACCGACCTCACCTTCTCGGTGAAGAGCAGCCGTGGTAGCTCAGACCCCCAAGG |
| | | AGTCACCTGTGGGGCGGCCACGCTGTCGGCAGAAAGAGTTCGAGGCGACAACAAGGAATAT |
| | | GAATACTCGGTGGAATGTCAAGAAGATTCGGCCTGCCCGGCGGCAGAAGAAAGTCTGCCCA |
| | | TAGAAGTCATGGTGGATGCTGTTCACAAATTAAAATATGAAAACTACACCAGCAGCTTCTT |
| | | CATCAGAGATATCATCAAGCCAGACCCCCCCAAGAACCTGCAGCTGAAGCCCCTGAAGAAC |
| | | AGCCGGCAGGTGGAAGTTTCCTGGGAGTACCCAGATACGTGGAGCACGCCGCACAGCTACT |
| | | TCAGCCTCACCTTCTGTGTACAAGTACAAGGCAAGAGCAAGAGAGAGAAGAAAGATCGTGT |
| | | CTTCACCGACAAAACCTCGGCGACGGTCATCTGCAGGAAGAATGCAAGCATCTCGGTTCGA |
| | | GCCCAGGACCGCTACTACAGCAGCAGCTGGAGTGAGTGGGCCTCGGTGCCCTGCAGTGGTG |
| | | GCGGCGGCGGCGGCAGCAGAAACCTTCCTGTGGCCACGCCGGACCCTGGCATGTTTCCGTG |
| | | CCTGCACCACAGCCAAAATTTATTACGAGCTGTTAGCAACATGCTGCAGAAAGCACGGCAA |
| | | ACTTTAGAATTCTACCCCTGCACCTCAGAAGAAATAGACCATGAAGATATCACCAAAGATA |
| | | AAACCAGCACTGTAGAGGCCTGCCTGCCCCTGGAGCTCACCAAGAACGAGAGCTGCCTCAA |
| | | TAGCAGAGAGACCAGCTTCATCACCAATGGCAGCTGCCTGGCCAGCAGGAAAACCAGCTTC |
| | | ATGATGGCGCTCTGCCTGAGCAGCATCTATGAAGATCTGAAGATGTACCAAGTAGAATTTA |
| | | AAACCATGAATGCCAAGCTGCTCATGGACCCCAAGCGGCAGATATTCCTCGACCAAAACAT |
| | | GCTGGCTGTCATTGATGAGCTCATGCAAGCATTAAACTTCAACTCAGAGACGGTGCCCCAG |
| | | AAGAGCAGCCTGGAGGAGCCAGATTTCTACAAAACCAAGATCAAGCTCTGCATCTTATTAC |
| | | ATGCCTTCCGCATCCGGGCGGTCACCATTGACCGTGTCATGTCCTACTTAAATGCCAGCTG |
| | | ATAATAGGCTGGAGCCTCGGTGGCCATGCTTCTTGCCCCTTGGGCCTCCCCCCAGCCCCTC |
| | | CTCCCCTTCCTGCACCCGTACCCCCCAAACACCATTGTCACACTCCAGTGGTCTTTGAATA |
| | | AAGTCTGAGTGGGCGGCAAAAAAAAAAAAAAAAAAAAAAAAAAAAAAAAAAAAAAAAAAAA |
| | | AAAAAAAAAAAAAAAAAAAAAAAAAAAAAAAAAAAAAAAAAAAAAAAAAAAAAAAATCTAG |
| 1128 | hIL12AB_010 | G*GGGAAATAAGAGAGAAAAGAAGAGTAAGAAGAAATATAAGAGCCACCATGTGCCACCAG |
| | | CAGCTTGTCATCTCCTGGTTTTCTCTTGTCTTCCTCGCTTCTCCTCTTGTGGCCATCTGGG |
| | | AGCTGAAGAAAGACGTCTACGTAGTAGAGTTGGATTGGTACCCGGACGCTCCTGGAGAAAT |
| | | GGTGGTTCTCACCTGCGACACTCCTGAAGAAGACGGTATCACCTGGACGCTGGACCAAAGC |
| | | AGCGAAGTTTTAGGCTCTGGAAAAACGCTGACCATACAAGTAAAAGAATTTGGCGACGCTG |
| | | GCCAGTACACGTGCCACAAAGGAGGAGAAGTTTTAAGCCACAGTTTACTTCTTCTTCACAA |
| | | GAAAGAAGATGGCATCTGGAGTACAGATATTTTAAAAGACCAGAAGGAGCCTAAGAACAAA |
| | | ACCTTCCTCCGCTGTGAAGCTAAGAACTACAGTGGTCGTTTCACCTGCTGGTGGCTCACCA |
| | | CCATCTCCACTGACCTCACCTTCTCTGTAAAATCAAGCCGTGGTTCTTCTGACCCCCAAGG |
| | | AGTCACCTGTGGGGCTGCCACGCTCAGCGCTGAAAGAGTTCGAGGCGACAACAAGGAATAT |
| | | GAATATTCTGTGGAATGTCAAGAAGATTCTGCCTGCCCGGCGGCAGAAGAAAGTCTTCCCA |
| | | TAGAAGTCATGGTGGACGCTGTTCACAAATTAAAATATGAAAACTACACCAGCAGCTTCTT |
| | | CATTCGTGACATCATCAAACCAGACCCTCCTAAGAACCTTCAGTTAAAACCGCTGAAGAAC |
| | | AGCCGGCAGGTGGAAGTTTCCTGGGAGTACCCAGATACGTGGAGTACGCCGCACTCCTACT |
| | | TCAGTTTAACCTTCTGTGTACAAGTACAAGGAAAATCAAAAAGAGAGAAGAAAGATCGTGT |
| | | CTTCACTGACAAAACATCTGCCACGGTCATCTGCCGTAAGAACGCTTCCATCTCGGTTCGA |
| | | GCCCAGGACCGCTACTACAGCAGCAGCTGGAGTGAGTGGGCATCTGTTCCCTGCAGTGGTG |
| | | GCGGCGGCGGCGGCAGCCGCAACCTTCCTGTGGCCACGCCGGACCCTGGCATGTTCCCGTG |
| | | CCTTCACCACTCGCAAAATCTTCTTCGTGCTGTTTCTAACATGCTGCAGAAGGCGCGGCAA |
| | | ACTTTAGAATTCTACCCGTGCACTTCTGAAGAAATAGACCATGAAGATATCACCAAAGATA |
| | | AAACCAGCACGGTGGAGGCCTGCCTTCCTTTAGAACTTACTAAGAACGAAAGTTGCCTTAA |
| | | CAGCCGTGAGACCAGCTTCATCACCAATGGCAGCTGCCTTGCTAGCAGGAAGACCAGCTTC |
| | | ATGATGGCGCTGTGCCTTTCTTCCATCTATGAAGATCTTAAGATGTACCAAGTAGAATTTA |
| | | AAACCATGAATGCCAAATTATTAATGGACCCCAAGCGGCAGATATTCCTCGACCAAAACAT |
| | | GCTGGCTGTCATTGATGAGCTCATGCAAGCATTAAACTTCAACTCAGAAACTGTTCCCCAG |
| | | AAGTCATCTTTAGAAGAACCAGATTTCTACAAAACAAAAATAAAACTCTGCATTCTTCTTC |
| | | ATGCCTTCCGCATCCGTGCTGTCACCATTGACCGTGTCATGTCCTACTTAAATGCTTCTTG |
| | | ATAATAGGCTGGAGCCTCGGTGGCCATGCTTCTTGCCCCTTGGGCCTCCCCCCAGCCCCTC |
| | | CTCCCCTTCCTGCACCCGTACCCCCCAAACACCATTGTCACACTCCAGTGGTCTTTGAATA |
| | | AAGTCTGAGTGGGCGGCAAAAAAAAAAAAAAAAAAAAAAAAAAAAAAAAAAAAAAAAAAAA |
| | | AAAAAAAAAAAAAAAAAAAAAAAAAAAAAAAAAAAAAAAAAAAAAAAAAAAAAAAATCTAG |
| 1129 | hIL12AB_011 | G*GGGAAATAAGAGAGAAAAGAAGAGTAAGAAGAAATATAAGAGCCACCATGTGCCACCAG |
| | | CAGCTGGTGATCAGCTGGTTCAGCCTGGTGTTCCTGGCCAGCCCCCTGGTGGCCATCTGGG |
| | | AGCTGAAGAAGGACGTGTACGTGGTGGAGTTGGATTGGTACCCGGACGCGCCGGGGGAGAT |
| | | GGTGGTGCTGACGTGCGACACGCCGGAGGAGGACGGGATCACGTGGACGCTGGACCAGAGC |
| | | AGCGAGGTGCTGGGGAGCGGGAAGACGCTGACGATCCAGGTGAAGGAGTTCGGGGACGCGG |
| | | GGCAGTACACGTGCCACAAGGGGGGGGAGGTGCTGAGCCACAGCCTGCTGCTGCTGCACAA |
| | | GAAGGAGGACGGGATCTGGAGCACAGATATCCTGAAGGACCAGAAGGAGCCGAAGAACAAG |
| | | ACGTTCCTGAGGTGCGAGGCGAAGAACTACAGCGGGAGGTTCACGTGCTGGTGGCTGACGA |
| | | CGATCAGCACGGACCTGACGTTCAGCGTGAAGAGCAGCAGGGGGAGCAGCGACCCGCAGGG |
| | | GGTGACGTGCGGGGCGGCGACGCTGAGCGCGGAGAGGGTGAGGGGTGACAACAAGGAGTAC |
| | | GAGTACAGCGTGGAGTGCCAGGAAGATAGCGCGTGCCCGGCGGCGGAGGAGAGCCTGCCGA |
| | | TCGAGGTGATGGTGGACGCGGTGCACAAGCTGAAGTACGAGAACTACACGAGCAGCTTCTT |
| | | CATCAGAGATATCATCAAGCCGGACCCGCCGAAGAACCTGCAGCTGAAGCCGCTGAAGAAC |
| | | AGCAGGCAGGTGGAGGTGAGCTGGGAGTACCCAGATACGTGGAGCACGCCGCACAGCTACT |
| | | TCAGCCTGACGTTCTGCGTGCAGGTGCAGGGGAAGAGCAAGAGGGAGAAGAAAGATAGGGT |
| | | GTTCACAGATAAGACGAGCGCGACGGTGATCTGCAGGAAGAACGCGAGCATCAGCGTGAGG |
| | | GCGCAAGATAGGTACTACAGCAGCAGCTGGAGCGAGTGGGCGAGCGTGCCGTGCAGCGGGG |
| | | GGGGGGGGGGGGGGAGCAGGAACCTGCCGGTGGCGACGCCGGACCCGGGGATGTTCCCGTG |
| | | CCTGCACCACAGCCAGAACCTGCTGAGGGCGGTGAGCAACATGCTGCAGAAGGCGAGGCAG |
| | | ACGCTGGAGTTCTACCCGTGCACGAGCGAGGAGATCGACCACGAAGATATCACGAAAGATA |
| | | AGACGAGCACGGTGGAGGCGTGCCTGCCGCTGGAGCTGACGAAGAACGAGAGCTGCCTGAA |
| | | CAGCAGGGAGACGAGCTTCATCACGAACGGGAGCTGCCTGGCGAGCAGGAAGACGAGCTTC |
| | | ATGATGGCGCTGTGCCTGAGCAGCATCTACGAGGACCTGAAGATGTACCAGGTGGAGTTCA |
| | | AGACGATGAACGCGAAGCTGCTGATGGACCCGAAGAGGCAGATCTTCCTGGACCAGAACAT |
| | | GCTGGCGGTGATCGACGAGCTGATGCAGGCGCTGAACTTCAACAGCGAGACGGTGCCGCAG |
| | | AAGAGCAGCCTGGAGGAGCCAGATTTCTACAAGACGAAGATCAAGCTGTGCATCCTGCTGC |
| | | ACGCGTTCAGGATCAGGGCGGTGACGATCGACAGGGTGATGAGCTACCTGAACGCGAGCTG |
| | | ATAATAGGCTGGAGCCTCGGTGGCCATGCTTCTTGCCCCTTGGGCCTCCCCCCAGCCCCTC |
| | | CTCCCCTTCCTGCACCCGTACCCCCCAAACACCATTGTCACACTCCAGTGGTCTTTGAATA |
| | | AAGTCTGAGTGGGCGGCAAAAAAAAAAAAAAAAAAAAAAAAAAAAAAAAAAAAAAAAAAAA |
| | | AAAAAAAAAAAAAAAAAAAAAAAAAAAAAAAAAAAAAAAAAAAAAAAAAAAAAAAATCTAG |
| 1130 | hIL12AB_012 | G*GGGAAATAAGAGAGAAAAGAAGAGTAAGAAGAAATATAAGAGCCACCATGTGCCATCAG |
| | | CAGCTGGTGATCAGCTGGTTCAGCCTCGTGTTTCTGGCCAGCCCCCTGGTGGCCATTTGGG |
| | | AACTCAAGAAGGACGTGTACGTTGTGGAACTCGACTGGTACCCTGACGCCCCAGGCGAAAT |
| | | GGTGGTCTTAACCTGCGACACCCCTGAGGAGGACGGAATCACCTGGACCTTGGACCAGAGC |
| | | TCCGAGGTCCTCGGCAGTGGCAAGACCCTGACCATACAGGTGAAAGAATTTGGAGACGCAG |
| | | GGCAATACACATGTCACAAGGGCGGGGAGGTTCTTTCTCACTCCCTTCTGCTTCTACATAA |
| | | AAAGGAAGACGGAATTTGGTCTACCGACATCCTCAAGGACCAAAAGGAGCCTAAGAATAAA |
| | | ACCTTCTTACGCTGTGAAGCTAAAAACTACAGCGGCAGATTCACTTGCTGGTGGCTCACCA |
| | | CCATTTCTACCGACCTGACCTTCTCGGTGAAGTCTTCAAGGGGCTCTAGTGATCCACAGGG |
| | | AGTGACATGCGGGGCCGCCACACTGAGCGCTGAACGGGTGAGGGGCGATAACAAGGAGTAT |
| | | GAATACTCTGTCGAGTGTCAGGAGGATTCAGCTTGTCCCGCAGCTGAAGAGTCACTCCCCA |
| | | TAGAGGTTATGGTCGATGCTGTGCATAAACTGAAGTACGAAAACTACACCAGCAGCTTCTT |
| | | CATTAGAGATATTATAAAACCTGACCCCCCCAAGAACCTGCAACTTAAACCCCTGAAAAAC |
| | | TCTCGGCAGGTCGAAGTTAGCTGGGAGTACCCTGATACTTGGTCCACCCCCCACTCGTACT |
| | | TCTCACTGACTTTCTGTGTGCAGGTGCAGGGCAAGAGCAAGAGAGAGAAAAAAGATCGTGT |
| | | ATTCACAGATAAGACCTCTGCCACCGTGATCTGCAGAAAAAACGCTTCCATCAGTGTCAGA |
| | | GCCCAAGACCGGTACTATAGTAGTAGCTGGAGCGAGTGGGCAAGTGTCCCCTGCTCTGGCG |
| | | GCGGAGGGGGCGGCTCTCGAAACCTCCCCGTCGCTACCCCTGATCCAGGAATGTTCCCTTG |
| | | CCTGCATCACTCACAGAATCTGCTGAGAGCGGTCAGCAACATGCTGCAGAAAGCTAGGCAA |
| | | ACACTGGAGTTTTATCCTTGTACCTCAGAGGAGATCGACCACGAGGATATTACCAAAGATA |
| | | AGACCAGCACGGTGGAGGCCTGCTTGCCCCTGGAACTGACAAAGAATGAATCCTGCCTTAA |
| | | TAGCCGTGAGACCTCTTTTATAACAAACGGATCCTGCCTGGCCAGCAGGAAGACCTCCTTC |
| | | ATGATGGCCCTCTGCCTGTCCTCAATCTACGAAGACCTGAAGATGTACCAGGTGGAATTTA |
| | | AAACTATGAACGCCAAGCTGTTGATGGACCCCAAGCGGCAGATCTTTCTGGATCAAAATAT |
| | | GCTGGCTGTGATCGACGAACTGATGCAGGCCCTCAACTTTAACAGCGAGACCGTGCCACAA |
| | | AAGAGCAGTCTTGAGGAGCCCGACTTCTACAAGACCAAGATCAAGCTGTGCATCCTCCTTC |
| | | ATGCCTTCAGGATAAGAGCTGTCACCATCGACAGAGTCATGAGTTACCTGAATGCATCCTG |
| | | ATAATAGGCTGGAGCCTCGGTGGCCATGCTTCTTGCCCCTTGGGCCTCCCCCCAGCCCCTC |
| | | CTCCCCTTCCTGCACCCGTACCCCCCAAACACCATTGTCACACTCCAGTGGTCTTTGAATA |
| | | AAGTCTGAGTGGGCGGCAAAAAAAAAAAAAAAAAAAAAAAAAAAAAAAAAAAAAAAAAAAA |
| | | AAAAAAAAAAAAAAAAAAAAAAAAAAAAAAAAAAAAAAAAAAAAAAAAAAAAAAAATCTAG |
| 1131 | hIL12AB_013 | G*GGGAAATAAGAGAGAAAAGAAGAGTAAGAAGAAATATAAGAGCCACCATGTGCCACCAG |
| | | CAGCTGGTCATCTCCTGGTTCAGTCTTGTCTTCCTGGCCTCGCCGCTGGTGGCCATCTGGG |
| | | AGCTGAAGAAAGACGTTTACGTAGTAGAGTTGGATTGGTACCCAGACGCACCTGGAGAAAT |
| | | GGTGGTCCTCACCTGTGACACGCCAGAAGAAGACGGTATCACCTGGACGCTGGACCAGAGC |
| | | AGTGAAGTTCTTGGAAGTGGAAAAACGCTGACCATACAAGTAAAAGAATTTGGAGATGCTG |
| | | GCCAGTACACCTGCCACAAAGGAGGAGAAGTTCTCAGCCACAGTTTATTATTACTTCACAA |
| | | GAAAGAAGATGGCATCTGGTCCACAGATATTTTAAAAGACCAGAAGGAGCCCAAAAATAAA |
| | | ACATTTCTTCGATGTGAGGCCAAGAACTACAGTGGTCGTTTCACCTGCTGGTGGCTGACCA |
| | | CCATCTCCACAGACCTCACCTTCAGTGTAAAAAGCAGCCGTGGTTCTTCTGACCCCCAAGG |
| | | AGTCACCTGTGGGGCTGCCACGCTCTCTGCAGAAAGAGTTCGAGGTGACAACAAAGAATAT |
| | | GAGTACTCGGTGGAATGTCAAGAAGATTCGGCCTGCCCAGCTGCTGAGGAGAGTCTTCCCA |
| | | TAGAAGTCATGGTGGATGCTGTTCACAAATTAAAATATGAAAACTACACCAGCAGCTTCTT |
| | | CATCAGAGATATCATCAAACCTGACCCGCCCAAGAACTTACAGCTGAAGCCGCTGAAAAAC |
| | | AGCCGGCAGGTAGAAGTTTCCTGGGAGTACCCAGATACCTGGTCCACGCCGCACTCCTACT |
| | | TCTCCCTCACCTTCTGTGTACAAGTACAAGGCAAGAGCAAGAGAGAGAAGAAAGATCGTGT |
| | | CTTCACAGATAAAACATCAGCCACGGTCATCTGCAGGAAAAATGCCAGCATCTCGGTGCGG |
| | | GCCCAGGACCGCTACTACAGCAGCAGCTGGAGTGAGTGGGCATCTGTGCCCTGCAGTGGTG |
| | | GTGGGGGTGGTGGCAGCAGAAACCTTCCTGTGGCCACTCCAGACCCTGGCATGTTCCCGTG |
| | | CCTTCACCACTCCCAAAATTTACTTCGAGCTGTTTCTAACATGCTGCAGAAAGCACGGCAA |
| | | ACTTTAGAATTCTACCCGTGCACTTCTGAAGAAATTGACCATGAAGATATCACAAAAGATA |
| | | AAACCAGCACAGTGGAGGCCTGTCTTCCTTTAGAGCTGACCAAAAATGAATCCTGCCTCAA |
| | | CAGCAGAGAGACCAGCTTCATCACCAATGGCAGCTGCCTGGCCTCCAGGAAAACCAGCTTC |
| | | ATGATGGCGCTCTGCCTCAGCTCCATCTATGAAGATTTGAAGATGTACCAAGTAGAATTTA |
| | | AAACCATGAATGCCAAATTATTAATGGACCCCAAGAGGCAGATATTTTTAGATCAAAACAT |
| | | GCTGGCAGTTATTGATGAGCTCATGCAAGCATTAAACTTCAACAGTGAGACGGTACCTCAA |
| | | AAAAGCAGCCTTGAAGAGCCAGATTTCTACAAAACCAAGATCAAACTCTGCATTTTACTTC |
| | | ATGCCTTCCGCATCCGGGCGGTCACCATTGACCGTGTCATGTCCTACTTAAATGCCTCGTG |
| | | ATAATAGGCTGGAGCCTCGGTGGCCATGCTTCTTGCCCCTTGGGCCTCCCCCCAGCCCCTC |
| | | CTCCCCTTCCTGCACCCGTACCCCCCAAACACCATTGTCACACTCCAGTGGTCTTTGAATA |
| | | AAGTCTGAGTGGGCGGCAAAAAAAAAAAAAAAAAAAAAAAAAAAAAAAAAAAAAAAAAAAA |
| | | AAAAAAAAAAAAAAAAAAAAAAAAAAAAAAAAAAAAAAAAAAAAAAAAAAAAAAAATCTAG |
| 1132 | hIL12AB_014 | G*GGGAAATAAGAGAGAAAAGAAGAGTAAGAAGAAATATAAGAGCCACCATGTGCCACCAG |
| | | CAGCTTGTGATTTCTTGGTTCTCTCTTGTGTTCCTTGCTTCTCCTCTTGTGGCTATTTGGG |
| | | AGTTAAAAAAGGACGTGTACGTGGTGGAGCTTGACTGGTACCCTGACGCACCTGGCGAGAT |
| | | GGTGGTGCTTACTTGTGACACTCCTGAGGAGGACGGCATTACTTGGACGCTTGACCAGTCT |
| | | TCTGAGGTGCTTGGCTCTGGCAAAACACTTACTATTCAGGTGAAGGAGTTCGGGGATGCTG |
| | | GCCAGTACACTTGCCACAAGGGCGGCGAGGTGCTTTCTCACTCTCTTCTTCTTCTTCACAA |
| | | GAAGGAGGACGGCATTTGGTCTACTGACATTTTAAAAGACCAGAAGGAGCCCAAGAACAAA |
| | | ACATTCCTTCGTTGCGAGGCCAAGAACTACTCTGGCCGTTTCACTTGCTGGTGGCTTACTA |
| | | CTATTTCTACTGACCTTACTTTCTCTGTGAAGTCTTCTCGTGGCTCTTCTGACCCTCAGGG |
| | | CGTGACTTGTGGGGCTGCTACTCTTTCTGCTGAGCGTGTGCGTGGTGACAACAAGGAGTAC |
| | | GAGTACTCTGTGGAGTGCCAGGAAGATTCTGCTTGCCCTGCTGCTGAGGAGTCTCTTCCTA |
| | | TTGAGGTGATGGTGGATGCTGTGCACAAGTTAAAATACGAGAACTACACTTCTTCTTTCTT |
| | | CATTCGTGACATTATTAAGCCTGACCCTCCCAAGAACCTTCAGTTAAAACCTTTAAAAAAC |
| | | TCTCGTCAGGTGGAGGTGTCTTGGGAGTACCCTGACACTTGGTCTACTCCTCACTCTTACT |
| | | TCTCTCTTACTTTCTGCGTGCAGGTGCAGGGCAAGTCTAAGCGTGAGAAGAAGGACCGTGT |
| | | GTTCACTGACAAAACATCTGCTACTGTGATTTGCAGGAAGAATGCATCTATTTCTGTGCGT |
| | | GCTCAGGACCGTTACTACTCTTCTTCTTGGTCTGAGTGGGCTTCTGTGCCTTGCTCTGGCG |
| | | GCGGCGGCGGCGGCTCCAGAAATCTTCCTGTGGCTACTCCTGACCCTGGCATGTTCCCTTG |
| | | CCTTCACCACTCTCAGAACCTTCTTCGTGCTGTGAGCAACATGCTTCAGAAGGCTCGTCAA |
| | | ACTCTTGAGTTCTACCCTTGCACTTCTGAGGAGATTGACCACGAAGATATCACCAAAGATA |
| | | AAACATCTACTGTGGAGGCTTGCCTTCCTCTTGAGCTTACCAAGAATGAATCTTGCTTAAA |
| | | TTCTCGTGAGACGTCTTTCATCACCAACGGCTCTTGCCTTGCCTCGCGCAAAACATCTTTC |
| | | ATGATGGCTCTTTGCCTTTCTTCTATTTACGAAGATTTAAAAATGTACCAGGTGGAGTTCA |
| | | AAACAATGAATGCAAAGCTTCTTATGGACCCCAAGCGTCAGATTTTCCTTGACCAGAACAT |
| | | GCTTGCTGTGATTGACGAGCTTATGCAGGCTTTAAATTTCAACTCTGAGACGGTGCCTCAG |
| | | AAGTCTTCTCTTGAGGAGCCTGACTTCTACAAGACCAAGATTAAGCTTTGCATTCTTCTTC |
| | | ATGCTTTCCGTATTCGTGCTGTGACTATTGACCGTGTGATGTCTTACTTAAATGCTTCTTG |
| | | ATAATAGGCTGGAGCCTCGGTGGCCATGCTTCTTGCCCCTTGGGCCTCCCCCCAGCCCCTC |
| | | CTCCCCTTCCTGCACCCGTACCCCCCAAACACCATTGTCACACTCCAGTGGTCTTTGAATA |
| | | AAGTCTGAGTGGGCGGCAAAAAAAAAAAAAAAAAAAAAAAAAAAAAAAAAAAAAAAAAAAA |
| | | AAAAAAAAAAAAAAAAAAAAAAAAAAAAAAAAAAAAAAAAAAAAAAAAAAAAAAAATCTAG |
| 1133 | hIL12AB_015 | G*GGGAAATAAGAGAGAAAAGAAGAGTAAGAAGAAATATAAGAGCCACCATGTGTCACCAG |
| | | CAGCTGGTGATCAGCTGGTTTAGCCTGGTGTTTCTGGCCAGCCCCCTGGTGGCCATCTGGG |
| | | AACTGAAGAAAGACGTGTACGTGGTAGAACTGGATTGGTATCCGGACGCTCCCGGCGAAAT |
| | | GGTGGTGCTGACCTGTGACACCCCCGAAGAAGACGGAATCACCTGGACCCTGGACCAGAGC |
| | | AGCGAGGTGCTGGGCAGCGGCAAAACCCTGACCATCCAAGTGAAAGAGTTTGGCGATGCCG |
| | | GCCAGTACACCTGTCACAAAGGCGGCGAGGTGCTAAGCCATTCGCTGCTGCTGCTGCACAA |
| | | AAAGGAAGATGGCATCTGGAGCACCGATATCCTGAAGGACCAGAAAGAACCCAAAAATAAG |
| | | ACCTTTCTAAGATGCGAGGCCAAGAATTATAGCGGCCGTTTCACCTGCTGGTGGCTGACGA |
| | | CCATCAGCACCGATCTGACCTTCAGCGTGAAAAGCAGCAGAGGCAGCAGCGACCCCCAAGG |
| | | CGTGACGTGCGGCGCCGCCACCCTGAGCGCCGAGAGAGTGAGAGGCGACAACAAGGAGTAT |
| | | GAGTACAGCGTGGAGTGCCAGGAAGATAGCGCCTGCCCCGCCGCCGAGGAGAGCCTGCCCA |
| | | TCGAGGTGATGGTGGATGCCGTGCACAAGCTGAAGTATGAAAACTACACCAGCAGCTTCTT |
| | | CATCAGAGATATCATCAAACCCGACCCCCCCAAGAACCTGCAGCTGAAGCCCCTGAAGAAT |
| | | AGCCGGCAGGTGGAGGTGAGCTGGGAGTACCCCGACACCTGGAGCACCCCCCATAGCTACT |
| | | TCAGCCTGACCTTCTGCGTGCAGGTGCAGGGCAAGAGCAAGAGAGAAAAGAAAGATAGAGT |
| | | GTTCACAGATAAGACCAGCGCCACGGTGATCTGCAGAAAAAATGCCAGCATCAGCGTGAGA |
| | | GCCCAAGATAGATACTATAGCAGCAGCTGGAGCGAATGGGCCAGCGTGCCCTGCAGCGGCG |
| | | GCGGCGGCGGCGGCAGCAGAAACCTGCCCGTGGCCACCCCCGACCCCGGCATGTTCCCCTG |
| | | CCTGCACCACAGCCAAAACCTGCTGAGAGCCGTGAGCAACATGCTGCAGAAGGCCCGGCAG |
| | | ACCCTGGAATTTTACCCCTGCACCAGCGAAGAGATCGATCATGAAGATATCACCAAAGATA |
| | | AAACCAGCACCGTGGAGGCCTGTCTGCCCCTGGAACTGACCAAGAATGAGAGCTGCCTAAA |
| | | TAGCAGAGAGACCAGCTTCATAACCAATGGCAGCTGCCTGGCCAGCAGAAAGACCAGCTTT |
| | | ATGATGGCCCTGTGCCTGAGCAGCATCTATGAAGACCTGAAGATGTACCAGGTGGAGTTCA |
| | | AGACCATGAATGCCAAGCTGCTGATGGATCCCAAGCGGCAGATCTTTCTGGATCAAAACAT |
| | | GCTGGCCGTGATCGATGAGCTGATGCAGGCCCTGAATTTCAACAGCGAGACCGTGCCCCAA |
| | | AAAAGCAGCCTGGAAGAACCGGATTTTTATAAAACCAAAATCAAGCTGTGCATACTGCTGC |
| | | ATGCCTTCAGAATCAGAGCCGTGACCATCGATAGAGTGATGAGCTATCTGAATGCCAGCTG |
| | | ATAATAGGCTGGAGCCTCGGTGGCCATGCTTCTTGCCCCTTGGGCCTCCCCCCAGCCCCTC |
| | | CTCCCCTTCCTGCACCCGTACCCCCCAAACACCATTGTCACACTCCAGTGGTCTTTGAATA |
| | | AAGTCTGAGTGGGCGGCAAAAAAAAAAAAAAAAAAAAAAAAAAAAAAAAAAAAAAAAAAAA |
| | | AAAAAAAAAAAAAAAAAAAAAAAAAAAAAAAAAAAAAAAAAAAAAAAAAAAAAAAATCTAG |
| 1134 | hIL12AB_016 | G*GGGAAATAAGAGAGAAAAGAAGAGTAAGAAGAAATATAAGAGCCACCATGTGCCACCAG |
| | | CAGCTGGTCATCAGCTGGTTCAGCCTGGTCTTCCTGGCCAGCCCCCTGGTGGCCATCTGGG |
| | | AGCTGAAGAAGGACGTATACGTAGTGGAGTTGGATTGGTACCCAGACGCTCCTGGGGAGAT |
| | | GGTGGTGCTGACCTGTGACACCCCAGAAGAGGACGGTATCACCTGGACCCTGGACCAGAGC |
| | | TCAGAAGTGCTGGGCAGTGGAAAAACCCTGACCATCCAGGTGAAGGAGTTTGGAGATGCTG |
| | | GCCAGTACACCTGCCACAAGGGTGGTGAAGTGCTGAGCCACAGCCTGCTGCTGCTGCACAA |
| | | GAAGGAGGATGGCATCTGGAGCACAGATATCCTGAAGGACCAGAAGGAGCCCAAGAACAAG |
| | | ACCTTCCTTCGCTGTGAAGCCAAGAACTACAGTGGCCGCTTCACCTGCTGGTGGCTGACCA |
| | | CCATCAGCACAGACCTCACCTTCTCGGTGAAGAGCAGCAGAGGCAGCTCAGACCCCCAGGG |
| | | TGTCACCTGTGGGGCGGCCACGCTGTCGGCGGAGAGAGTTCGAGGTGACAACAAGGAGTAT |
| | | GAATACTCGGTGGAGTGCCAGGAAGATTCGGCGTGCCCGGCGGCAGAAGAGAGCCTGCCCA |
| | | TAGAAGTGATGGTGGATGCTGTGCACAAGCTGAAGTATGAAAACTACACCAGCAGCTTCTT |
| | | CATCAGAGATATCATCAAGCCAGACCCGCCCAAGAACCTGCAGCTGAAGCCCCTGAAGAAC |
| | | AGCCGGCAGGTGGAGGTTTCCTGGGAGTACCCAGATACGTGGAGCACCCCCCACAGCTACT |
| | | TCAGCCTGACCTTCTGTGTCCAGGTGCAGGGCAAGAGCAAGAGAGAGAAGAAAGATAGAGT |
| | | CTTCACAGATAAGACCTCGGCCACGGTCATCTGCAGAAAGAATGCCTCCATCTCGGTTCGA |
| | | GCCCAAGATAGATACTACAGCAGCAGCTGGTCAGAATGGGCCTCGGTGCCCTGCAGTGGTG |
| | | GCGGCGGCGGCGGCAGCAGAAACCTGCCTGTTGCCACCCCAGACCCTGGGATGTTCCCCTG |
| | | CCTGCACCACAGCCAGAACTTATTACGAGCTGTTTCTAACATGCTGCAGAAGGCCCGGCAG |
| | | ACCCTGGAGTTCTACCCCTGCACCTCAGAAGAGATTGACCATGAAGATATCACCAAAGATA |
| | | AGACCAGCACTGTAGAGGCCTGCCTGCCCCTGGAGCTGACCAAGAATGAAAGCTGCCTGAA |
| | | CAGCAGAGAGACCAGCTTCATCACCAATGGAAGCTGCCTGGCCAGCAGAAAGACCAGCTTC |
| | | ATGATGGCCCTGTGCCTGAGCAGCATCTATGAAGACCTGAAGATGTACCAGGTGGAGTTCA |
| | | AGACCATGAATGCAAAGCTGCTGATGGACCCCAAGCGGCAGATATTTTTGGACCAGAACAT |
| | | GCTGGCTGTCATTGATGAGCTGATGCAGGCCCTGAACTTCAACTCAGAAACTGTACCCCAG |
| | | AAGAGCAGCCTGGAGGAGCCAGATTTCTACAAGACCAAGATCAAGCTGTGCATCCTGCTTC |
| | | ATGCTTTCAGAATCAGAGCTGTCACCATTGACCGCGTGATGAGCTACTTAAATGCCTCGTG |
| | | ATAATAGGCTGGAGCCTCGGTGGCCATGCTTCTTGCCCCTTGGGCCTCCCCCCAGCCCCTC |
| | | CTCCCCTTCCTGCACCCGTACCCCCCAAACACCATTGTCACACTCCAGTGGTCTTTGAATA |
| | | AAGTCTGAGTGGGCGGCAAAAAAAAAAAAAAAAAAAAAAAAAAAAAAAAAAAAAAAAAAAA |
| | | AAAAAAAAAAAAAAAAAAAAAAAAAAAAAAAAAAAAAAAAAAAAAAAAAAAAAAAATCTAG |
| 1135 | hIL12AB_017 | G*GGGAAATAAGAGAGAAAAGAAGAGTAAGAAGAAATATAAGAGCCACCATGTGCCACCAG |
| | | CAGCTGGTAATCAGCTGGTTTTCCCTCGTCTTTCTGGCATCACCCCTGGTGGCTATCTGGG |
| | | AGCTGAAGAAGGACGTGTACGTGGTGGAGCTGGATTGGTACCCTGACGCCCCGGGGGAAAT |
| | | GGTGGTGTTAACCTGCGACACGCCTGAGGAGGACGGCATCACCTGGACGCTGGACCAGAGC |
| | | AGCGAGGTGCTTGGGTCTGGTAAAACTCTGACTATTCAGGTGAAAGAGTTCGGGGATGCCG |
| | | GCCAATATACTTGCCACAAGGGTGGCGAGGTGCTTTCTCATTCTCTGCTCCTGCTGCACAA |
| | | GAAAGAAGATGGCATTTGGTCTACTGATATTCTGAAAGACCAGAAGGAGCCCAAGAACAAG |
| | | ACCTTTCTGAGATGCGAGGCTAAAAACTACAGCGGAAGATTTACCTGCTGGTGGCTGACCA |
| | | CAATCTCAACCGACCTGACATTTTCAGTGAAGTCCAGCAGAGGGAGCTCCGACCCTCAGGG |
| | | CGTGACCTGCGGAGCCGCCACTCTGTCCGCAGAAAGAGTGAGAGGTGATAATAAGGAGTAC |
| | | GAGTATTCAGTCGAGTGCCAAGAAGATTCTGCCTGCCCAGCCGCCGAGGAGAGCCTGCCAA |
| | | TCGAGGTGATGGTAGATGCGGTACACAAGCTGAAGTATGAGAACTACACATCCTCCTTCTT |
| | | CATAAGAGATATTATCAAGCCTGACCCACCTAAAAATCTGCAACTCAAGCCTTTGAAAAAT |
| | | TCACGGCAGGTGGAGGTGAGCTGGGAGTACCCTGATACTTGGAGCACCCCCCATAGCTACT |
| | | TTTCGCTGACATTCTGCGTCCAGGTGCAGGGCAAGTCAAAGAGAGAGAAGAAGGATCGCGT |
| | | GTTCACTGATAAAACAAGCGCCACAGTGATCTGCAGAAAAAACGCTAGCATTAGCGTCAGA |
| | | GCACAGGACCGGTATTACTCCAGCTCCTGGAGCGAATGGGCATCTGTGCCCTGCAGCGGTG |
| | | GGGGCGGAGGCGGATCCAGAAACCTCCCCGTTGCCACACCTGATCCTGGAATGTTCCCCTG |
| | | TCTGCACCACAGCCAGAACCTGCTGAGAGCAGTGTCTAACATGCTCCAGAAGGCCAGGCAG |
| | | ACCCTGGAGTTTTACCCCTGCACCAGCGAGGAAATCGATCACGAAGATATCACCAAAGATA |
| | | AAACCTCCACCGTGGAGGCCTGCCTGCCCCTGGAACTGACCAAAAACGAGAGCTGCCTGAA |
| | | TAGCAGGGAGACCTCCTTCATCACCAACGGCTCATGCCTTGCCAGCCGGAAAACTAGCTTC |
| | | ATGATGGCCCTGTGCCTGTCTTCGATCTATGAGGACCTGAAAATGTACCAGGTCGAATTTA |
| | | AGACGATGAACGCAAAGCTGCTGATGGACCCCAAGCGGCAGATCTTTCTGGACCAGAACAT |
| | | GCTGGCAGTCATAGATGAGTTGATGCAGGCATTAAACTTCAACAGCGAGACCGTGCCTCAG |
| | | AAGTCCAGCCTCGAGGAGCCAGATTTTTATAAGACCAAGATCAAACTATGCATCCTGCTGC |
| | | ATGCTTTCAGGATTAGAGCCGTCACCATCGATCGAGTCATGTCTTACCTGAATGCTAGCTG |
| | | ATAATAGGCTGGAGCCTCGGTGGCCATGCTTCTTGCCCCTTGGGCCTCCCCCCAGCCCCTC |
| | | CTCCCCTTCCTGCACCCGTACCCCCCAAACACCATTGTCACACTCCAGTGGTCTTTGAATA |
| | | AAGTCTGAGTGGGCGGCAAAAAAAAAAAAAAAAAAAAAAAAAAAAAAAAAAAAAAAAAAAA |
| | | AAAAAAAAAAAAAAAAAAAAAAAAAAAAAAAAAAAAAAAAAAAAAAAAAAAAAAAATCTAG |
| 1136 | hIL12AB_018 | G*GGGAAATAAGAGAGAAAAGAAGAGTAAGAAGAAATATAAGAGCCACCATGTGTCACCAA |
| | | CAGTTAGTAATCTCCTGGTTTTCTCTGGTGTTTCTGGCCAGCCCCCTCGTGGCCATCTGGG |
| | | AGCTTAAAAAGGACGTTTACGTGGTGGAGTTGGATTGGTATCCCGACGCTCCAGGCGAAAT |
| | | GGTCGTGCTGACCTGCGATACCCCTGAAGAAGACGGTATCACCTGGACGCTGGACCAGTCT |
| | | TCCGAGGTGCTTGGATCTGGCAAAACACTGACAATACAAGTTAAGGAGTTCGGGGACGCAG |
| | | GGCAGTACACCTGCCACAAAGGCGGCGAGGTCCTGAGTCACTCCCTGTTACTGCTCCACAA |
| | | GAAAGAGGACGGCATTTGGTCCACCGACATTCTGAAGGACCAGAAGGAGCCTAAGAATAAA |
| | | ACTTTCCTGAGATGCGAGGCAAAAAACTATAGCGGCCGCTTTACTTGCTGGTGGCTTACAA |
| | | CAATCTCTACCGATTTAACTTTCTCCGTGAAGTCTAGCAGAGGATCCTCTGACCCGCAAGG |
| | | AGTGACTTGCGGAGCCGCCACCTTGAGCGCCGAAAGAGTCCGTGGCGATAACAAAGAATAC |
| | | GAGTACTCCGTGGAGTGCCAGGAAGATTCCGCCTGCCCAGCTGCCGAGGAGTCCCTGCCCA |
| | | TTGAAGTGATGGTGGATGCCGTCCACAAGCTGAAGTACGAAAACTATACCAGCAGCTTCTT |
| | | CATCCGGGATATCATTAAGCCCGACCCTCCTAAAAACCTGCAACTTAAGCCCCTAAAGAAT |
| | | AGTCGGCAGGTTGAGGTCAGCTGGGAATATCCTGACACATGGAGCACCCCCCACTCTTATT |
| | | TCTCCCTGACCTTCTGCGTGCAGGTGCAGGGCAAGAGTAAACGGGAGAAAAAAGATAGGGT |
| | | CTTTACCGATAAAACCAGCGCTACGGTTATCTGTCGGAAGAACGCTTCCATCTCCGTCCGC |
| | | GCTCAGGATCGTTACTACTCGTCCTCATGGAGCGAGTGGGCCAGCGTGCCCTGCAGCGGCG |
| | | GCGGTGGAGGCGGATCCAGAAATCTGCCTGTTGCCACACCAGACCCTGGCATGTTCCCCTG |
| | | TCTGCATCATAGCCAGAACCTGCTCAGAGCCGTGAGCAACATGCTCCAGAAGGCCAGGCAA |
| | | ACTTTGGAGTTCTACCCGTGTACATCTGAGGAAATCGATCACGAAGATATAACCAAAGATA |
| | | AAACCTCTACAGTAGAGGCTTGTTTGCCCCTGGAGTTGACCAAAAACGAGAGTTGCCTGAA |
| | | CAGTCGCGAGACGAGCTTCATTACTAACGGCAGCTGTCTCGCCTCCAGAAAAACATCCTTC |
| | | ATGATGGCCCTGTGTCTTTCCAGCATATACGAAGACCTGAAAATGTACCAGGTCGAGTTCA |
| | | AAACAATGAACGCCAAGCTGCTTATGGACCCCAAGCGGCAGATCTTCCTCGACCAAAACAT |
| | | GCTCGCTGTGATCGATGAGCTGATGCAGGCTCTCAACTTCAATTCCGAAACAGTGCCACAG |
| | | AAGTCCAGTCTGGAAGAACCCGACTTCTACAAGACCAAGATTAAGCTGTGTATTTTGCTGC |
| | | ATGCGTTTAGAATCAGAGCCGTGACCATTGATCGGGTGATGAGCTACCTGAACGCCTCGTG |
| | | ATAATAGGCTGGAGCCTCGGTGGCCATGCTTCTTGCCCCTTGGGCCTCCCCCCAGCCCCTC |
| | | CTCCCCTTCCTGCACCCGTACCCCCCAAACACCATTGTCACACTCCAGTGGTCTTTGAATA |
| | | AAGTCTGAGTGGGCGGCAAAAAAAAAAAAAAAAAAAAAAAAAAAAAAAAAAAAAAAAAAAA |
| | | AAAAAAAAAAAAAAAAAAAAAAAAAAAAAAAAAAAAAAAAAAAAAAAAAAAAAAAATCTAG |
| 1137 | hIL12AB_019 | G*GGGAAATAAGAGAGAAAAGAAGAGTAAGAAGAAATATAAGAGCCACCATGTGCCACCAG |
| | | CAGCTTGTCATCTCCTGGTTTTCTCTTGTCTTCCTGGCCTCGCCGCTGGTGGCCATCTGGG |
| | | AGCTGAAGAAAGACGTTTACGTAGTAGAGTTGGATTGGTACCCAGACGCACCTGGAGAAAT |
| | | GGTGGTTCTCACCTGTGACACTCCTGAAGAAGACGGTATCACCTGGACGCTGGACCAAAGC |
| | | TCAGAAGTTCTTGGCAGTGGAAAAACGCTGACCATACAAGTAAAAGAATTTGGGGATGCTG |
| | | GCCAGTACACGTGCCACAAAGGAGGAGAAGTTCTCAGCCACAGTTTACTTCTTCTTCACAA |
| | | GAAAGAAGATGGCATCTGGTCCACAGATATTTTAAAAGACCAGAAGGAGCCCAAGAACAAA |
| | | ACCTTCCTCCGCTGTGAGGCCAAGAACTACAGTGGTCGTTTCACCTGCTGGTGGCTCACCA |
| | | CCATCTCCACTGACCTCACCTTCTCTGTAAAAAGCAGCCGTGGTTCTTCTGACCCCCAAGG |
| | | AGTCACCTGTGGGGCTGCCACGCTCTCGGCAGAAAGAGTTCGAGGTGACAACAAGGAATAT |
| | | GAATATTCTGTGGAATGTCAAGAAGATTCTGCCTGCCCGGCGGCAGAAGAAAGTCTTCCCA |
| | | TAGAAGTCATGGTGGATGCTGTTCACAAATTAAAATATGAAAACTACACCAGCAGCTTCTT |
| | | CATTCGTGACATCATCAAACCAGACCCGCCCAAGAACCTTCAGTTAAAACCTTTAAAAAAC |
| | | AGCCGGCAGGTAGAAGTTTCCTGGGAGTACCCAGATACGTGGTCCACGCCGCACTCCTACT |
| | | TCAGTTTAACCTTCTGTGTACAAGTACAAGGAAAATCAAAAAGAGAGAAGAAAGATCGTGT |
| | | CTTCACTGACAAAACATCTGCCACGGTCATCTGCAGGAAGAATGCCTCCATCTCGGTTCGA |
| | | GCCCAGGACCGCTACTACAGCAGCAGCTGGAGTGAGTGGGCATCTGTTCCCTGCAGTGGTG |
| | | GCGGCGGCGGCGGCAGCCGCAACCTTCCTGTGGCCACGCCGGACCCTGGCATGTTCCCGTG |
| | | CCTTCACCACTCCCAAAATCTTCTTCGTGCTGTTTCTAACATGCTGCAGAAGGCGCGCCAA |
| | | ACTTTAGAATTCTACCCGTGCACTTCTGAAGAAATAGACCATGAAGATATCACCAAAGATA |
| | | AAACCAGCACGGTGGAGGCCTGCCTTCCTTTAGAGCTGACCAAGAATGAATCCTGCCTCAA |
| | | CAGCAGAGAGACCAGCTTCATCACCAATGGCAGCTGCCTGGCCTCGCGCAAGACCAGCTTC |
| | | ATGATGGCGCTGTGCCTTTCTTCCATCTATGAAGATTTAAAGATGTACCAAGTAGAATTTA |
| | | AAACCATGAATGCCAAATTATTAATGGACCCCAAACGGCAGATATTTTTGGATCAAAACAT |
| | | GCTGGCTGTCATTGATGAGCTCATGCAAGCATTAAACTTCAACTCAGAAACTGTTCCCCAG |
| | | AAGTCATCTTTAGAAGAGCCAGATTTCTACAAAACAAAAATAAAACTCTGCATTCTTCTTC |
| | | ATGCCTTCCGCATCCGTGCTGTCACCATTGACCGTGTCATGTCCTACTTAAATGCTTCTTG |
| | | ATAATAGGCTGGAGCCTCGGTGGCCATGCTTCTTGCCCCTTGGGCCTCCCCCCAGCCCCTC |
| | | CTCCCCTTCCTGCACCCGTACCCCCCAAACACCATTGTCACACTCCAGTGGTCTTTGAATA |
| | | AAGTCTGAGTGGGCGGCAAAAAAAAAAAAAAAAAAAAAAAAAAAAAAAAAAAAAAAAAAAA |
| | | AAAAAAAAAAAAAAAAAAAAAAAAAAAAAAAAAAAAAAAAAAAAAAAAAAAAAAAATCTAG |
| 1138 | hIL12AB_020 | G*GGGAAATAAGAGAGAAAAGAAGAGTAAGAAGAAATATAAGAGCCACCATGTGCCACCAG |
| | | CAGCTGGTGATCAGCTGGTTCAGCCTGGTGTTCCTGGCTAGCCCTCTGGTGGCCATCTGGG |
| | | AGCTGAAGAAGGACGTGTACGTGGTGGAGTTGGATTGGTACCCCGACGCTCCCGGCGAGAT |
| | | GGTGGTGCTGACCTGCGACACCCCCGAGGAGGACGGGATCACCTGGACCCTGGATCAGTCA |
| | | AGCGAGGTGCTGGGAAGCGGCAAGACCCTGACCATCCAGGTGAAGGAGTTCGGCGACGCCG |
| | | GCCAATACACTTGCCACAAGGGAGGCGAGGTGCTGTCCCACTCCCTCCTGCTGCTGCACAA |
| | | AAAGGAAGACGGCATCTGGAGCACCGACATCCTGAAAGAGCAGAAGGAGCCTAAGAACAAA |
| | | ACATTCCTCAGATGCGAGGCCAAGAATTACTCCGGGAGATTCACCTGTTGGTGGCTGACGA |
| | | CCATCAGCACAGACCTGACCTTCAGCGTGAAGAGCAGCAGAGGCAGCAGCGACCCCCAGGG |
| | | CGTGACCTGTGGCGCCGCCACCCTGAGCGCCGAAAGAGTGCGCGGCGACAACAAGGAGTAC |
| | | GAGTACTCCGTGGAATGCCAGGAAGATAGCGCCTGCCCCGCCGCCGAGGAGAGCCTGCCCA |
| | | TCGAGGTGATGGTGGACGCCGTCCACAAGCTGAAGTACGAGAACTACACCTCTAGCTTCTT |
| | | CATCAGAGATATCATCAAGCCCGATCCCCCCAAGAACCTGCAGCTGAAACCCCTGAAGAAC |
| | | AGCCGGCAGGTGGAGGTGAGCTGGGAGTATCCCGACACCTGGTCCACCCCCCACAGCTATT |
| | | TTAGCCTGACCTTCTGCGTGCAAGTGCAGGGCAAGAGCAAGAGAGAGAAGAAGGACCGCGT |
| | | GTTCACCGACAAAACCAGCGCCACCGTGATCTGCAGAAAGAACGCCAGCATCAGCGTGAGG |
| | | GCCCAGGATAGATACTACAGTTCCAGCTGGAGCGAGTGGGCCAGCGTGCCCTGCAGCGGCG |
| | | GCGGCGGGGGAGGCTCGAGAAACCTGCCCGTGGCTACCCCCGATCCCGGAATGTTCCCCTG |
| | | CCTGCACCACAGCCAGAACCTGCTGAGGGCGGTGTCCAACATGCTTCAGAAGGCCCGGCAG |
| | | ACCCTGGAGTTCTACCCCTGTACCTCTGAGGAGATCGATCATGAAGATATCACAAAAGATA |
| | | AAACCAGCACCGTGGAGGCCTGCCTGCCCCTGGAGCTGACCAAGAACGAGAGCTGCCTGAA |
| | | CTCCCGCGAGACCAGCTTCATCACGAACGGCAGCTGCCTGGCCAGCAGGAAGACCTCCTTC |
| | | ATGATGGCCCTGTGCCTGAGCAGCATCTACGAGGACCTGAAAATGTACCAGGTGGAGTTTA |
| | | AGACCATGAACGCCAAGCTGCTGATGGACCCCAAGCGGCAAATCTTCCTGGACCAGAACAT |
| | | GCTGGCAGTGATCGACGAGCTCATGCAGGCCCTGAACTTCAATAGCGAGACGGTCCCCCAG |
| | | AAGAGCAGCCTGGAGGAGCCCGACTTTTACAAGACCAAGATCAAGCTGTGCATCCTGCTGC |
| | | ACGCCTTTAGAATCCGTGCCGTGACCATTGACAGAGTGATGAGCTACCTGAATGCCAGCTG |
| | | ATAATAGGCTGGAGCCTCGGTGGCCATGCTTCTTGCCCCTTGGGCCTCCCCCCAGCCCCTC |
| | | CTCCCCTTCCTGCACCCGTACCCCCCAAACACCATTGTCACACTCCAGTGGTCTTTGAATA |
| | | AAGTCTGAGTGGGCGGCAAAAAAAAAAAAAAAAAAAAAAAAAAAAAAAAAAAAAAAAAAAA |
| | | AAAAAAAAAAAAAAAAAAAAAAAAAAAAAAAAAAAAAAAAAAAAAAAAAAAAAAAATCTAG |
| 1139 | hIL12AB_021 | G*GGGAAATAAGAGAGAAAAGAAGAGTAAGAAGAAATATAAGAGCCACCATGTGCCACCAG |
| | | CAGCTGGTGATCAGCTGGTTCAGCCTGGTGTTCCTGGCCAGCCCTCTGGTTGCCATCTGGG |
| | | AGCTGAAGAAAGACGTGTACGTCGTGGAACTGGACTGGTATCCGGACGCCCCGGGCGAGAT |
| | | GGTGGTGCTGACCTGTGACACCCCCGAGGAGGACGGCATCACCTGGACGCTGGACCAATCC |
| | | TCCGAGGTGCTGGGAAGCGGCAAGACCCTGACCATCCAGGTGAAGGAATTCGGGGACGCCG |
| | | GGCAGTACACCTGCCACAAGGGGGGCGAAGTGCTGTCCCACTCGCTGCTGCTCCTGCATAA |
| | | GAAGGAGGATGGAATCTGGTCCACCGACATCCTCAAAGATCAGAAGGAGCCCAAGAACAAG |
| | | ACGTTCCTGCGCTGTGAAGCCAAGAATTATTCGGGGCGATTCACGTGCTGGTGGCTGACAA |
| | | CCATCAGCACCGACCTGACGTTTAGCGTGAAGAGCAGCAGGGGGTCCAGCGACCCCCAGGG |
| | | CGTGACGTGCGGCGCCGCCACCCTCTCCGCCGAGAGGGTGCGGGGGGACAATAAGGAGTAC |
| | | GAGTACAGCGTGGAATGCCAGGAGGACAGCGCCTGCCCCGCCGCGGAGGAAAGCCTCCCGA |
| | | TAGAGGTGATGGTGGACGCCGTGCACAAGCTCAAGTATGAGAATTACACCAGCAGCTTTTT |
| | | CATCCGGGACATTATCAAGCCCGACCCCCCGAAGAACCTCCAGCTGAAGCCCCTGAAGAAC |
| | | AGCCGGCAGGTGGAAGTCTCCTGGGAGTATCCCGACACCTGGAGCACCCCGCACAGCTACT |
| | | TCTCCCTGACCTTCTGTGTGCAGGTGCAGGGCAAGTCCAAGAGGGAAAAGAAGGACAGGGT |
| | | TTTCACCGACAAGACCAGCGCGACCGTGATCTGCCGGAAGAACGCCAGCATAAGCGTCCGC |
| | | GCCCAAGATAGGTACTACAGCAGCTCCTGGAGCGAGTGGGCTAGCGTGCCCTGCAGCGGGG |
| | | GCGGGGGTGGGGGCTCCAGGAACCTGCCAGTGGCGACCCCCGACCCCGGCATGTTCCCCTG |
| | | CCTCCATCACAGCCAGAACCTGCTGAGGGCCGTCAGCAATATGCTGCAGAAGGCCAGGCAG |
| | | ACCCTGGAATTCTACCCCTGCACGTCGGAGGAGATCGATCACGAGGATATCACAAAAGACA |
| | | AGACTTCCACCGTGGAGGCCTGCCTGCCCCTGGAGCTCACCAAGAATGAGTCCTGTCTGAA |
| | | CTCCCGGGAAACCAGCTTCATCACCAACGGGTCCTGCCTGGCCAGCAGGAAGACCAGCTTT |
| | | ATGATGGCCCTGTGCCTGTCGAGCATCTACGAGGACCTGAAGATGTACCAGGTCGAGTTCA |
| | | AGACAATGAACGCCAAGCTGCTGATGGACCCCAAGAGGCAAATCTTCCTGGACCAGAATAT |
| | | GCTTGCCGTCATCGACGAGCTCATGCAGGCCCTGAACTTCAACTCCGAGACCGTGCCCCAG |
| | | AAGAGCAGCCTGGAGGAGCCCGACTTCTACAAGACCAAGATCAAGCTGTGCATCCTGCTGC |
| | | ACGCGTTCAGGATCCGGGCAGTCACCATCGACCGTGTGATGTCCTACCTGAACGCCAGCTG |
| | | ATAATAGGCTGGAGCCTCGGTGGCCATGCTTCTTGCCCCTTGGGCCTCCCCCCAGCCCCTC |
| | | CTCCCCTTCCTGCACCCGTACCCCCCAAACACCATTGTCACACTCCAGTGGTCTTTGAATA |
| | | AAGTCTGAGTGGGCGGCAAAAAAAAAAAAAAAAAAAAAAAAAAAAAAAAAAAAAAAAAAAA |
| | | AAAAAAAAAAAAAAAAAAAAAAAAAAAAAAAAAAAAAAAAAAAAAAAAAAAAAAAATCTAG |
| 1140 | hIL12AB_022 | G*GGGAAATAAGAGAGAAAAGAAGAGTAAGAAGAAATATAAGAGCCACCATGTGCCATCAG |
| | | CAGCTGGTGATCAGCTGGTTCAGCCTGGTGTTCCTCGCCTCTCCCCTGGTGGCCATCTGGG |
| | | AGCTCAAAAAGGACGTGTACGTGGTGGAGCTCGACTGGTACCCAGACGCCCCCGGGGAGAT |
| | | GGTGGTGCTGACCTGCGACACCCCCGAAGAAGACGGCATCACGTGGACCCTCGACCAGTCC |
| | | AGCGAGGTGCTGGGGAGCGGGAAGACTCTGACCATCCAGGTCAAGGAGTTCGGGGACGCCG |
| | | GGCAGTACACGTGCCACAAGGGCGGCGAAGTCTTAAGCCACAGCCTGCTCCTGCTGCACAA |
| | | GAAGGAGGACGGGATCTGGTCCACAGACATACTGAAGGACCAGAAGGAGCCGAAGAATAAA |
| | | ACCTTTCTGAGGTGCGAGGCCAAGAACTATTCCGGCAGGTTCACGTGCTGGTGGCTTACAA |
| | | CAATCAGCACAGACCTGACGTTCAGCGTGAAGTCCAGCCGCGGCAGCAGCGACCCCCAGGG |
| | | GGTGACCTGCGGCGCCGCCACCCTGAGCGCCGAGCGGGTGCGCGGGGACAACAAGGAGTAC |
| | | GAGTACTCCGTGGAGTGCCAGGAAGACAGCGCCTGTCCCGCCGCCGAAGAGAGCCTGCCTA |
| | | TCGAGGTCATGGTAGATGCAGTGCATAAGCTGAAGTACGAGAACTATACGAGCAGCTTTTT |
| | | CATACGCGACATCATCAAGCCCGACCCCCCCAAGAACCTGCAGCTTAAGCCCCTGAAGAAT |
| | | AGCCGGCAGGTGGAGGTCTCCTGGGAGTACCCCGACACCTGGTCAACGCCCCACAGCTACT |
| | | TCTCCCTGACCTTTTGTGTCCAAGTCCAGGGAAAGAGCAAGAGGGAGAAGAAAGATCGGGT |
| | | GTTCACCGACAAGACCTCCGCCACGGTGATCTGCAGGAAGAACGCCAGCATCTCCGTGAGG |
| | | GCGCAAGACAGGTACTACTCCAGCAGCTGGTCCGAATGGGCCAGCGTGCCCTGCTCCGGCG |
| | | GCGGGGGCGGCGGCAGCCGAAACCTACCCGTGGCCACGCCGGATCCCGGCATGTTTCCCTG |
| | | CCTGCACCACAGCCAGAACCTCCTGAGGGCCGTGTCCAACATGCTGCAGAAGGCCAGGCAG |
| | | ACTCTGGAGTTCTACCCCTGCACGAGCGAGGAGATCGATCACGAGGACATCACCAAGGATA |
| | | AGACCAGCACTGTGGAGGCCTGCCTTCCCCTGGAGCTGACCAAGAACGAGAGCTGTCTGAA |
| | | CTCCAGGGAGACCTCATTCATCACCAACGGCTCCTGCCTGGCCAGCAGGAAAACCAGCTTC |
| | | ATGATGGCCTTGTGTCTCAGCTCCATCTACGAGGACCTGAAGATGTATCAGGTCGAGTTCA |
| | | AGACAATGAACGCCAAGCTGCTGATGGACCCCAAAAGGCAGATCTTCCTGGACCAGAACAT |
| | | GCTGGCCGTCATCGACGAGCTGATGCAGGCCCTGAACTTCAACAGCGAGACGGTGCCCCAG |
| | | AAAAGCTCCCTGGAGGAGCCCGACTTCTACAAGACCAAGATCAAGCTGTGCATCCTGCTGC |
| | | ACGCCTTCAGGATCAGGGCAGTGACCATCGACCGGGTGATGTCATACCTTAACGCCAGCTG |
| | | ATAATAGGCTGGAGCCTCGGTGGCCATGCTTCTTGCCCCTTGGGCCTCCCCCCAGCCCCTC |
| | | CTCCCCTTCCTGCACCCGTACCCCCCAAACACCATTGTCACACTCCAGTGGTCTTTGAATA |
| | | AAGTCTGAGTGGGCGGCAAAAAAAAAAAAAAAAAAAAAAAAAAAAAAAAAAAAAAAAAAAA |
| | | AAAAAAAAAAAAAAAAAAAAAAAAAAAAAAAAAAAAAAAAAAAAAAAAAAAAAAAATCTAG |
| 1141 | hIL12AB_023 | G*GGGAAATAAGAGAGAAAAGAAGAGTAAGAAGAAATATAAGAGCCACCATGTGCCATCAG |
| | | CAGCTGGTGATCTCCTGGTTCAGCCTGGTGTTTCTGGCCTCGCCCCTGGTCGCCATCTGGG |
| | | AGCTGAAGAAAGACGTGTACGTCGTCGAACTGGACTGGTACCCCGACGCCCCCGGGGAGAT |
| | | GGTGGTGCTGACCTGCGACACGCCGGAGGAGGACGGCATCACCTGGACCCTGGATCAAAGC |
| | | AGCGAGGTGCTGGGCAGCGGCAAGACCCTGACCATCCAAGTGAAGGAATTCGGCGATGCCG |
| | | GCCAGTACACCTGTCACAAAGGGGGCGAGGTGCTCAGCCACAGCCTGCTGCTGCTGCACAA |
| | | GAAGGAGGATGGCATCTGGAGCACCGATATCCTGAAGGACCAGAAAGAGCCCAAGAACAAG |
| | | ACGTTCCTGAGGTGCGAGGCCAAGAACTACAGCGGTAGGTTCACGTGTTGGTGGCTGACCA |
| | | CCATCAGCACCGACCTGACGTTCAGCGTGAAGAGCTCCAGGGGCAGCTCCGACCCACAGGG |
| | | GGTGACGTGCGGGGCCGCAACCCTCAGCGCCGAAAGGGTGCGGGGGGACAACAAGGAGTAC |
| | | GAATACTCCGTGGAGTGCCAGGAAGATTCGGCCTGCCCCGCCGCGGAGGAGAGCCTCCCCA |
| | | TCGAGGTAATGGTGGACGCCGTGCATAAGCTGAAGTACGAGAACTACACCAGCTCGTTCTT |
| | | CATCCGAGACATCATCAAACCCGACCCGCCCAAAAATCTGCAGCTCAAGCCCCTGAAGAAC |
| | | TCCAGGCAGGTGGAGGTGAGCTGGGAGTACCCCGACACCTGGTCCACCCCGCACAGCTACT |
| | | TCTCCCTGACATTCTGCGTGCAGGTGCAGGGCAAGAGCAAGCGGGAGAAGAAGGACAGGGT |
| | | GTTCACCGACAAGACGAGCGCCACCGTGATCTGCCGAAAGAACGCCAGCATCTCGGTGCGC |
| | | GCCCAGGATAGGTACTATTCCAGCTCCTGGAGCGAGTGGGCCTCGGTACCCTGCAGCGGCG |
| | | GCGGGGGCGGCGGCAGTAGGAATCTGCCCGTGGCTACCCCGGACCCGGGCATGTTCCCCTG |
| | | CCTCCACCACAGCCAGAACCTGCTGAGGGCCGTGAGCAACATGCTGCAGAAGGCCAGACAG |
| | | ACGCTGGAGTTCTACCCCTGCACGAGCGAGGAGATCGACCACGAGGACATCACCAAGGATA |
| | | AAACTTCCACCGTCGAGGCCTGCCTGCCCTTGGAGCTGACCAAGAATGAATCCTGTCTGAA |
| | | CAGCAGGGAGACCTCGTTTATCACCAATGGCAGCTGCCTCGCCTCCAGGAAGACCAGCTTC |
| | | ATGATGGCCCTCTGTCTGAGCTCCATCTATGAGGACCTGAAGATGTACCAGGTGGAGTTCA |
| | | AGACCATGAACGCGAAGCTGCTGATGGACCCCAAGAGGCAGATCTTCCTGGATCAGAATAT |
| | | GCTGGCGGTGATCGACGAGCTCATGCAGGCCCTCAATTTCAATAGCGAGACAGTGCCCCAG |
| | | AAGTCCTCCCTGGAGGAGCCCGACTTCTACAAGACCAAGATCAAGCTGTGTATCCTGCTGC |
| | | ACGCCTTCCGGATCCGGGCCGTCACCATCGACCGGGTCATGAGCTACCTCAATGCCAGCTG |
| | | ATAATAGGCTGGAGCCTCGGTGGCCATGCTTCTTGCCCCTTGGGCCTCCCCCCAGCCCCTC |
| | | CTCCCCTTCCTGCACCCGTACCCCCCAAACACCATTGTCACACTCCAGTGGTCTTTGAATA |
| | | AAGTCTGAGTGGGCGGCAAAAAAAAAAAAAAAAAAAAAAAAAAAAAAAAAAAAAAAAAAAA |
| | | AAAAAAAAAAAAAAAAAAAAAAAAAAAAAAAAAAAAAAAAAAAAAAAAAAAAAAAATCTAG |
| 1142 | hIL12AB_024 | G*GGGAAATAAGAGAGAAAAGAAGAGTAAGAAGAAATATAAGAGCCACCATGTGCCACCAG |
| | | CAGCTGGTGATCTCCTGGTTCTCCCTGGTGTTCCTGGCCTCGCCCCTGGTGGCCATCTGGG |
| | | AGCTGAAGAAGGACGTGTACGTCGTGGAGCTCGACTGGTACCCCGACGCCCCTGGCGAGAT |
| | | GGTGGTGCTGACCTGCGACACCCCAGAGGAGGATGGCATCACCTGGACCCTGGATCAGTCC |
| | | TCCGAGGTGCTGGGCTCCGGCAAGACGCTGACCATCCAAGTGAAGGAGTTCGGTGACGCCG |
| | | GACAGTATACCTGCCATAAGGGCGGCGAGGTCCTGTCCCACAGCCTCCTCCTCCTGCATAA |
| | | GAAGGAGGACGGCATCTGGAGCACCGACATCCTGAAGGACCAGAAGGAGCCCAAGAACAAG |
| | | ACCTTTCTGAGGTGCGAGGCCAAGAACTACAGCGGCCGATTCACCTGCTGGTGGCTCACCA |
| | | CCATATCCACCGACCTGACTTTCTCCGTCAAGTCCTCCCGGGGGTCCAGCGACCCCCAGGG |
| | | AGTGACCTGCGGCGCCGCCACCCTCAGCGCCGAGCGGGTGCGGGGGGACAACAAGGAGTAC |
| | | GAATACTCCGTCGAGTGCCAGGAGGACTCCGCCTGCCCGGCCGCCGAGGAGAGCCTGCCCA |
| | | TCGAGGTGATGGTCGACGCGGTGCACAAGCTGAAGTACGAGAACTACACCAGCAGTTTCTT |
| | | CATCAGGGATATCATCAAGCCAGATCCCCCGAAGAATCTGCAACTGAAGCCGCTGAAAAAC |
| | | TCACGACAGGTGGAGGTGAGCTGGGAGTACCCCGACACGTGGAGCACCCCACATTCCTACT |
| | | TCAGCCTGACCTTCTGCGTGCAGGTCCAGGGCAAGAGCAAGCGGGAGAAGAAGGACAGGGT |
| | | GTTCACGGATAAGACCAGTGCCACCGTGATCTGCAGGAAGAACGCCTCTATTAGCGTGAGG |
| | | GCCCAGGATCGGTATTACTCCTCGAGCTGGAGCGAATGGGCCTCCGTGCCCTGCAGTGGGG |
| | | GGGGTGGAGGCGGGAGCAGGAACCTGCCCGTAGCAACCCCCGACCCCGGGATGTTCCCCTG |
| | | TCTGCACCACTCGCAGAACCTGCTGCGCGCGGTGAGCAACATGCTCCAAAAAGCCCGTCAG |
| | | ACCTTAGAGTTCTACCCCTGCACCAGCGAAGAAATCGACCACGAAGACATCACCAAGGACA |
| | | AAACCAGCACCGTGGAGGCGTGCCTGCCGCTGGAGCTGACCAAGAACGAGAGCTGCCTCAA |
| | | CTCCAGGGAGACCAGCTTTATCACCAACGGCTCGTGCCTAGCCAGCCGGAAAACCAGCTTC |
| | | ATGATGGCCCTGTGCCTGAGCTCCATTTACGAGGACCTGAAGATGTATCAGGTGGAGTTCA |
| | | AGACCATGAATGCCAAACTCCTGATGGACCCCAAGAGGCAGATCTTCCTGGACCAGAACAT |
| | | GCTCGCGGTGATCGATGAGCTGATGCAGGCCCTGAACTTTAATAGCGAGACCGTGCCCCAG |
| | | AAAAGCAGCCTGGAGGAGCCGGACTTCTACAAGACCAAAATCAAGCTGTGCATCCTGCTCC |
| | | ACGCCTTCCGCATCCGGGCCGTGACCATCGACAGGGTGATGAGCTACCTGAACGCCAGCTG |
| | | ATAATAGGCTGGAGCCTCGGTGGCCATGCTTCTTGCCCCTTGGGCCTCCCCCCAGCCCCTC |
| | | CTCCCCTTCCTGCACCCGTACCCCCCAAACACCATTGTCACACTCCAGTGGTCTTTGAATA |
| | | AAGTCTGAGTGGGCGGCAAAAAAAAAAAAAAAAAAAAAAAAAAAAAAAAAAAAAAAAAAAA |
| | | AAAAAAAAAAAAAAAAAAAAAAAAAAAAAAAAAAAAAAAAAAAAAAAAAAAAAAAATCTAG |
| 1143 | hIL12AB_025 | G*GGGAAATAAGAGAGAAAAGAAGAGTAAGAAGAAATATAAGAGCCACCATGTGCCATCAG |
| | | CAGCTGGTGATTTCCTGGTTCTCCCTGGTGTTCCTGGCCAGCCCCCTCGTGGCGATCTGGG |
| | | AGCTAAAGAAGGACGTGTACGTGGTGGAGCTGGACTGGTACCCGGACGCACCCGGCGAGAT |
| | | GGTCGTTCTGACCTGCGATACGCCAGAGGAGGACGGCATCACCTGGACCCTCGATCAGAGC |
| | | AGCGAGGTCCTGGGGAGCGGAAAGACCCTGACCATCCAGGTCAAGGAGTTCGGCGACGCCG |
| | | GCCAGTACACCTGCCACAAAGGTGGCGAGGTCCTGAGCCACTCGCTGCTGCTCCTGCATAA |
| | | GAAGGAGGACGGAATCTGGAGCACAGACATCCTGAAAGACCAGAAGGAGCCCAAGAACAAG |
| | | ACCTTCCTGAGGTGCGAGGCCAAGAACTACAGCGGGCGCTTCACGTGCTGGTGGCTGACCA |
| | | CCATCAGCACGGACCTCACCTTCTCCGTGAAGAGCAGCCGGGGATCCAGCGATCCCCAAGG |
| | | CGTCACCTGCGGCGCGGCCACCCTGAGCGCGGAGAGGGTCAGGGGCGATAATAAGGAGTAT |
| | | GAGTACAGCGTGGAGTGCCAGGAGGACAGCGCCTGCCCGGCCGCCGAGGAGTCCCTGCCAA |
| | | TCGAAGTGATGGTCGACGCCGTGCACAAGCTGAAGTACGAGAACTACACCAGCAGCTTCTT |
| | | CATCCGGGATATCATCAAGCCCGATCCCCCGAAGAACCTGCAGCTGAAGCCCCTCAAGAAC |
| | | AGCCGGCAGGTGGAGGTGAGTTGGGAGTACCCCGACACCTGGTCAACGCCCCACAGCTACT |
| | | TCTCCCTGACCTTCTGTGTGCAGGTGCAGGGAAAGAGCAAGAGGGAGAAGAAAGACCGGGT |
| | | CTTCACCGACAAGACCAGCGCCACGGTGATCTGCAGGAAGAACGCAAGCATCTCCGTGAGG |
| | | GCCCAGGACAGGTACTACAGCTCCAGCTGGTCCGAATGGGCCAGCGTGCCCTGTAGCGGCG |
| | | GCGGGGGCGGTGGCAGCCGCAACCTCCCAGTGGCCACCCCCGACCCCGGCATGTTCCCCTG |
| | | CCTGCACCACAGCCAGAATCTGCTGAGGGCCGTGAGTAACATGCTGCAGAAGGCAAGGCAA |
| | | ACCCTCGAATTCTATCCCTGCACCTCCGAGGAGATCGACCACGAGGATATCACCAAGGACA |
| | | AGACCAGCACCGTCGAGGCCTGTCTCCCCCTGGAGCTGACCAAGAATGAGAGCTGCCTGAA |
| | | CAGCCGGGAGACCAGCTTCATCACCAACGGGAGCTGCCTGGCCTCCAGGAAGACCTCGTTC |
| | | ATGATGGCGCTGTGCCTCTCAAGCATATACGAGGATCTGAAGATGTACCAGGTGGAGTTTA |
| | | AGACGATGAACGCCAAGCTGCTGATGGACCCGAAGAGGCAGATCTTCCTGGACCAGAACAT |
| | | GCTGGCCGTGATAGACGAGCTCATGCAGGCCCTGAACTTCAACTCCGAGACCGTGCCGCAG |
| | | AAGTCATCCCTCGAGGAGCCCGACTTCTATAAGACCAAGATCAAGCTGTGCATCCTGCTCC |
| | | ACGCCTTCCGGATAAGGGCCGTGACGATCGACAGGGTGATGAGCTACCTTAACGCCAGCTG |
| | | ATAATAGGCTGGAGCCTCGGTGGCCATGCTTCTTGCCCCTTGGGCCTCCCCCCAGCCCCTC |
| | | CTCCCCTTCCTGCACCCGTACCCCCCAAACACCATTGTCACACTCCAGTGGTCTTTGAATA |
| | | AAGTCTGAGTGGGCGGCAAAAAAAAAAAAAAAAAAAAAAAAAAAAAAAAAAAAAAAAAAAA |
| | | AAAAAAAAAAAAAAAAAAAAAAAAAAAAAAAAAAAAAAAAAAAAAAAAAAAAAAAATCTAG |
| 1144 | hIL12AB_026 | G*GGGAAATAAGAGAGAAAAGAAGAGTAAGAAGAAATATAAGAGCCACCATGTGCCACCAG |
| | | CAGCTCGTGATCAGCTGGTTCTCCCTGGTGTTTCTCGCCAGCCCCCTGGTGGCCATCTGGG |
| | | AGCTGAAGAAGGACGTGTACGTGGTGGAGCTGGACTGGTACCCTGACGCCCCGGGGGAGAT |
| | | GGTCGTGCTGACCTGCGACACCCCCGAAGAGGACGGTATCACCTGGACCCTGGACCAGTCC |
| | | AGCGAGGTGCTGGGCAGCGGCAAGACCCTGACTATTCAAGTCAAGGAGTTCGGAGACGCCG |
| | | GCCAGTACACCTGCCACAAGGGTGGAGAGGTGTTATCACACAGCCTGCTGCTGCTGCACAA |
| | | GAAGGAAGACGGGATCTGGAGCACCGACATCCTGAAGGACCAGAAGGAGCCCAAAAACAAG |
| | | ACCTTCCTGCGGTGCGAGGCCAAGAACTATTCGGGCCGCTTTACGTGCTGGTGGCTGACCA |
| | | CCATCAGCACTGATCTCACCTTCAGCGTGAAGTCCTCCCGGGGGTCGTCCGACCCCCAGGG |
| | | GGTGACCTGCGGGGCCGCCACCCTGTCCGCCGAGAGAGTGAGGGGCGATAATAAGGAGTAC |
| | | GAGTACAGCGTTGAGTGCCAGGAAGATAGCGCCTGTCCCGCCGCCGAGGAGAGCCTGCCCA |
| | | TCGAGGTGATGGTGGACGCCGTCCACAAGCTGAAGTATGAGAACTACACCTCAAGCTTCTT |
| | | CATCAGGGACATCATCAAACCCGATCCGCCCAAGAATCTGCAGCTGAAGCCCCTGAAAAAT |
| | | AGCAGGCAGGTGGAGGTGAGCTGGGAGTACCCCGACACCTGGTCCACCCCCCATAGCTATT |
| | | TCTCCCTGACGTTCTGCGTGCAGGTGCAAGGGAAGAGCAAGCGGGAGAAGAAGGACCGGGT |
| | | GTTCACCGACAAGACCTCCGCCACCGTGATCTGTAGGAAGAACGCGTCGATCTCGGTCAGG |
| | | GCCCAGGACAGGTATTACAGCAGCAGCTGGAGCGAGTGGGCGAGCGTGCCCTGCTCGGGCG |
| | | GCGGCGGCGGCGGGAGCAGAAATCTGCCCGTGGCCACCCCAGACCCCGGAATGTTCCCCTG |
| | | CCTGCACCATTCGCAGAACCTCCTGAGGGCCGTGAGCAACATGCTGCAGAAGGCCCGCCAG |
| | | ACGCTGGAGTTCTACCCCTGCACGAGCGAGGAGATCGACCACGAAGACATCACCAAGGACA |
| | | AAACCAGCACCGTGGAGGCCTGCCTGCCCCTGGAGCTGACCAAAAACGAATCCTGCCTCAA |
| | | CAGCCGGGAGACCAGCTTCATCACCAACGGCAGCTGCCTGGCCAGCCGAAAGACCTCCTTC |
| | | ATGATGGCCCTCTGCCTGAGCAGCATCTATGAGGATCTGAAGATGTATCAGGTGGAGTTCA |
| | | AGACCATGAATGCCAAGCTGCTGATGGACCCCAAGAGGCAGATATTCCTGGACCAGAATAT |
| | | GCTGGCCGTGATCGACGAGCTGATGCAGGCCCTGAACTTCAACAGCGAGACCGTCCCCCAG |
| | | AAGTCCAGCCTGGAGGAGCCGGACTTTTACAAAACGAAGATCAAGCTGTGCATACTGCTGC |
| | | ACGCCTTCAGGATCCGGGCCGTGACAATCGACAGGGTGATGTCCTACCTGAACGCCAGCTG |
| | | ATAATAGGCTGGAGCCTCGGTGGCCATGCTTCTTGCCCCTTGGGCCTCCCCCCAGCCCCTC |
| | | CTCCCCTTCCTGCACCCGTACCCCCCAAACACCATTGTCACACTCCAGTGGTCTTTGAATA |
| | | AAGTCTGAGTGGGCGGCAAAAAAAAAAAAAAAAAAAAAAAAAAAAAAAAAAAAAAAAAAAA |
| | | AAAAAAAAAAAAAAAAAAAAAAAAAAAAAAAAAAAAAAAAAAAAAAAAAAAAAAAATCTAG |
| 1145 | hIL12AB_027 | G*GGGAAATAAGAGAGAAAAGAAGAGTAAGAAGAAATATAAGAGCCACCATGTGTCACCAG |
| | | CAGCTGGTGATCAGCTGGTTCTCCCTGGTGTTCCTGGCCAGCCCCCTGGTGGCCATCTGGG |
| | | AGCTCAAGAAGGACGTCTACGTCGTGGAGCTGGATTGGTACCCCGACGCTCCCGGGGAGAT |
| | | GGTGGTGCTGACCTGCGACACCCCCGAGGAGGACGGCATCACCTGGACGCTGGACCAGAGC |
| | | TCAGAGGTGCTGGGAAGCGGAAAGACACTGACCATCCAGGTGAAGGAGTTCGGGGATGCCG |
| | | GGCAGTATACCTGCCACAAGGGCGGCGAAGTGCTGAGCCATTCCCTGCTGCTGCTGCACAA |
| | | GAAGGAGGACGGCATATGGTCCACCGACATCCTGAAGGATCAGAAGGAGCCGAAGAATAAA |
| | | ACCTTCCTGAGGTGCGAGGCCAAGAATTACAGCGGCCGATTCACCTGCTGGTGGCTGACCA |
| | | CCATCAGCACCGACCTGACCTTCAGTGTGAAGTCCTCACGGGGCAGCTCAGATCCCCAGGG |
| | | CGTGACCTGCGGGGCCGCGACACTCAGCGCCGAGCGGGTGAGGGGTGATAACAAGGAGTAC |
| | | GAGTATTCTGTGGAGTGCCAGGAAGACTCCGCCTGTCCCGCCGCCGAGGAGTCCCTGCCCA |
| | | TCGAGGTGATGGTGGACGCCGTGCATAAACTGAAGTACGAGAACTACACCTCCAGCTTCTT |
| | | CATCCGGGATATAATCAAGCCCGACCCTCCGAAAAACCTGCAGCTGAAGCCCCTTAAAAAC |
| | | AGCCGGCAGGTGGAGGTGAGCTGGGAGTACCCCGACACCTGGAGCACCCCCCATAGCTATT |
| | | TCAGCCTGACCTTCTGCGTGCAGGTGCAGGGGAAGTCCAAGCGCGAGAAAAAGGACCGGGT |
| | | GTTCACCGACAAGACGAGCGCCACCGTGATCTGCCGGAAGAACGCCAGTATAAGCGTAAGG |
| | | GCCCAGGATAGGTACTACAGCTCCAGCTGGTCGGAGTGGGCCTCCGTGCCCTGTTCCGGCG |
| | | GCGGGGGGGGTGGCAGCAGGAACCTCCCCGTGGCCACGCCGGACCCCGGCATGTTCCCGTG |
| | | CCTGCACCACTCCCAAAACCTCCTGCGGGCCGTCAGCAACATGCTGCAAAAGGCGCGGCAG |
| | | ACCCTGGAGTTTTACCCCTGTACCTCCGAAGAGATCGACCACGAGGATATCACCAAGGATA |
| | | AGACCTCCACCGTGGAGGCCTGTCTCCCCCTGGAGCTGACCAAGAACGAGAGCTGTCTTAA |
| | | CAGCAGAGAGACCTCGTTCATAACGAACGGCTCCTGCCTCGCTTCCAGGAAGACGTCGTTC |
| | | ATGATGGCGCTGTGCCTGTCCAGCATCTACGAGGACCTGAAGATGTATCAGGTCGAGTTCA |
| | | AAACCATGAACGCCAAGCTGCTGATGGACCCCAAGAGGCAGATCTTCCTGGACCAGAACAT |
| | | GCTCGCCGTGATCGACGAGCTGATGCAGGCCCTGAACTTCAACAGCGAAACCGTGCCCCAG |
| | | AAGTCAAGCCTGGAGGAGCCGGACTTCTATAAGACCAAGATCAAGCTGTGTATCCTGCTAC |
| | | ACGCTTTTCGTATCCGGGCCGTGACCATCGACAGGGTTATGTCGTACTTGAACGCCAGCTG |
| | | ATAATAGGCTGGAGCCTCGGTGGCCATGCTTCTTGCCCCTTGGGCCTCCCCCCAGCCCCTC |
| | | CTCCCCTTCCTGCACCCGTACCCCCCAAACACCATTGTCACACTCCAGTGGTCTTTGAATA |
| | | AAGTCTGAGTGGGCGGCAAAAAAAAAAAAAAAAAAAAAAAAAAAAAAAAAAAAAAAAAAAA |
| | | AAAAAAAAAAAAAAAAAAAAAAAAAAAAAAAAAAAAAAAAAAAAAAAAAAAAAAAATCTAG |
| 1146 | hIL12AB_028 | G*GGGAAATAAGAGAGAAAAGAAGAGTAAGAAGAAATATAAGAGCCACCATGTGCCACCAA |
| | | CAGCTCGTGATCAGCTGGTTCAGCCTGGTGTTCCTGGCCAGCCCGCTGGTGGCCATCTGGG |
| | | AGCTGAAGAAGGACGTGTACGTGGTGGAGCTGGACTGGTACCCCGACGCCCCCGGCGAGAT |
| | | GGTGGTCCTGACCTGCGACACGCCGGAAGAGGACGGCATCACCTGGACCCTGGATCAGTCC |
| | | AGCGAGGTGCTGGGCTCCGGCAAGACCCTGACCATTCAGGTGAAGGAGTTCGGCGACGCCG |
| | | GTCAGTACACCTGCCACAAGGGCGGCGAGGTGCTGAGCCACAGCCTACTGCTCCTGCACAA |
| | | AAAGGAGGATGGAATCTGGTCCACCGACATCCTCAAGGACCAGAAGGAGCCGAAGAACAAG |
| | | ACGTTCCTCCGGTGCGAGGCCAAGAACTACAGCGGCAGGTTTACCTGCTGGTGGCTGACCA |
| | | CCATCAGCACCGACCTGACATTTTCCGTGAAGAGCAGCCGCGGCAGCAGCGATCCCCAGGG |
| | | CGTGACCTGCGGGGCGGCCACCCTGTCCGCCGAGCGTGTGAGGGGCGACAACAAGGAGTAC |
| | | GAGTACAGCGTGGAATGCCAGGAGGACAGCGCCTGTCCCGCCGCCGAGGAGAGCCTGCCAA |
| | | TCGAGGTCATGGTGGACGCCGTGCACAAGCTGAAGTACGAGAACTACACGAGCAGCTTCTT |
| | | CATCAGGGACATCATCAAACCGGACCCGCCCAAGAACCTGCAGCTGAAACCCTTGAAAAAC |
| | | AGCAGGCAGGTGGAAGTGTCTTGGGAGTACCCCGACACCTGGTCCACCCCCCACAGCTACT |
| | | TTAGCCTGACCTTCTGTGTGCAGGTCCAGGGCAAGTCCAAGAGGGAGAAGAAGGACAGGGT |
| | | GTTCACCGACAAAACCAGCGCCACCGTGATCTGCAGGAAGAACGCCTCCATCAGCGTGCGG |
| | | GCCCAGGACAGGTATTACAGCTCGTCGTGGAGCGAGTGGGCCAGCGTGCCCTGCTCCGGGG |
| | | GAGGCGGCGGCGGAAGCCGGAATCTGCCCGTGGCCACCCCCGATCCCGGCATGTTCCCGTG |
| | | TCTGCACCACAGCCAGAACCTGCTGCGGGCCGTGAGCAACATGCTGCAGAAGGCCCGCCAA |
| | | ACCCTGGAGTTCTACCCCTGTACAAGCGAGGAGATCGACCATGAGGACATTACCAAGGACA |
| | | AGACCAGCACCGTGGAGGCCTGCCTGCCCCTCGAGCTCACAAAGAACGAATCCTGCCTGAA |
| | | TAGCCGCGAGACCAGCTTTATCACGAACGGGTCCTGCCTCGCCAGCCGGAAGACAAGCTTC |
| | | ATGATGGCCCTGTGCCTGAGCAGCATCTACGAGGACCTGAAAATGTACCAAGTGGAGTTCA |
| | | AAACGATGAACGCCAAGCTGCTGATGGACCCCAAGCGCCAGATCTTCCTGGACCAGAACAT |
| | | GCTGGCCGTCATCGACGAGCTCATGCAGGCCCTGAACTTCAACAGCGAGACCGTGCCCCAG |
| | | AAGAGCAGCCTGGAGGAGCCCGACTTCTACAAGACGAAGATCAAGCTCTGCATCCTGCTGC |
| | | ACGCTTTCCGCATCCGCGCGGTGACCATCGACCGGGTGATGAGCTACCTCAACGCCAGTTG |
| | | ATAATAGGCTGGAGCCTCGGTGGCCATGCTTCTTGCCCCTTGGGCCTCCCCCCAGCCCCTC |
| | | CTCCCCTTCCTGCACCCGTACCCCCCAAACACCATTGTCACACTCCAGTGGTCTTTGAATA |
| | | AAGTCTGAGTGGGCGGCAAAAAAAAAAAAAAAAAAAAAAAAAAAAAAAAAAAAAAAAAAAA |
| | | AAAAAAAAAAAAAAAAAAAAAAAAAAAAAAAAAAAAAAAAAAAAAAAAAAAAAAAATCTAG |
| 1147 | hIL12AB_029 | G*GGGAAATAAGAGAGAAAAGAAGAGTAAGAAGAAATATAAGAGCCACCATGTGCCACCAA |
| | | CAGCTGGTGATCAGCTGGTTCAGCCTGGTGTTTCTGGCCTCCCCTCTGGTGGCCATCTGGG |
| | | AGCTGAAGAAGGACGTGTACGTGGTGGAGCTGGACTGGTACCCTGACGCCCCCGGCGAAAT |
| | | GGTGGTGCTGACGTGCGACACCCCCGAGGAGGATGGCATCACCTGGACCCTGGACCAAAGC |
| | | AGCGAGGTCCTCGGAAGCGGCAAGACCCTCACTATCCAAGTGAAGGAGTTCGGGGATGCGG |
| | | GCCAGTACACCTGCCACAAGGGCGGCGAGGTGCTGTCTCATAGCCTGCTGCTCCTGCATAA |
| | | GAAGGAAGACGGCATCTGGAGCACCGACATACTGAAGGATCAGAAGGAGCCCAAGAACAAG |
| | | ACCTTCCTGAGGTGCGAGGCCAAGAACTACTCCGGGCGCTTCACCTGTTGGTGGCTGACCA |
| | | CCATCTCCACCGACCTGACCTTCAGCGTGAAGAGCAGCAGGGGGAGCAGCGACCCCCAGGG |
| | | GGTGACCTGCGGAGCCGCGACCTTGTCGGCCGAGCGGGTGAGGGGCGACAATAAGGAGTAC |
| | | GAGTACTCGGTCGAATGCCAGGAGGACTCCGCCTGCCCCGCCGCCGAGGAGTCCCTCCCCA |
| | | TCGAAGTGATGGTGGACGCCGTCCACAAGCTGAAGTACGAGAACTACACCAGCAGCTTCTT |
| | | CATACGGGATATCATCAAGCCCGACCCCCCGAAGAACCTGCAGCTGAAACCCTTGAAGAAC |
| | | TCCAGGCAGGTGGAGGTGAGCTGGGAGTACCCCGACACCTGGTCCACCCCGCACTCATACT |
| | | TCAGCCTGACCTTCTGTGTACAGGTCCAGGGCAAGAGCAAGAGGGAAAAGAAGGATAGGGT |
| | | GTTCACCGACAAGACCTCCGCCACGGTGATCTGTCGGAAAAACGCCAGCATCTCCGTGCGG |
| | | GCCCAGGACAGGTACTATTCCAGCAGCTGGAGCGAGTGGGCCTCCGTCCCCTGCTCCGGCG |
| | | GCGGTGGCGGGGGCAGCAGGAACCTCCCCGTGGCCACCCCCGATCCCGGGATGTTCCCATG |
| | | CCTGCACCACAGCCAAAACCTGCTGAGGGCCGTCTCCAATATGCTGCAGAAGGCGAGGCAG |
| | | ACCCTGGAGTTCTACCCCTGTACCTCCGAGGAGATCGACCACGAGGATATCACCAAGGACA |
| | | AGACCTCCACGGTCGAGGCGTGCCTGCCCCTGGAGCTCACGAAGAACGAGAGCTGCCTTAA |
| | | CTCCAGGGAAACCTCGTTTATCACGAACGGCAGCTGCCTGGCGTCACGGAAGACCTCCTTT |
| | | ATGATGGCCCTATGTCTGTCCTCGATCTACGAGGACCTGAAGATGTACCAGGTGGAGTTCA |
| | | AGACCATGAACGCCAAGCTGCTGATGGATCCCAAGAGGCAGATTTTCCTGGACCAGAACAT |
| | | GCTGGCCGTGATTGACGAGCTGATGCAGGCGCTGAACTTCAACAGCGAGACAGTGCCGCAG |
| | | AAGAGCTCCCTGGAGGAGCCGGACTTTTACAAGACCAAGATAAAGCTGTGCATCCTGCTCC |
| | | ACGCCTTCAGAATACGGGCCGTCACCATCGATAGGGTGATGTCTTACCTGAACGCCTCCTG |
| | | ATAATAGGCTGGAGCCTCGGTGGCCATGCTTCTTGCCCCTTGGGCCTCCCCCCAGCCCCTC |
| | | CTCCCCTTCCTGCACCCGTACCCCCCAAACACCATTGTCACACTCCAGTGGTCTTTGAATA |
| | | AAGTCTGAGTGGGCGGCAAAAAAAAAAAAAAAAAAAAAAAAAAAAAAAAAAAAAAAAAAAA |
| | | AAAAAAAAAAAAAAAAAAAAAAAAAAAAAAAAAAAAAAAAAAAAAAAAAAAAAAAATCTAG |
| 1148 | hIL12AB_030 | G*GGGAAATAAGAGAGAAAAGAAGAGTAAGAAGAAATATAAGAGCCACCATGTGCCACCAG |
| | | CAGCTGGTGATTAGCTGGTTTAGCCTGGTGTTCCTGGCAAGCCCCCTGGTGGCCATCTGGG |
| | | AACTGAAAAAGGACGTGTACGTGGTCGAGCTGGATTGGTACCCCGACGCCCCCGGCGAAAT |
| | | GGTGGTGCTGACGTGTGATACCCCCGAGGAGGACGGGATCACCTGGACCCTGGATCAGAGC |
| | | AGCGAGGTGCTGGGGAGCGGGAAGACCCTGACGATCCAGGTCAAGGAGTTCGGCGACGCTG |
| | | GGCAGTACACCTGTCACAAGGGCGGGGAGGTGCTGTCCCACTCCCTGCTGCTCCTGCATAA |
| | | GAAAGAGGACGGCATCTGGTCCACCGACATCCTCAAGGACCAGAAGGAGCCCAAGAACAAG |
| | | ACCTTCCTGCGGTGTGAGGCGAAGAACTACAGCGGCCGTTTCACCTGCTGGTGGCTGACGA |
| | | CAATCAGCACCGACTTGACGTTCTCCGTGAAGTCCTCCAGAGGCAGCTCCGACCCCCAAGG |
| | | GGTGACGTGCGGCGCGGCCACCCTGAGCGCCGAGCGGGTGCGGGGGGACAACAAGGAGTAC |
| | | GAGTACTCCGTGGAGTGCCAGGAGGACAGCGCCTGTCCCGCAGCCGAGGAGTCCCTGCCCA |
| | | TCGAAGTCATGGTGGACGCCGTCCACAAGCTGAAGTACGAGAACTACACCAGCAGCTTCTT |
| | | CATCCGCGATATCATCAAGCCCGATCCCCCCAAAAACCTGCAACTGAAGCCGCTGAAGAAT |
| | | AGCAGGCAGGTGGAGGTGTCCTGGGAGTACCCGGACACCTGGAGCACGCCCCACAGCTATT |
| | | TCAGCCTGACCTTTTGCGTGCAGGTCCAGGGGAAGAGCAAGCGGGAGAAGAAGGACCGCGT |
| | | GTTTACGGACAAAACCAGCGCCACCGTGATCTGCAGGAAGAACGCCAGCATCAGCGTGAGG |
| | | GCCCAGGACAGGTACTACAGCAGCTCCTGGAGCGAGTGGGCCTCCGTGCCCTGTTCCGGAG |
| | | GCGGCGGGGGCGGTTCCCGGAACCTCCCGGTGGCCACCCCCGACCCGGGCATGTTCCCGTG |
| | | CCTGCACCACTCACAGAATCTGCTGAGGGCCGTGAGCAATATGCTGCAGAAGGCAAGGCAG |
| | | ACCCTGGAGTTTTATCCCTGCACCAGCGAGGAGATCGACCACGAAGACATCACCAAGGACA |
| | | AGACCAGCACAGTGGAGGCCTGCCTGCCCCTGGAACTGACCAAGAACGAGTCCTGTCTGAA |
| | | CTCCCGGGAAACCAGCTTCATAACCAACGGCTCCTGTCTCGCCAGCAGGAAGACCAGCTTC |
| | | ATGATGGCCCTGTGCCTCAGCTCCATCTACGAGGACCTCAAGATGTACCAGGTTGAGTTCA |
| | | AGACCATGAACGCCAAGCTCCTGATGGACCCCAAGAGGCAGATCTTCCTGGACCAGAATAT |
| | | GCTGGCCGTGATCGATGAGTTAATGCAGGCGCTGAACTTCAACAGCGAGACGGTGCCCCAA |
| | | AAGTCCTCGCTGGAGGAGCCCGACTTCTACAAGACCAAGATCAAGCTGTGCATCCTCCTGC |
| | | ACGCCTTCCGAATCCGGGCCGTAACCATCGACAGGGTGATGAGCTATCTCAACGCCTCCTG |
| | | ATAATAGGCTGGAGCCTCGGTGGCCATGCTTCTTGCCCCTTGGGCCTCCCCCCAGCCCCTC |
| | | CTCCCCTTCCTGCACCCGTACCCCCCAAACACCATTGTCACACTCCAGTGGTCTTTGAATA |
| | | AAGTCTGAGTGGGCGGCAAAAAAAAAAAAAAAAAAAAAAAAAAAAAAAAAAAAAAAAAAAA |
| | | AAAAAAAAAAAAAAAAAAAAAAAAAAAAAAAAAAAAAAAAAAAAAAAAAAAAAAAATCTAG |
| 1149 | hIL12AB_031 | G*GGGAAATAAGAGAGAAAAGAAGAGTAAGAAGAAATATAAGAGCCACCATGTGCCACCAG |
| | | CAGCTCGTGATCAGCTGGTTCTCGCTTGTGTTCCTGGCCTCCCCCCTCGTCGCCATCTGGG |
| | | AGCTGAAGAAAGACGTGTACGTGGTGGAGCTGGACTGGTATCCCGACGCCCCGGGGGAGAT |
| | | GGTGGTGCTGACCTGCGACACCCCGGAAGAGGACGGCATCACCTGGACGCTCGACCAGTCG |
| | | TCCGAAGTGCTGGGGTCGGGCAAGACCCTCACCATCCAGGTGAAGGAGTTCGGAGACGCCG |
| | | GCCAGTACACCTGTCATAAGGGGGGGGAGGTGCTGAGCCACAGCCTCCTGCTCCTGCACAA |
| | | AAAGGAGGACGGCATCTGGAGCACCGATATCCTCAAGGACCAGAAGGAGCCCAAGAACAAG |
| | | ACGTTCCTGAGGTGTGAGGCCAAGAACTACAGCGGGCGGTTCACGTGTTGGTGGCTCACCA |
| | | CCATCTCCACCGACCTCACCTTCTCCGTGAAGTCAAGCAGGGGCAGCTCCGACCCCCAAGG |
| | | CGTCACCTGCGGCGCCGCCACCCTGAGCGCCGAGAGGGTCAGGGGGGATAACAAGGAATAC |
| | | GAGTACAGTGTGGAGTGCCAAGAGGATAGCGCCTGTCCCGCCGCCGAAGAGAGCCTGCCCA |
| | | TCGAAGTGATGGTGGACGCCGTGCACAAGCTGAAGTACGAGAACTACACCTCCAGCTTCTT |
| | | CATCAGGGATATCATCAAGCCCGATCCCCCCAAGAACCTGCAGCTGAAGCCCCTGAAGAAC |
| | | AGCAGGCAGGTGGAGGTGAGCTGGGAGTATCCCGACACGTGGAGCACCCCGCACAGCTACT |
| | | TCTCGCTGACCTTCTGCGTGCAGGTGCAAGGGAAGTCCAAGAGGGAGAAGAAGGATAGGGT |
| | | GTTCACCGACAAAACGAGCGCCACCGTGATCTGCCGGAAGAATGCCAGCATCTCTGTGAGG |
| | | GCCCAGGACAGGTACTATTCCAGCTCCTGGTCGGAGTGGGCCAGCGTGCCCTGTAGCGGCG |
| | | GGGGCGGGGGCGGCAGCAGGAACCTCCCGGTTGCCACCCCCGACCCCGGCATGTTTCCGTG |
| | | CCTGCACCACTCGCAAAACCTGCTGCGCGCGGTCTCCAACATGCTGCAAAAAGCGCGCCAG |
| | | ACGCTGGAGTTCTACCCCTGCACCAGCGAGGAGATCGATCATGAAGATATCACCAAAGACA |
| | | AGACCTCGACCGTGGAGGCCTGCCTGCCCCTGGAGCTCACCAAGAACGAAAGCTGCCTGAA |
| | | CAGCAGGGAGACAAGCTTCATCACCAACGGCAGCTGCCTGGCCTCCCGGAAGACCAGCTTC |
| | | ATGATGGCCCTGTGCCTGTCCAGCATCTACGAGGATCTGAAGATGTACCAAGTGGAGTTTA |
| | | AGACCATGAACGCCAAGCTGTTAATGGACCCCAAAAGGCAGATCTTCCTGGATCAGAACAT |
| | | GCTGGCCGTCATCGACGAGCTGATGCAAGCCCTGAACTTCAACAGCGAGACGGTGCCCCAG |
| | | AAGAGCAGCCTCGAGGAGCCCGACTTCTATAAGACCAAGATAAAGCTGTGCATTCTGCTGC |
| | | ACGCCTTCAGAATCAGGGCCGTGACCATCGATAGGGTGATGAGCTACCTGAACGCCAGCTG |
| | | ATAATAGGCTGGAGCCTCGGTGGCCATGCTTCTTGCCCCTTGGGCCTCCCCCCAGCCCCTC |
| | | CTCCCCTTCCTGCACCCGTACCCCCCAAACACCATTGTCACACTCCAGTGGTCTTTGAATA |
| | | AAGTCTGAGTGGGCGGCAAAAAAAAAAAAAAAAAAAAAAAAAAAAAAAAAAAAAAAAAAAA |
| | | AAAAAAAAAAAAAAAAAAAAAAAAAAAAAAAAAAAAAAAAAAAAAAAAAAAAAAAATCTAG |
| 1150 | hIL12AB_032 | G*GGGAAATAAGAGAGAAAAGAAGAGTAAGAAGAAATATAAGAGCCACCATGTGTCACCAG |
| | | CAGCTGGTGATTTCCTGGTTCAGTCTGGTGTTTCTTGCCAGCCCCCTGGTGGCCATCTGGG |
| | | AGCTGAAGAAAGACGTATACGTCGTGGAGCTGGACTGGTATCCCGACGCTCCCGGCGAGAT |
| | | GGTGGTCCTCACCTGCGACACCCCAGAGGAGGACGGCATCACCTGGACCCTGGACCAGAGC |
| | | TCCGAGGTCCTGGGCAGCGGTAAGACCCTCACCATCCAGGTGAAGGAGTTTGGTGATGCCG |
| | | GGCAGTATACCTGCCACAAGGGCGGCGAGGTGCTGTCCCACAGCCTCCTGTTACTGCATAA |
| | | GAAGGAGGATGGCATCTGGAGCACCGACATCCTCAAGGACCAGAAAGAGCCCAAGAACAAG |
| | | ACCTTTCTGCGGTGCGAGGCGAAAAATTACTCCGGCCGGTTCACCTGCTGGTGGCTGACCA |
| | | CCATCAGCACGGACCTGACGTTCTCCGTGAAGTCGAGCAGGGGGAGCTCCGATCCCCAGGG |
| | | CGTGACCTGCGGCGCGGCCACCCTGAGCGCCGAGCGCGTCCGCGGGGACAATAAGGAATAC |
| | | GAATATAGCGTGGAGTGCCAGGAGGACAGCGCCTGCCCCGCGGCCGAGGAGAGCCTCCCGA |
| | | TCGAGGTGATGGTGGATGCCGTCCACAAGCTCAAATACGAAAACTACACCAGCAGCTTCTT |
| | | CATTAGGGACATCATCAAGCCCGACCCCCCCAAAAACCTGCAGCTGAAGCCCCTGAAGAAC |
| | | AGCCGCCAGGTCGAGGTGTCATGGGAGTACCCAGACACCTGGAGCACCCCCCACTCCTACT |
| | | TCAGCCTGACCTTCTGCGTCCAGGTGCAGGGAAAGTCCAAACGGGAGAAGAAGGATAGGGT |
| | | CTTTACCGATAAGACGTCGGCCACCGTCATCTGCAGGAAGAACGCCAGCATAAGCGTGCGG |
| | | GCGCAGGATCGGTACTACAGCTCGAGCTGGTCCGAATGGGCCTCCGTGCCCTGTAGCGGAG |
| | | GGGGTGGCGGGGGCAGCAGGAACCTGCCCGTGGCCACCCCGGACCCGGGCATGTTTCCCTG |
| | | CCTGCATCACAGTCAGAACCTGCTGAGGGCCGTGAGCAACATGCTCCAGAAGGCCCGCCAG |
| | | ACCCTGGAGTTTTACCCCTGCACCAGCGAAGAGATCGATCACGAAGACATCACCAAAGACA |
| | | AGACCTCCACCGTGGAGGCCTGTCTGCCCCTGGAGCTGACCAAGAACGAGAGCTGTCTGAA |
| | | CAGCAGGGAGACCTCCTTCATCACCAACGGCTCCTGCCTGGCATCCCGGAAGACCAGCTTC |
| | | ATGATGGCCCTGTGTCTGAGCTCTATCTACGAGGACCTGAAGATGTACCAGGTCGAGTTCA |
| | | AGACCATGAACGCCAAGCTGCTGATGGACCCCAAGCGACAGATATTCCTGGACCAGAACAT |
| | | GCTCGCCGTGATCGATGAACTGATGCAAGCCCTGAACTTCAATAGCGAGACCGTGCCCCAG |
| | | AAAAGCAGCCTGGAGGAGCCCGACTTCTACAAGACCAAGATCAAACTGTGCATACTGCTGC |
| | | ACGCGTTCAGGATCCGGGCCGTCACCATCGACCGGGTGATGTCCTATCTGAATGCCAGCTG |
| | | ATAATAGGCTGGAGCCTCGGTGGCCATGCTTCTTGCCCCTTGGGCCTCCCCCCAGCCCCTC |
| | | CTCCCCTTCCTGCACCCGTACCCCCCAAACACCATTGTCACACTCCAGTGGTCTTTGAATA |
| | | AAGTCTGAGTGGGCGGCAAAAAAAAAAAAAAAAAAAAAAAAAAAAAAAAAAAAAAAAAAAA |
| | | AAAAAAAAAAAAAAAAAAAAAAAAAAAAAAAAAAAAAAAAAAAAAAAAAAAAAAAATCTAG |
| 1151 | hIL12AB_033 | G*GGGAAATAAGAGAGAAAAGAAGAGTAAGAAGAAATATAAGAGCCACCATGTGCCACCAG |
| | | CAGCTCGTGATTAGCTGGTTTTCGCTGGTGTTCCTGGCCAGCCCTCTCGTGGCCATCTGGG |
| | | AGCTGAAAAAAGACGTGTACGTGGTGGAGCTGGACTGGTACCCGGACGCCCCCGGCGAGAT |
| | | GGTGGTGCTGACGTGCGACACCCCGGAAGAGGACGGCATCACCTGGACCCTGGACCAGTCA |
| | | TCCGAGGTCCTGGGCAGCGGCAAGACGCTCACCATCCAGGTGAAGGAGTTCGGCGACGCCG |
| | | GCCAGTACACATGCCATAAGGGCGGGGAGGTGCTGAGCCACAGCCTGCTCCTCCTGCACAA |
| | | GAAGGAGGATGGCATCTGGTCTACAGACATCCTGAAGGACCAGAAAGAGCCCAAGAACAAG |
| | | ACCTTCCTCCGGTGCGAGGCCAAGAACTACTCCGGGCGGTTTACTTGTTGGTGGCTGACCA |
| | | CCATCAGCACCGACCTCACCTTCAGCGTGAAGAGCTCCCGAGGGAGCTCCGACCCCCAGGG |
| | | GGTCACCTGCGGCGCCGCCACCCTGAGCGCCGAGCGGGTGAGGGGCGACAACAAGGAGTAT |
| | | GAATACAGCGTGGAATGCCAAGAGGACAGCGCCTGTCCCGCGGCCGAGGAAAGCCTGCCCA |
| | | TCGAGGTGATGGTGGACGCCGTCCACAAACTCAAGTACGAGAACTACACCAGCAGTTTCTT |
| | | CATTCGCGACATCATCAAGCCGGACCCCCCCAAAAACCTGCAGCTCAAACCCCTGAAGAAC |
| | | AGCAGGCAGGTGGAGGTCAGCTGGGAGTACCCGGACACCTGGAGCACCCCCCATAGCTACT |
| | | TCAGCCTGACCTTCTGCGTGCAGGTGCAGGGCAAGAGCAAACGCGAGAAGAAGGACCGGGT |
| | | GTTTACCGACAAGACCAGCGCCACGGTGATCTGCCGAAAGAATGCAAGCATCTCCGTGAGG |
| | | GCGCAGGACCGCTACTACTCTAGCAGCTGGAGCGAGTGGGCCAGCGTGCCCTGCAGCGGTG |
| | | GCGGCGGAGGCGGCAGCCGTAACCTCCCCGTGGCCACCCCCGACCCCGGCATGTTCCCGTG |
| | | TCTGCACCACTCCCAGAACCTGCTGAGGGCCGTCAGCAATATGCTGCAGAAGGCCCGGCAG |
| | | ACGCTGGAGTTCTACCCCTGCACCTCCGAGGAGATCGACCATGAGGACATTACCAAGGACA |
| | | AGACGAGCACTGTGGAGGCCTGCCTGCCCCTGGAGCTCACCAAAAACGAGAGCTGCCTGAA |
| | | TAGCAGGGAGACGTCCTTCATCACCAACGGCAGCTGTCTGGCCAGCAGGAAGACCAGCTTC |
| | | ATGATGGCCCTGTGCCTCTCCTCCATATATGAGGATCTGAAGATGTACCAGGTGGAGTTCA |
| | | AGACCATGAACGCCAAGCTGCTGATGGATCCCAAGAGGCAGATCTTCCTGGACCAGAATAT |
| | | GCTGGCCGTGATTGACGAGCTGATGCAGGCCCTGAACTTTAATAGCGAGACCGTCCCCCAG |
| | | AAGAGCAGCCTGGAGGAGCCCGACTTCTATAAGACCAAGATCAAGCTGTGCATACTGCTGC |
| | | ACGCGTTTAGGATAAGGGCCGTCACCATCGACAGGGTGATGAGCTACCTGAATGCCAGCTG |
| | | ATAATAGGCTGGAGCCTCGGTGGCCATGCTTCTTGCCCCTTGGGCCTCCCCCCAGCCCCTC |
| | | CTCCCCTTCCTGCACCCGTACCCCCCAAACACCATTGTCACACTCCAGTGGTCTTTGAATA |
| | | AAGTCTGAGTGGGCGGCAAAAAAAAAAAAAAAAAAAAAAAAAAAAAAAAAAAAAAAAAAAA |
| | | AAAAAAAAAAAAAAAAAAAAAAAAAAAAAAAAAAAAAAAAAAAAAAAAAAAAAAAATCTAG |
| 1152 | hIL12AB_034 | G*GGGAAATAAGAGAGAAAAGAAGAGTAAGAAGAAATATAAGAGCCACCATGTGCCACCAA |
| | | CAGCTGGTGATCTCCTGGTTCAGCCTGGTGTTCCTCGCCAGCCCCCTGGTGGCCATCTGGG |
| | | AGCTGAAGAAAGACGTGTACGTGGTGGAGCTGGACTGGTATCCCGACGCCCCCGGCGAGAT |
| | | GGTCGTGCTGACCTGCGACACCCCGGAGGAGGACGGCATCACCTGGACCCTGGATCAGTCC |
| | | TCCGAGGTGCTGGGCAGCGGGAAGACCCTGACCATCCAGGTGAAAGAGTTCGGAGATGCCG |
| | | GCCAGTATACCTGTCACAAGGGGGGTGAGGTGCTGAGCCATAGCCTCTTGCTTCTGCACAA |
| | | GAAGGAGGACGGCATCTGGTCCACCGACATCCTCAAGGACCAAAAGGAGCCGAAGAATAAA |
| | | ACGTTCCTGAGGTGCGAAGCCAAGAACTATTCCGGACGGTTCACCTGCTGGTGGCTGACCA |
| | | CCATCAGCACCGACCTCACCTTCTCCGTAAAGTCAAGCAGGGGCAGCTCCGACCCCCAGGG |
| | | CGTGACCTGCGGAGCCGCCACCCTGAGCGCAGAGAGGGTGAGGGGCGACAACAAGGAGTAC |
| | | GAATACTCCGTCGAGTGCCAGGAGGACAGCGCCTGCCCCGCCGCCGAGGAAAGTCTGCCCA |
| | | TCGAGGTGATGGTGGACGCCGTGCACAAGCTCAAATACGAGAACTACACCAGCAGCTTCTT |
| | | CATCCGGGATATCATCAAGCCCGACCCTCCAAAGAATCTGCAGCTGAAACCCCTTAAGAAC |
| | | AGCAGGCAGGTGGAGGTCAGCTGGGAGTACCCCGACACCTGGAGCACGCCCCACTCCTACT |
| | | TTAGCCTGACCTTTTGCGTGCAGGTGCAGGGGAAAAGCAAGCGGGAGAAGAAGGACAGGGT |
| | | GTTCACCGATAAGACCTCCGCTACCGTGATCTGCAGGAAGAACGCCTCAATCAGCGTGAGG |
| | | GCCCAGGATCGGTACTACTCCAGCTCCTGGAGCGAGTGGGCCAGCGTGCCCTGCTCTGGCG |
| | | GTGGCGGCGGGGGCAGCCGGAACCTGCCGGTGGCCACTCCCGACCCGGGCATGTTCCCGTG |
| | | CCTCCACCATTCCCAGAACCTGCTGCGGGCCGTGTCCAATATGCTCCAGAAGGCAAGGCAG |
| | | ACCCTGGAGTTCTACCCCTGCACCAGCGAGGAGATCGATCACGAGGACATCACCAAAGACA |
| | | AAACCAGCACGGTCGAGGCCTGCCTGCCCCTGGAACTCACCAAGAACGAAAGCTGTCTCAA |
| | | CAGCCGCGAGACCAGCTTCATAACCAACGGTTCCTGTCTGGCCTCCCGCAAGACCAGCTTT |
| | | ATGATGGCCCTCTGTCTGAGCTCCATCTATGAAGACCTGAAAATGTACCAGGTGGAGTTCA |
| | | AAACCATGAACGCCAAGCTTCTGATGGACCCCAAGAGGCAGATCTTCCTGGATCAGAACAT |
| | | GCTGGCCGTGATCGACGAGCTGATGCAGGCCCTGAACTTTAACTCCGAGACCGTGCCCCAG |
| | | AAAAGCAGCCTGGAAGAGCCCGATTTCTACAAAACGAAGATCAAGCTGTGCATCCTGCTGC |
| | | ACGCCTTCCGGATCCGTGCGGTGACCATCGATAGGGTGATGAGCTACCTGAACGCCAGCTG |
| | | ATAATAGGCTGGAGCCTCGGTGGCCATGCTTCTTGCCCCTTGGGCCTCCCCCCAGCCCCTC |
| | | CTCCCCTTCCTGCACCCGTACCCCCCAAACACCATTGTCACACTCCAGTGGTCTTTGAATA |
| | | AAGTCTGAGTGGGCGGCAAAAAAAAAAAAAAAAAAAAAAAAAAAAAAAAAAAAAAAAAAAA |
| | | AAAAAAAAAAAAAAAAAAAAAAAAAAAAAAAAAAAAAAAAAAAAAAAAAAAAAAAATCTAG |
| 1153 | hIL12AB_035 | G*GGGAAATAAGAGAGAAAAGAAGAGTAAGAAGAAATATAAGAGCCACCATGTGCCACCAA |
| | | CAGCTGGTAATCAGCTGGTTCAGCCTGGTTTTCCTCGCGTCGCCCCTGGTGGCCATCTGGG |
| | | AGTTAAAGAAGGACGTGTACGTGGTGGAGCTGGATTGGTACCCCGACGCCCCGGGCGAGAT |
| | | GGTCGTGCTCACCTGCGATACCCCCGAGGAGGACGGGATCACCTGGACCCTGGACCAATCC |
| | | AGCGAGGTGCTGGGCAGCGGCAAGACCCTGACCATACAGGTGAAGGAATTTGGGGACGCCG |
| | | GGCAGTACACCTGCCACAAGGGCGGGGAAGTGCTGTCCCACTCCCTCCTGCTGCTGCATAA |
| | | GAAGGAGGACGGCATCTGGAGCACCGACATCCTGAAGGACCAAAAGGAGCCCAAGAACAAG |
| | | ACCTTCCTGAGGTGCGAGGCCAAAAACTATTCCGGCCGCTTTACCTGTTGGTGGCTGACCA |
| | | CCATCTCCACCGATCTGACCTTCAGCGTGAAGTCGTCTAGGGGCTCCTCCGACCCCCAGGG |
| | | CGTAACCTGCGGCGCCGCGACCCTGAGCGCCGAGAGGGTGCGGGGCGATAACAAAGAGTAC |
| | | GAGTACTCGGTGGAGTGCCAGGAGGACAGCGCCTGTCCGGCGGCCGAGGAGAGCCTGCCCA |
| | | TCGAGGTGATGGTGGACGCCGTCCACAAGCTGAAGTACGAGAACTACACCAGTTCGTTCTT |
| | | CATCAGGGACATCATCAAGCCGGACCCCCCCAAGAACCTCCAGCTGAAGCCCCTGAAGAAC |
| | | AGCAGGCAGGTGGAAGTGTCCTGGGAGTATCCCGACACCTGGAGCACCCCCCACAGCTACT |
| | | TCAGCCTGACCTTTTGCGTGCAGGTGCAGGGCAAAAGCAAGAGGGAAAAGAAGGACCGGGT |
| | | GTTCACCGATAAGACGAGCGCCACCGTTATCTGCAGGAAGAACGCCTCCATAAGCGTGAGG |
| | | GCGCAGGACCGTTACTACAGCAGCAGCTGGAGTGAGTGGGCAAGCGTGCCCTGTAGCGGCG |
| | | GGGGCGGGGGCGGGTCCCGCAACCTCCCCGTCGCCACCCCCGACCCAGGCATGTTTCCGTG |
| | | CCTGCACCACAGCCAGAACCTGCTGCGGGCCGTTAGCAACATGCTGCAGAAGGCCAGGCAG |
| | | ACCCTCGAGTTCTATCCCTGCACATCTGAGGAGATCGACCACGAAGACATCACTAAGGATA |
| | | AGACCTCCACCGTGGAGGCCTGTCTGCCCCTCGAGCTGACCAAGAATGAATCCTGCCTGAA |
| | | CAGCCGAGAGACCAGCTTTATCACCAACGGCTCCTGCCTGGCCAGCAGGAAGACCTCCTTC |
| | | ATGATGGCCCTGTGCCTCTCCAGCATCTACGAGGATCTGAAGATGTACCAGGTAGAGTTCA |
| | | AGACGATGAACGCCAAGCTCCTGATGGACCCCAAGAGGCAGATATTCCTGGACCAGAACAT |
| | | GCTGGCGGTGATCGACGAGCTGATGCAGGCCCTGAATTTCAACAGCGAGACGGTGCCACAG |
| | | AAGTCCAGCCTGGAGGAGCCAGACTTCTACAAGACCAAGATCAAACTGTGCATCCTCCTGC |
| | | ACGCGTTCAGGATCCGCGCCGTCACCATAGACAGGGTGATGAGTTATCTGAACGCCAGCTG |
| | | ATAATAGGCTGGAGCCTCGGTGGCCATGCTTCTTGCCCCTTGGGCCTCCCCCCAGCCCCTC |
| | | CTCCCCTTCCTGCACCCGTACCCCCCAAACACCATTGTCACACTCCAGTGGTCTTTGAATA |
| | | AAGTCTGAGTGGGCGGCAAAAAAAAAAAAAAAAAAAAAAAAAAAAAAAAAAAAAAAAAAAA |
| | | AAAAAAAAAAAAAAAAAAAAAAAAAAAAAAAAAAAAAAAAAAAAAAAAAAAAAAAATCTAG |
| 1154 | hIL12AB_036 | G*GGGAAATAAGAGAGAAAAGAAGAGTAAGAAGAAATATAAGAGCCACCATGTGCCATCAG |
| | | CAGCTGGTAATCAGCTGGTTTAGCCTGGTGTTCCTGGCCAGCCCACTGGTGGCCATCTGGG |
| | | AGCTGAAGAAGGACGTGTACGTGGTGGAACTGGACTGGTACCCCGACGCCCCTGGCGAGAT |
| | | GGTGGTACTGACCTGTGACACCCCGGAGGAAGACGGTATCACCTGGACCCTGGATCAGAGC |
| | | TCCGAGGTGCTGGGCTCCGGCAAGACACTGACCATCCAAGTTAAGGAATTTGGGGACGCCG |
| | | GCCAGTACACCTGCCACAAGGGGGGCGAGGTGCTGTCCCACTCCCTGCTGCTTCTGCATAA |
| | | GAAGGAGGATGGCATCTGGTCCACCGACATACTGAAGGACCAGAAGGAGCCCAAGAATAAG |
| | | ACCTTCCTGAGATGCGAGGCCAAGAACTACTCGGGAAGGTTCACCTGCTGGTGGCTGACCA |
| | | CCATCAGCACCGACCTGACCTTCTCCGTGAAGAGCTCCCGGGGCAGCTCCGACCCCCAGGG |
| | | CGTAACCTGTGGGGCCGCTACCCTGTCCGCCGAGAGGGTCCGGGGCGACAACAAGGAATAC |
| | | GAGTACAGCGTGGAGTGCCAGGAGGACTCCGCCTGCCCCGCCGCCGAGGAGTCGCTGCCCA |
| | | TAGAGGTGATGGTGGACGCCGTGCACAAGCTCAAGTACGAGAATTACACCAGCAGCTTCTT |
| | | TATCAGGGACATAATTAAGCCGGACCCCCCAAAGAATCTGCAGCTGAAGCCCCTGAAGAAT |
| | | AGCCGGCAGGTGGAAGTGTCCTGGGAGTACCCCGACACCTGGAGCACCCCCCACTCCTATT |
| | | TCTCACTGACATTCTGCGTGCAGGTGCAAGGGAAAAGCAAGAGGGAGAAGAAGGATAGGGT |
| | | GTTCACCGACAAGACAAGCGCCACCGTGATCTGCCGAAAAAATGCCAGCATCAGCGTGAGG |
| | | GCCCAGGATCGGTATTACAGCAGCTCCTGGAGCGAGTGGGCCAGCGTGCCCTGTTCCGGCG |
| | | GGGGAGGGGGCGGCTCCCGGAACCTGCCGGTGGCCACCCCCGACCCTGGCATGTTCCCCTG |
| | | CCTGCATCACAGCCAGAACCTGCTCCGGGCCGTGTCGAACATGCTGCAGAAGGCCCGGCAG |
| | | ACCCTCGAGTTTTACCCCTGCACCAGCGAAGAGATCGACCACGAAGACATAACCAAGGACA |
| | | AGACCAGCACGGTGGAGGCCTGCCTGCCCCTGGAGCTTACCAAAAACGAGTCCTGCCTGAA |
| | | CAGCCGGGAAACCAGCTTCATAACGAACGGGAGCTGCCTGGCCTCCAGGAAGACCAGCTTC |
| | | ATGATGGCGCTGTGTCTGTCCAGCATATACGAGGATCTGAAGATGTATCAGGTGGAATTCA |
| | | AAACTATGAATGCCAAGCTCCTGATGGACCCCAAGAGGCAGATCTTCCTGGACCAGAACAT |
| | | GCTAGCCGTGATCGACGAGCTGATGCAGGCCCTCAACTTCAACTCGGAGACGGTGCCCCAG |
| | | AAGTCCAGCCTCGAGGAGCCCGACTTCTACAAGACCAAGATCAAGCTGTGCATACTGCTGC |
| | | ATGCCTTCAGGATAAGGGCGGTGACTATCGACAGGGTCATGTCCTACCTGAACGCCAGCTG |
| | | ATAATAGGCTGGAGCCTCGGTGGCCATGCTTCTTGCCCCTTGGGCCTCCCCCCAGCCCCTC |
| | | CTCCCCTTCCTGCACCCGTACCCCCCAAACACCATTGTCACACTCCAGTGGTCTTTGAATA |
| | | AAGTCTGAGTGGGCGGCAAAAAAAAAAAAAAAAAAAAAAAAAAAAAAAAAAAAAAAAAAAA |
| | | AAAAAAAAAAAAAAAAAAAAAAAAAAAAAAAAAAAAAAAAAAAAAAAAAAAAAAAATCTAG |
| 1155 | hIL12AB_037 | G*GGGAAATAAGAGAGAAAAGAAGAGTAAGAAGAAATATAAGAGCCACCATGTGCCACCAA |
| | | CAACTGGTGATCAGCTGGTTCTCCCTGGTGTTCCTGGCCAGCCCCCTGGTGGCCATCTGGG |
| | | AGCTCAAAAAAGACGTGTACGTGGTGGAGCTCGATTGGTACCCAGACGCGCCGGGGGAAAT |
| | | GGTGGTGCTGACCTGCGACACCCCAGAGGAGGATGGCATCACGTGGACGCTGGATCAGTCC |
| | | AGCGAGGTGCTGGGGAGCGGCAAGACGCTCACCATCCAGGTGAAGGAATTTGGCGACGCGG |
| | | GCCAGTATACCTGTCACAAGGGCGGCGAGGTGCTGAGCCACTCCCTGCTGCTGCTGCACAA |
| | | GAAGGAGGATGGGATCTGGTCAACCGATATCCTGAAAGACCAGAAGGAGCCCAAGAACAAG |
| | | ACCTTCCTGCGCTGCGAGGCCAAGAACTATAGCGGCAGGTTCACCTGCTGGTGGCTGACCA |
| | | CCATCAGCACCGACCTGACCTTCAGCGTGAAATCCTCCAGGGGCAGCAGCGACCCCCAGGG |
| | | CGTGACCTGCGGTGCCGCCACGCTCTCCGCCGAGCGAGTGAGGGGTGACAACAAGGAGTAC |
| | | GAGTACAGCGTGGAATGTCAGGAGGACAGCGCCTGTCCCGCCGCCGAGGAGTCGCTGCCCA |
| | | TCGAGGTGATGGTCGACGCGGTGCACAAGCTCAAATACGAGAATTACACCAGCAGCTTCTT |
| | | CATCAGGGACATCATCAAGCCCGACCCCCCCAAGAACCTGCAGCTGAAGCCCTTGAAGAAC |
| | | AGCAGGCAGGTGGAGGTGAGCTGGGAGTACCCGGACACCTGGAGCACCCCCCACTCCTACT |
| | | TCAGCCTGACGTTCTGTGTGCAGGTGCAGGGGAAGTCCAAGAGGGAGAAGAAGGACCGGGT |
| | | GTTCACCGACAAGACCAGCGCCACCGTGATATGCCGCAAGAACGCGTCCATCAGCGTTCGC |
| | | GCCCAGGACCGCTACTACAGCAGCTCCTGGTCCGAATGGGCCAGCGTGCCCTGCAGCGGTG |
| | | GAGGGGGCGGGGGCTCCAGGAATCTGCCGGTGGCCACCCCCGACCCCGGGATGTTCCCGTG |
| | | TCTGCATCACTCCCAGAACCTGCTGCGGGCCGTGAGCAATATGCTGCAGAAGGCCAGGCAG |
| | | ACGCTCGAGTTCTACCCCTGCACCTCCGAAGAGATCGACCATGAGGACATCACCAAGGACA |
| | | AGACCAGCACCGTGGAGGCCTGCCTCCCCCTGGAGCTGACCAAAAACGAGAGCTGCCTGAA |
| | | CTCCAGGGAGACCAGCTTTATAACCAACGGCAGCTGCCTCGCCTCCAGGAAGACCTCGTTT |
| | | ATGATGGCCCTCTGCCTGTCCAGCATCTACGAGGACCTGAAGATGTACCAGGTGGAGTTCA |
| | | AGACCATGAACGCGAAGTTGCTCATGGACCCCAAGAGGCAGATCTTCCTGGACCAGAACAT |
| | | GCTCGCGGTGATCGACGAGCTGATGCAAGCCCTGAACTTCAACAGCGAGACCGTGCCCCAG |
| | | AAGAGCAGCCTGGAAGAGCCCGACTTCTACAAGACCAAGATCAAGCTGTGCATCCTGCTGC |
| | | ACGCCTTCCGGATCCGGGCCGTGACCATCGACAGGGTGATGAGCTACCTCAACGCCTCCTG |
| | | ATAATAGGCTGGAGCCTCGGTGGCCATGCTTCTTGCCCCTTGGGCCTCCCCCCAGCCCCTC |
| | | CTCCCCTTCCTGCACCCGTACCCCCCAAACACCATTGTCACACTCCAGTGGTCTTTGAATA |
| | | AAGTCTGAGTGGGCGGCAAAAAAAAAAAAAAAAAAAAAAAAAAAAAAAAAAAAAAAAAAAA |
| | | AAAAAAAAAAAAAAAAAAAAAAAAAAAAAAAAAAAAAAAAAAAAAAAAAAAAAAAATCTAG |
| 1156 | hIL12AB_038 | G*GGGAAATAAGAGAGAAAAGAAGAGTAAGAAGAAATATAAGAGCCACCATGTGCCACCAG |
| | | CAGCTCGTGATCAGCTGGTTCTCCCTCGTCTTCCTGGCCTCCCCGCTGGTGGCCATCTGGG |
| | | AGCTGAAGAAGGACGTGTACGTGGTGGAGCTGGACTGGTATCCCGACGCCCCCGGCGAGAT |
| | | GGTGGTGCTGACGTGCGACACACCAGAAGAGGACGGGATCACATGGACCCTGGATCAGTCG |
| | | TCCGAGGTGCTGGGGAGCGGCAAGACCCTCACCATCCAAGTGAAGGAGTTCGGGGACGCCG |
| | | GCCAGTACACCTGCCACAAGGGCGGGGAGGTGCTCTCCCATAGCCTGCTCCTCCTGCACAA |
| | | AAAGGAGGATGGCATCTGGAGCACCGACATCCTGAAGGACCAGAAGGAGCCCAAGAACAAG |
| | | ACATTTCTCAGGTGTGAGGCCAAGAACTATTCGGGCAGGTTTACCTGTTGGTGGCTCACCA |
| | | CCATCTCTACCGACCTGACGTTCTCCGTCAAGTCAAGCAGGGGGAGCTCGGACCCCCAGGG |
| | | GGTGACATGTGGGGCCGCCACCCTGAGCGCGGAGCGTGTCCGCGGCGACAACAAGGAGTAC |
| | | GAGTATTCCGTGGAGTGCCAGGAGGACAGCGCCTGCCCCGCCGCCGAGGAGTCCCTGCCCA |
| | | TAGAGGTGATGGTGGACGCCGTCCACAAGTTGAAGTACGAAAATTATACCTCCTCGTTCTT |
| | | CATTAGGGACATCATCAAGCCTGACCCCCCGAAGAACCTACAACTCAAGCCCCTCAAGAAC |
| | | TCCCGCCAGGTGGAGGTGTCCTGGGAGTACCCCGACACCTGGTCCACCCCGCACAGCTACT |
| | | TCAGCCTGACCTTCTGCGTGCAGGTCCAGGGGAAGAGCAAGCGTGAAAAGAAAGACAGGGT |
| | | GTTCACCGACAAGACGAGCGCCACCGTGATCTGCAGGAAAAACGCCTCCATCTCCGTGCGC |
| | | GCCCAGGACAGGTACTACAGTAGCTCCTGGAGCGAATGGGCCAGCGTGCCGTGCAGCGGCG |
| | | GGGGAGGAGGCGGCAGTCGCAACCTGCCCGTGGCCACCCCCGACCCCGGCATGTTCCCATG |
| | | CCTGCACCACAGCCAGAACCTGCTGAGGGCAGTCAGCAATATGCTGCAGAAGGCCAGGCAG |
| | | ACCCTGGAGTTTTATCCCTGCACCAGCGAGGAGATCGACCACGAGGACATCACCAAGGACA |
| | | AGACCTCCACCGTCGAGGCCTGCCTGCCACTGGAGCTGACCAAAAACGAGAGCTGCCTGAA |
| | | CTCCAGGGAGACCTCCTTCATCACCAACGGGAGCTGCCTGGCCAGCCGGAAGACCAGCTTC |
| | | ATGATGGCGCTGTGCCTCAGCAGCATCTACGAGGATCTCAAGATGTACCAGGTGGAGTTCA |
| | | AGACCATGAACGCGAAGCTGCTGATGGACCCCAAGCGGCAGATCTTCCTGGACCAGAACAT |
| | | GCTGGCCGTGATTGACGAGCTCATGCAGGCCCTGAACTTCAATAGCGAGACCGTCCCCCAA |
| | | AAGAGCAGCCTGGAGGAACCCGACTTCTACAAAACGAAGATCAAGCTCTGCATCCTGCTGC |
| | | ACGCCTTCCGGATCCGGGCCGTGACCATCGATCGTGTGATGAGCTACCTGAACGCCTCGTG |
| | | ATAATAGGCTGGAGCCTCGGTGGCCATGCTTCTTGCCCCTTGGGCCTCCCCCCAGCCCCTC |
| | | CTCCCCTTCCTGCACCCGTACCCCCCAAACACCATTGTCACACTCCAGTGGTCTTTGAATA |
| | | AAGTCTGAGTGGGCGGCAAAAAAAAAAAAAAAAAAAAAAAAAAAAAAAAAAAAAAAAAAAA |
| | | AAAAAAAAAAAAAAAAAAAAAAAAAAAAAAAAAAAAAAAAAAAAAAAAAAAAAAAATCTAG |
| 1157 | hIL12AB_039 | G*GGGAAATAAGAGAGAAAAGAAGAGTAAGAAGAAATATAAGAGCCACCATGTGCCACCAG |
| | | CAGCTCGTCATCTCCTGGTTTAGCCTGGTGTTTCTGGCCTCCCCCCTGGTCGCCATCTGGG |
| | | AGCTGAAGAAAGACGTGTACGTGGTGGAGCTGGACTGGTACCCGGACGCTCCCGGGGAGAT |
| | | GGTGGTGCTGACCTGCGACACCCCCGAGGAGGACGGCATCACCTGGACCCTGGACCAGAGC |
| | | TCCGAGGTGCTGGGGAGCGGCAAGACCCTGACCATTCAGGTGAAAGAGTTCGGCGACGCCG |
| | | GCCAATATACCTGCCACAAGGGGGGGGAGGTCCTGTCGCATTCCCTGCTGCTGCTTCACAA |
| | | AAAGGAGGATGGCATCTGGAGCACCGACATCCTGAAGGACCAGAAAGAACCCAAGAACAAG |
| | | ACGTTCCTGCGCTGCGAGGCCAAGAACTACAGCGGCCGGTTCACCTGTTGGTGGCTGACCA |
| | | CCATCTCCACCGACCTGACTTTCTCGGTGAAGAGCAGCCGCGGGAGCAGCGACCCCCAGGG |
| | | AGTGACCTGCGGCGCCGCCACCCTGAGCGCCGAAAGGGTGAGGGGCGACAATAAAGAGTAC |
| | | GAGTATTCCGTGGAGTGCCAGGAGGACAGCGCCTGTCCCGCCGCCGAGGAGTCCCTGCCTA |
| | | TCGAGGTGATGGTCGACGCGGTGCACAAGCTCAAGTACGAAAACTACACCAGCAGCTTTTT |
| | | CATCAGGGATATCATCAAACCAGACCCCCCCAAGAACCTGCAGCTGAAGCCCCTGAAAAAC |
| | | AGCAGGCAGGTGGAAGTGAGCTGGGAATACCCCGATACCTGGTCCACCCCCCACAGCTACT |
| | | TCAGCCTGACCTTCTGCGTGCAGGTGCAGGGGAAGTCCAAGCGGGAGAAGAAAGATCGGGT |
| | | GTTCACGGACAAGACCAGCGCCACCGTGATTTGCAGGAAAAACGCCAGCATCTCCGTGAGG |
| | | GCTCAGGACAGGTACTACAGCTCCAGCTGGAGCGAGTGGGCCTCCGTGCCTTGCAGCGGGG |
| | | GAGGAGGCGGCGGCAGCAGGAATCTGCCCGTCGCAACCCCCGACCCCGGCATGTTCCCCTG |
| | | CCTGCACCACAGCCAGAATCTGCTGCGAGCCGTGAGCAACATGCTCCAGAAGGCCCGGCAG |
| | | ACGCTGGAGTTCTACCCCTGCACCTCCGAGGAGATCGACCACGAGGACATCACCAAGGATA |
| | | AGACGAGCACCGTCGAGGCCTGTCTCCCCCTGGAGCTCACCAAGAACGAGTCCTGCCTGAA |
| | | TAGCAGGGAGACGTCCTTCATAACCAACGGCAGCTGTCTGGCGTCCAGGAAGACCAGCTTC |
| | | ATGATGGCCCTCTGCCTGAGCTCCATCTACGAGGACCTCAAGATGTACCAGGTCGAGTTCA |
| | | AGACCATGAACGCAAAACTGCTCATGGATCCAAAGAGGCAGATCTTTCTGGACCAGAACAT |
| | | GCTGGCCGTGATCGATGAACTCATGCAGGCCCTGAATTTCAATTCCGAGACCGTGCCCCAG |
| | | AAGAGCTCCCTGGAGGAACCCGACTTCTACAAAACAAAGATCAAGCTGTGTATCCTCCTGC |
| | | ACGCCTTCCGGATCAGGGCCGTCACCATTGACCGGGTGATGTCCTACCTGAACGCCAGCTG |
| | | ATAATAGGCTGGAGCCTCGGTGGCCATGCTTCTTGCCCCTTGGGCCTCCCCCCAGCCCCTC |
| | | CTCCCCTTCCTGCACCCGTACCCCCCAAACACCATTGTCACACTCCAGTGGTCTTTGAATA |
| | | AAGTCTGAGTGGGCGGCAAAAAAAAAAAAAAAAAAAAAAAAAAAAAAAAAAAAAAAAAAAA |
| | | AAAAAAAAAAAAAAAAAAAAAAAAAAAAAAAAAAAAAAAAAAAAAAAAAAAAAAAATCTAG |
| 1158 | hIL12AB_040 | G*GGGAAATAAGAGAGAAAAGAAGAGTAAGAAGAAATATAAGAGCCACCATGTGCCATCAG |
| | | CAGCTGGTGATCAGCTGGTTCAGCCTCGTGTTCCTCGCCAGCCCCCTCGTGGCCATCTGGG |
| | | AGCTGAAAAAGGACGTGTACGTGGTGGAGCTGGACTGGTATCCCGACGCCCCGGGCGAGAT |
| | | GGTGGTGCTGACCTGCGACACCCCCGAGGAGGACGGCATTACCTGGACACTGGACCAGAGC |
| | | AGCGAGGTCCTGGGCAGCGGGAAGACCCTGACAATTCAGGTGAAGGAGTTCGGCGACGCCG |
| | | GACAGTACACGTGCCACAAGGGGGGGGAGGTGCTGTCCCACAGCCTCCTCCTGCTGCACAA |
| | | GAAGGAGGATGGCATCTGGAGCACCGACATCCTGAAGGATCAGAAGGAGCCCAAGAACAAG |
| | | ACCTTTCTGAGATGCGAGGCCAAGAATTACAGCGGCCGTTTCACCTGCTGGTGGCTCACCA |
| | | CCATCAGCACCGACCTGACCTTCAGCGTGAAATCCTCCAGGGGCTCCTCCGACCCGCAGGG |
| | | AGTGACCTGCGGCGCCGCCACACTGAGCGCCGAGCGGGTCAGAGGGGACAACAAGGAGTAC |
| | | GAGTACAGCGTTGAGTGCCAGGAGGACAGCGCCTGTCCCGCGGCCGAGGAATCCCTGCCCA |
| | | TCGAGGTGATGGTGGACGCAGTGCACAAGCTGAAGTACGAGAACTATACCTCGAGCTTCTT |
| | | CATCCGGGATATCATTAAGCCCGATCCCCCGAAGAACCTGCAGCTCAAACCCCTGAAGAAC |
| | | AGCAGGCAGGTGGAGGTCTCCTGGGAGTACCCCGACACATGGTCCACCCCCCATTCCTATT |
| | | TCTCCCTGACCTTTTGCGTGCAGGTGCAGGGCAAGAGCAAGAGGGAGAAAAAGGACAGGGT |
| | | GTTCACCGACAAGACCTCCGCCACCGTGATCTGCCGTAAGAACGCTAGCATCAGCGTCAGG |
| | | GCCCAGGACAGGTACTATAGCAGCTCCTGGTCCGAGTGGGCCAGCGTCCCGTGCAGCGGCG |
| | | GGGGCGGTGGAGGCTCCCGGAACCTCCCCGTGGCCACCCCGGACCCCGGGATGTTTCCCTG |
| | | CCTGCATCACAGCCAGAACCTGCTGAGGGCCGTGTCCAACATGCTGCAGAAGGCCAGGCAG |
| | | ACACTCGAGTTTTACCCCTGCACCAGCGAGGAGATCGACCACGAAGACATCACCAAGGACA |
| | | AGACCTCCACCGTGGAGGCATGCCTGCCCCTGGAGCTGACCAAAAACGAAAGCTGTCTGAA |
| | | CTCCAGGGAGACCTCCTTTATCACGAACGGCTCATGCCTGGCCTCCAGAAAGACCAGCTTC |
| | | ATGATGGCCCTGTGCCTGAGCTCCATCTACGAGGACTTGAAAATGTACCAGGTCGAGTTCA |
| | | AGACCATGAACGCCAAGCTGCTCATGGACCCCAAAAGGCAGATCTTTCTGGACCAGAATAT |
| | | GCTGGCCGTGATCGACGAGCTCATGCAAGCCCTGAATTTCAACAGCGAGACCGTGCCCCAG |
| | | AAGTCCTCCCTGGAGGAGCCCGACTTCTACAAGACCAAGATCAAGCTGTGCATACTCCTGC |
| | | ACGCGTTTAGGATCAGGGCGGTGACCATCGATAGGGTGATGAGCTACCTGAATGCCTCCTG |
| | | ATAATAGGCTGGAGCCTCGGTGGCCATGCTTCTTGCCCCTTGGGCCTCCCCCCAGCCCCTC |
| | | CTCCCCTTCCTGCACCCGTACCCCCCAAACACCATTGTCACACTCCAGTGGTCTTTGAATA |
| | | AAGTCTGAGTGGGCGGCAAAAAAAAAAAAAAAAAAAAAAAAAAAAAAAAAAAAAAAAAAAA |
| | | AAAAAAAAAAAAAAAAAAAAAAAAAAAAAAAAAAAAAAAAAAAAAAAAAAAAAAAATCTAG |

[2223] TABLE 16B shows RNA sequences corresponding to the hIL12AB_002 ORF (SEQ ID NO: 1042) alone (SEQ ID NO: 1265), after the addition of 5′ and 3′ UTRs (SEQ ID NO: 1261), and after addition of a poly A tail to the construct comprising the ORF and UTRs (SEQ ID NO: 1262).

TABLE 16B
mRNA constructs derived from hIL12AB_002 (SEQ ID NO: 1042)

| SEQ | | |
|---|---|---|
| ID NO | Sequence | Description |
| 1260 | AUGUGCCACCAGCAGCUGGUGAUCAGCUGGUUCAGCCUGGUGUUCCUGGCCAGCC | hIL12AB_002 |
| | CCCUGGUGGCCAUCUGGGAGCUGAAGAAGGACGUGUACGUGGUGGAGCUGGACUG | (mRNA: ORF) |
| | GUACCCCGACGCCCCCGGCGAGAUGGUGGUGCUGACCUGCGACACCCCCGAGGAG | |
| | GACGGCAUCACCUGGACCCUGGACCAGAGCAGCGAGGUGCUGGGCAGCGGCAAGA | |
| | CCCUGACCAUCCAGGUGAAGGAGUUCGGCGACGCCGGCCAGUACACCUGCCACAA | |
| | GGGCGGCGAGGUGCUGAGCCACAGCCUGCUGCUGCUGCACAAGAAGGAGGACGGC | |
| | AUCUGGAGCACCGACAUCCUGAAGGACCAGAAGGAGCCCAAGAACAAGACCUUCC | |
| | UGAGAUGCGAGGCCAAGAACUACAGCGGCAGAUUCACCUGCUGGUGGCUGACCAC | |
| | CAUCAGCACCGACCUGACCUUCAGCGUGAAGAGCAGCAGAGGCAGCAGCGACCCC | |
| | CAGGGCGUGACCUGCGGCGCCGCCACCCUGAGCGCCGAGAGAGUGAGAGGCGACA | |
| | ACAAGGAGUACGAGUACAGCGUGGAGUGCCAGGAGGACAGCGCCUGCCCCGCCGC | |
| | CGAGGAGAGCCUGCCCAUCGAGGUGAUGGUGGACGCCGUGCACAAGCUGAAGUAC | |
| | GAGAACUACACCAGCAGCUUCUUCAUCAGAGACAUCAUCAAGCCCGACCCCCCCA | |
| | AGAACCUGCAGCUGAAGCCCCUGAAGAACAGCAGACAGGUGGAGGUGAGCUGGGA | |
| | GUACCCCGACACCUGGAGCACCCCCCACAGCUACUUCAGCCUGACCUUCUGCGUG | |
| | CAGGUGCAGGGCAAGAGCAAGAGAGAGAAGAAGGACAGAGUGUUCACCGACAAGA | |
| | CCAGCGCCACCGUGAUCUGCAGAAAGAACGCCAGCAUCAGCGUGAGAGCCCAGGA | |
| | CAGAUACUACAGCAGCAGCUGGAGCGAGUGGGCCAGCGUGCCCUGCAGCGGCGGC | |
| | GGCGGCGGCGGCAGCAGAAACCUGCCCGUGGCCACCCCCGACCCCGGCAUGUUCC | |
| | CCUGCCUGCACCACAGCCAGAACCUGCUGAGAGCCGUGAGCAACAUGCUGCAGAA | |
| | GGCCAGACAGACCCUGGAGUUCUACCCCUGCACCAGCGAGGAGAUCGACCACGAG | |
| | GACAUCACCAAGGACAAGACCAGCACCGUGGAGGCCUGCCUGCCCCUGGAGCUGA | |
| | CCAAGAACGAGAGCUGCCUGAACAGCAGAGAGACCAGCUUCAUCACCAACGGCAG | |
| | CUGCCUGGCCAGCAGAAAGACCAGCUUCAUGAUGGCCCUGUGCCUGAGCAGCAUC | |
| | UACGAGGACCUGAAGAUGUACCAGGUGGAGUUCAAGACCAUGAACGCCAAGCUGC | |
| | UGAUGGACCCCAAGAGACAGAUCUUCCUGGACCAGAACAUGCUGGCCGUGAUCGA | |
| | CGAGCUGAUGCAGGCCCUGAACUUCAACAGCGAGACCGUGCCCCAGAAGAGCAGC | |
| | CUGGAGGAGCCCGACUUCUACAAGACCAAGAUCAAGCUGUGCAUCCUGCUGCACG | |
| | CCUUCAGAAUCAGAGCCGUGACCAUCGACAGAGUGAUGAGCUACCUGAACGCCAG | |
| | C | |
| 1261 | UCAAGCUUUUGGACCCUCGUACAGAAGCUAAUACGACUCACUAUAGGGAAAUAAG | hIL12AB_002 |
| | AGAGAAAAGAAGAGUAAGAAGAAAUAUAAGAGCCACCAUGUGCCACCAGCAGCUG | mRNA |
| | GUGAUCAGCUGGUUCAGCCUGGUGUUCCUGGCCAGCCCCCUGGUGGCCAUCUGGG | comprising |
| | AGCUGAAGAAGGACGUGUACGUGGUGGAGUUGGAUUGGUACCCCGACGCCCCCGG | 5′ UTR, ORF, |
| | CGAGAUGGUGGUGCUGACCUGCGACACCCCCGAGGAGGACGGCAUCACCUGGACC | and 3′ UTR |
| | CUGGACCAGAGCAGCGAGGUGCUGGGCAGCGGCAAGACCCUGACCAUCCAGGUGA | |
| | AGGAGUUCGGCGACGCCGGCCAGUACACCUGCCACAAGGGCGGCGAGGUGCUGAG | |
| | CCACAGCCUGCUGCUGCUGCACAAGAAGGAGGACGGCAUCUGGAGCACCGACAUC | |
| | CUGAAGGACCAGAAGGAGCCCAAGAACAAGACCUUCCUGAGAUGCGAGGCCAAGA | |
| | ACUACAGCGGCAGAUUCACCUGCUGGUGGCUGACCACCAUCAGCACCGACCUGAC | |
| | CUUCAGCGUGAAGAGCAGCAGAGGCAGCAGCGACCCCCAGGGCGUGACCUGCGGC | |
| | GCCGCCACCCUGAGCGCCGAGAGAGUGAGAGGCGACAACAAGGAGUACGAGUACA | |
| | GCGUGGAGUGCCAGGAAGAUAGCGCCUGCCCCGCCGCCGAGGAGAGCCUGCCCAU | |
| | CGAGGUGAUGGUGGACGCCGUGCACAAGCUGAAGUACGAGAACUACACCAGCAGC | |
| | UUCUUCAUCAGAGAUAUCAUCAAGCCCGACCCCCCCAAGAACCUGCAGCUGAAGC | |
| | CCCUGAAGAACAGCCGGCAGGUGGAGGUGAGCUGGGAGUACCCCGACACCUGGAG | |
| | CACCCCCCACAGCUACUUCAGCCUGACCUUCUGCGUGCAGGUGCAGGGCAAGAGC | |
| | AAGAGAGAGAAGAAAGAUAGAGUGUUCACCGACAAGACCAGCGCCACCGUGAUCU | |
| | GCAGAAAGAACGCCAGCAUCAGCGUGAGAGCCCAAGAUAGAUACUACAGCAGCAG | |
| | CUGGAGCGAGUGGGCCAGCGUGCCCUGCAGCGGCGGCGGCGGCGGCGGCAGCAGA | |
| | AACCUGCCCGUGGCCACCCCCGACCCCGGCAUGUUCCCCUGCCUGCACCACAGCC | |
| | AGAACCUGCUGAGAGCCGUGAGCAACAUGCUGCAGAAGGCCCGGCAGACCCUGGA | |
| | GUUCUACCCCUGCACCAGCGAGGAGAUCGACCACGAAGAUAUCACCAAAGAUAAG | |
| | ACCAGCACCGUGGAGGCCUGCCUGCCCCUGGAGCUGACCAAGAACGAGAGCUGCC | |
| | UGAACAGCAGAGAGACCAGCUUCAUCACCAACGGCAGCUGCCUGGCCAGCAGAAA | |
| | GACCAGCUUCAUGAUGGCCCUGUGCCUGAGCAGCAUCUACGAGGACCUGAAGAUG | |
| | UACCAGGUGGAGUUCAAGACCAUGAACGCCAAGCUGCUGAUGGACCCCAAGCGGC | |
| | AGAUCUUCCUGGACCAGAACAUGCUGGCCGUGAUCGACGAGCUGAUGCAGGCCCU | |
| | GAACUUCAACAGCGAGACCGUGCCCCAGAAGAGCAGCCUGGAGGAGCCCGACUUC | |
| | UACAAGACCAAGAUCAAGCUGUGCAUCCUGCUGCACGCCUUCAGAAUCAGAGCCG | |
| | UGACCAUCGACAGAGUGAUGAGCUACCUGAACGCCAGCUGAUAAUAGGCUGGAGC | |
| | CUCGGUGGCCAUGCUUCUUGCCCCUUGGGCCUCCCCCCAGCCCCUCCUCCCCUUC | |
| | CUGCACCCGUACCCCCCAAACACCAUUGUCACACUCCAGUGGUCUUUGAAUAAAG | |
| | UCUGAGUGGGCGGC | |
| 1262 | G*GGGAAAUAAGAGAGAAAAGAAGAGUAAGAAGAAAUAUAAGAGCCACCAUGUGC | hIL12AB_002 |
| | CACCAGCAGCUGGUGAUCAGCUGGUUCAGCCUGGUGUUCCUGGCCAGCCCCCUGG | mRNA |
| | UGGCCAUCUGGGAGCUGAAGAAGGACGUGUACGUGGUGGAGUUGGAUUGGUACCC | comprising |
| | CGACGCCCCCGGCGAGAUGGUGGUGCUGACCUGCGACACCCCCGAGGAGGACGGC | 5′ UTR, ORF, |
| | AUCACCUGGACCCUGGACCAGAGCAGCGAGGUGCUGGGCAGCGGCAAGACCCUGA | 3′ UTR, and |
| | CCAUCCAGGUGAAGGAGUUCGGCGACGCCGGCCAGUACACCUGCCACAAGGGCGG | T100 tail |
| | CGAGGUGCUGAGCCACAGCCUGCUGCUGCUGCACAAGAAGGAGGACGGCAUCUGG | |
| | AGCACCGACAUCCUGAAGGACCAGAAGGAGCCCAAGAACAAGACCUUCCUGAGAU | |
| | GCGAGGCCAAGAACUACAGCGGCAGAUUCACCUGCUGGUGGCUGACCACCAUCAG | |
| | CACCGACCUGACCUUCAGCGUGAAGAGCAGCAGAGGCAGCAGCGACCCCCAGGGC | |
| | GUGACCUGCGGCGCCGCCACCCUGAGCGCCGAGAGAGUGAGAGGCGACAACAAGG | |
| | AGUACGAGUACAGCGUGGAGUGCCAGGAAGAUAGCGCCUGCCCCGCCGCCGAGGA | |
| | GAGCCUGCCCAUCGAGGUGAUGGUGGACGCCGUGCACAAGCUGAAGUACGAGAAC | |
| | UACACCAGCAGCUUCUUCAUCAGAGAUAUCAUCAAGCCCGACCCCCCCAAGAACC | |
| | UGCAGCUGAAGCCCCUGAAGAACAGCCGGCAGGUGGAGGUGAGCUGGGAGUACCC | |
| | CGACACCUGGAGCACCCCCCACAGCUACUUCAGCCUGACCUUCUGCGUGCAGGUG | |
| | CAGGGCAAGAGCAAGAGAGAGAAGAAAGAUAGAGUGUUCACCGACAAGACCAGCG | |
| | CCACCGUGAUCUGCAGAAAGAACGCCAGCAUCAGCGUGAGAGCCCAAGAUAGAUA | |
| | CUACAGCAGCAGCUGGAGCGAGUGGGCCAGCGUGCCCUGCAGCGGCGGCGGCGGC | |
| | GGCGGCAGCAGAAACCUGCCCGUGGCCACCCCCGACCCCGGCAUGUUCCCCUGCC | |
| | UGCACCACAGCCAGAACCUGCUGAGAGCCGUGAGCAACAUGCUGCAGAAGGCCCG | |
| | GCAGACCCUGGAGUUCUACCCCUGCACCAGCGAGGAGAUCGACCACGAAGAUAUC | |
| | ACCAAAGAUAAGACCAGCACCGUGGAGGCCUGCCUGCCCCUGGAGCUGACCAAGA | |
| | ACGAGAGCUGCCUGAACAGCAGAGAGACCAGCUUCAUCACCAACGGCAGCUGCCU | |
| | GGCCAGCAGAAAGACCAGCUUCAUGAUGGCCCUGUGCCUGAGCAGCAUCUACGAG | |
| | GACCUGAAGAUGUACCAGGUGGAGUUCAAGACCAUGAACGCCAAGCUGCUGAUGG | |
| | ACCCCAAGCGGCAGAUCUUCCUGGACCAGAACAUGCUGGCCGUGAUCGACGAGCU | |
| | GAUGCAGGCCCUGAACUUCAACAGCGAGACCGUGCCCCAGAAGAGCAGCCUGGAG | |
| | GAGCCCGACUUCUACAAGACCAAGAUCAAGCUGUGCAUCCUGCUGCACGCCUUCA | |
| | GAAUCAGAGCCGUGACCAUCGACAGAGUGAUGAGCUACCUGAACGCCAGCUGAUA | |
| | AUAGGCUGGAGCCUCGGUGGCCAUGCUUCUUGCCCCUUGGGCCUCCCCCCAGCCC | |
| | CUCCUCCCCUUCCUGCACCCGUACCCCCCAAACACCAUUGUCACACUCCAGUGGU | |
| | CUUUGAAUAAAGUCUGAGUGGGCGGCAAAAAAAAAAAAAAAAAAAAAAAAAAAAA | |
| | AAAAAAAAAAAAAAAAAAAAAAAAAAAAAAAAAAAAAAAAAAAAAAAAAAAAAAA | |
| | AAAAAAAAAAAAAAAAUCUAG | |

[2224] The sequence-optimized IL12 polynucleotide sequences disclosed herein are distinct from the corresponding wild type nucleotide acid sequences and from other known sequence-optimized nucleotide sequences, e.g., these sequence-optimized nucleic acids have unique compositional characteristics. See FIGS. 91A to 95D.

[2225] In some embodiments, the percentage of uracil or thymine nucleobases in a sequence-optimized IL12 polynucleotide sequence (e.g., encoding an IL12B and/or IL12A polypeptide, a functional fragment, or a variant thereof) is modified (e.g., reduced) with respect to the percentage of uracil or thymine nucleobases in the reference wild-type IL12 polynucleotide sequence. Such a sequence is referred to as a uracil-modified or thymine-modified sequence.

[2226] In some embodiments, the sequence-optimized IL12 polynucleotide sequence has a lower uracil or thymine content than the uracil or thymine content in the reference wild-type sequence. In some embodiments, the uracil or thymine content in a sequence-optimized IL12 polynucleotide sequence of the disclosure is greater than the uracil or thymine content in the reference wild-type sequence and still maintain beneficial effects, e.g., increased expression and/or reduced Toll-Like Receptor (TLR) response when compared to the reference wild-type sequence.

[2227] In some embodiments, the IL12 optimized sequences of the present disclosure contain unique ranges of uracils or thymine (if DNA) in the sequence. The uracil or thymine content of the optimized IL12 sequences can be expressed in various ways, e.g., uracil or thymine content of optimized sequences relative to the theoretical minimum (% U_{TM} or % T_{TM}), relative to the wild-type (% U_{WT} or % T_{WT}), and relative to the total nucleotide content (% U_{TL} or % T_{TL}). For DNA it is recognized that thymine is present instead of uracil, and one would substitute T where U appears. Thus, all the disclosures related to, e.g., % U_{TM}, % U_{WT}, or % U_{TL}, with respect to RNA are equally applicable to % T_{TM}, % T_{WT}, or % T_{TL} with respect to DNA.

[2228] In some embodiments, the % U_{TM} of a uracil-modified sequence encoding an IL12B polypeptide of the disclosure is below 196%, below 195%, below 190%, below 185%, below 180%, below 175%, below 170%, below 165%, below 160%, below 155%, below 150%, below 145%, below 140%, below 139%, below 138%, below 137%, below 136%, below 135%, below 134%, below 133%, below 132%, below 131%, below 130%, below 129%, below 128%, below 127%, below 126%, below 125%, below 124%, below 123%, below 122%, below 121%, below 120%, below 119%, below 118%, below 117%, below 116%, or below 115%.

[2229] In some embodiments, the % U_{TM} of a uracil-modified sequence encoding an IL12B polypeptide of the disclosure is below 196% and above 100%, above 101%, above 102%, above 103%, above 104%, above 105%, above 106%, above 107%, above 108%, above 109%, above 110%, above 111%, above 112%, above 113%, above 114%, above 115%, above 116%, above 117%, above 118%, above 119%, above 120%, above 121%, above 122%, above 123%, above 124%, above 125%, above 126%, above 127%, above 128%, above 129%, or above 130%, above 135%, above 130%, above 131%, or above 132.

[2230] In some embodiments, the % U_{TM} of a uracil-modified sequence encoding an IL12B polypeptide of the disclosure is between 132% and 150%, between 133% and 150%, between 134% and 150%, between 135% and 150%, between 136% and 150%, between 137% and 150%, between 138% and 150%, between 139% and 150%, between 140% and 150%, between 132% and 151%, between 132% and 152%, between 132% and 153%, between 132% and 154%, between 132% and 155%, between 132% and 156%, between 132% and 157%, between 132% and 158%, between 132% and 159%, between 132% and 160%, between 133% and 151%, between 134% and 152%, between 135% and 153%, between 136% and 154%, between 137% and 155%, between 138% and 156%, between 138% and 157%, between 139% and 158%, between 140% and 159%, or between 141% and 160%.

[2231] In some embodiments, the % U_{TM} of a uracil-modified sequence encoding an IL12B polypeptide of the disclosure is between about 133% and about 152%, e.g., between 132.32% and 150.51%.

[2232] In some embodiments, the % U_{TM} of a uracil-modified sequence encoding an IL12A polypeptide of the disclosure is below 198%, below 195%, below 190%, below 185%, below 180%, below 175%, below 170%, below 165%, below 160%, below 155%, below 150%, below 145%, below 140%, below 139%, below 138%, below 137%, below 136%, below 135%, below 134%, below 133%, below 132%, below 131%, below 130%, below 129%, below 128%, below 127%, below 126%, below 125%, below 124%, below 123%, below 122%, below 121%, below 120%, below 119%, below 118%, below 117%, below 116%, or below 115%.

[2233] In some embodiments, the % U_{TM} of a uracil-modified sequence encoding an IL12A polypeptide of the disclosure is below 198% and above 100%, above 101%, above 102%, above 103%, above 104%, above 105%, above 106%, above 107%, above 108%, above 109%, above 110%, above 111%, above 112%, above 113%, above 114%, above 115%, above 116%, above 117%, above 118%, above 119%, above 120%, above 121%, above 122%, above 123%, above 124%, or above 125%.

[2234] In some embodiments, the % U_{TM} of a uracil-modified sequence encoding an IL12A polypeptide of the disclosure is between 125% and 143%, between 126% and 143%, between 127% and 143%, between 128% and 143%, between 129% and 143%, between 130% and 143%, between 131% and 132%, between 133% and 134%, between 135% and 143%, between 125% and 144%, between 125% and 145%, between 125% and 146%, between 125% and 147%, between 125% and 148%, between 125% and 149%, between 125% and 150%, between 125% and 151%, between 125% and 152%, between 125% and 153%, between 125% and 154%, between 125% and 155%, between 126% and 144%, between 127% and 145%, between 128% and 146%, between 129% and 147%, between 130% and 148%, between 131% and 149%, between 132% and 150%, or between 133% and 151%.

[2235] In some embodiments, the % U_{TM} of a uracil-modified sequence encoding an IL12A polypeptide of the disclosure is between about 124% and about 145%, e.g., between 125% and 144.42%.

[2236] A uracil- or thymine-modified sequence encoding an IL12B polypeptide, IL12A polypeptide, or both IL12B and IL12A polypeptides of the disclosure can also be described according to its uracil or thymine content relative to the uracil or thymine content in the corresponding wild-type nucleic acid sequence (% U_{WT} or % T_{WT}).

[2237] In some embodiments, the % U_{WT} or % T_{WT} of a uracil- or thymine-modified sequence encoding an IL12B polypeptide of the disclosure is above 50%, above 55%, above 60%, above 65%, above 70%, above 75%, above 80%, above 85%, above 90%, or above 95%.

[2238] In some embodiments, the % U_{WT} or % T_{WT} of a uracil- or thymine modified sequence encoding an IL12B polypeptide of the disclosure is between 55% and 88%, between 56% and 87%, between 57% and 86%, between 58% and 85%, between 59% and 84%, between 60% and 83%, between 61% and 82%, between 62% and 81%, between 63% and 80%, between 64% and 79%, between 65% and 78%, or between 65% and 77%.

[2239] In some embodiments, the % U_{WT} or % T_{WT} of a uracil- or thymine-modified sequence encoding an IL12B polypeptide of the disclosure is between 66% and 78%, between 66% and 77%, between 67% and 77%, between 67% and 76%, or between 65% and 77%.

[2240] In a particular embodiment, the % U_{WT} or % T_{WT} of a uracil- or thymine-modified sequence encoding an IL12B polypeptide of the disclosure is between about 66% and about 77%, e.g., between 67% and 76%.

[2241] In some embodiments, the % U_{WT} or % T_{WT} of a uracil- or thymine-modified sequence encoding an IL12A polypeptide of the disclosure is above 50%, above 55%, above 60%, above 65%, above 70%, above 75%, above 80%, above 85%, above 90%, or above 95%.

[2242] In some embodiments, the % U_{WT} or % T_{WT} of a uracil- or thymine modified sequence encoding an IL12A polypeptide of the disclosure is between 50% and 85%, between 51% and 84%, between 52% and 83%, between 53% and 82%, between 54% and 81%, between 55% and 80%, between 56% and 79%, between 57% and 78%, between 58% and 77%, between 59% and 76%, between 60% and 75%, between 61% and 74%, or between 62% and 73%.

[2243] In some embodiments, the % U_{WT} or % T_{WT} of a uracil- or thymine-modified sequence encoding an IL12A polypeptide of the disclosure is between 61% and 74%, between 61% and 73%, between 61% and 72%, between 61% and 73%, between 62% and 73%, between 62% and 72%, between 62% and 74%, or between 63% and 72%.

[2244] In a particular embodiment, the % U_{WT} or % T_{WT} of a uracil- or thymine-modified sequence encoding an IL12A polypeptide of the disclosure is between about 62% and about 73%, e.g., between 63% and 72%.

[2245] The uracil or thymine content of wild-type IL12B relative to the total nucleotide content (%) is about 21%. In some embodiments, the uracil or thymine content of a uracil—or thymine-modified sequence encoding an IL12B polypeptide relative to the total nucleotide content (%) (% U_{TL} or % T_{TL}) is less than 21%. In some embodiments, the % U_{TL} or % T_{TL} is less than 20%, less than 19%, less that 18%, less than 17%, less than 16%, less than 15%, less than 14%, less than 13%, less than 12%, less than 110, or less than 10%. In some embodiments, the % U_{TL} or % T_{TL} is not less than 10%, 9%, 8%, 7%, 6%, 5%, 4%, 3%, 2%, or 1%.

[2246] In some embodiments, the uracil or thymine content of a uracil- or thymine-modified sequence encoding an IL12B polypeptide of the disclosure relative to the total nucleotide content (% U_{TL} or % T_{TL}) is between 10% and 20%, between 11% and 20%, between 11.5% and 1⁹0.5%, between 12% and 19%, between 12% and 18%, between 13% and 18%, between 13% and 17%, between 13% and 16%, between 13% and 16%, between 14% and 16%, between 14% and 17%, or between 13% and 17%.

[2247] In a particular embodiment, the uracil or thymine content (% U_{TL} or % T_{TL}) of a uracil- or thymine modified sequence encoding a IL1B2 polypeptide of the disclosure is between about 13% and about 17%, e.g., between 14% and 16%

[2248] The uracil or thymine content of wild-type IL12A relative to the total nucleotide content (%) is about 26%. In some embodiments, the uracil or thymine content of a uracil—or thymine-modified sequence encoding an IL12A polypeptide relative to the total nucleotide content (%) (% U_{TL} or % T_{TL}) is less than 25%. In some embodiments, the % U_{TL} or % T_{TL} is less than 25%, less than 24%, less than 23%, less than 22%, less than 21%, less than 20%, less than 19%, less that 18%, less than 17%, less than 16%, less than 15%, less than 14%, less than 13%, less than 12%, less than 110, or less than 10%. In some embodiments, the % U_{TL} or % T_{TL} is not less than 10%, 9%, 8%, 7%, 6%, 5%, 4%, 3%, 2%, or 1%.

[2249] In some embodiments, the uracil or thymine content of a uracil- or thymine-modified sequence encoding an IL12A polypeptide of the disclosure relative to the total nucleotide content (% U_{TL} or % T_{TL}) is between 10% and 25%, between 11% and 25%, between 12% and 25%, between 13% and 25%, between 14% and 25%, between 15% and 25%, between 16% and 25%, between 10% and 24%, between 10% and 23%, between 11I % and 22%, between 11% and 21%, between 11% and 20%, between 11% and 19%, between 11I % and 18%, between 12% and 24%, between 12% and 23%, between 13% and 22%, between 14% and 21%, between 13% and 20%, between 15% and 19%, between 15% and 20%, between 16% and 19%, between 16% and 18%, or between 13% and 17%.

[2250] In a particular embodiment, the uracil or thymine content (% U_{TL} or % T_{TL}) of a uracil- or thymine modified sequence encoding an IL12A polypeptide of the disclosure is between about 15% and about 19%, e.g., between 16% and 18% In some embodiments, a uracil-modified sequence encoding an IL12B polypeptide, IL12A polypeptide, or both IL12B and IL12A polypeptides of the disclosure has a reduced number of consecutive uracils with respect to the corresponding wild-type nucleic acid sequence. For example, two consecutive leucines can be encoded by the sequence CUUUUG (SEQ ID NO: 1159), which includes a four uracil cluster. Such a subsequence can be substituted, e.g., with CUGCUC, which removes the uracil cluster.

[2251] Phenylalanine can be encoded by UUC or UUU. Thus, even if phenylalanines encoded by UUU are replaced by UUC, the synonymous codon still contains a uracil pair (UU). Accordingly, the number of phenylalanines in a sequence establishes a minimum number of uracil pairs (UU) that cannot be eliminated without altering the number of phenylalanines in the encoded polypeptide.

[2252] In some embodiments, a uracil-modified sequence encoding an IL12B and/or IL12A polypeptide of the disclosure has a reduced number of uracil triplets (UUU) with respect to the wild-type nucleic acid sequence. In some embodiments, a uracil-modified sequence encoding an IL12B and/or IL12A polypeptide of the disclosure contains 4, 3, 2, 1 or no uracil triplets (UUU).

[2253] In some embodiments, a uracil-modified sequence encoding an IL12B and/or IL12A polypeptide has a reduced number of uracil pairs (UU) with respect to the number of uracil pairs (UU) in the wild-type nucleic acid sequence. In some embodiments, a uracil-modified sequence encoding an IL12B and/or IL12A polypeptide of the disclosure has a number of uracil pairs (UU) corresponding to the minimum possible number of uracil pairs (UU) in the wild-type nucleic acid sequence.

[2254] In some embodiments, a uracil-modified sequence encoding an IL12B polypeptide of the disclosure has at least 1, 2, 3, 4, 5, 6, 7, 8, 9, 10, 11, 12, 13, 14, 15, 16, 17, 18, 19, 20, 21, 22, or 23 uracil pairs (UU) less than the number of uracil pairs (UU) in the wild-type nucleic acid sequence. In some embodiments, a uracil-modified sequence encoding an IL12B polypeptide of the disclosure has between 7 and 13, between 8 and 14, between 9 and 15, between 10 and 16, between 11 and 7, between 12 and 18 uracil pairs (UU).

[2255] In some embodiments, a uracil-modified sequence encoding an IL12B polypeptide of the disclosure has at least 1, 2, 3, 4, 5, 6, 7, 8, 9, 10, 11, 12, 13, 14, 15, 16, 17, 18, 19, or 20 uracil pairs (UU) less than the number of uracil pairs (UU) in the wild-type nucleic acid sequence. In some embodiments, a uracil-modified sequence encoding an IL12A polypeptide of the disclosure has between 7 and 13, between 8 and 14, between 9 and 15, between 10 and 16, between 11 and 7, between 12 and 18 uracil pairs (UU).

[2256] In some embodiments, a uracil-modified sequence encoding an IL12A or IL12B polypeptide of the disclosure has a % UU_{wt} less than 90%, less than 85%, less than 80%, less than 75%, less than 70%, less than 65%, less than 60%, less than 65%, less than 60%, less than 55%, less than 50%, less than 40%, less than 30%, or less than 20%.

[2257] In some embodiments, a uracil-modified sequence encoding an IL12B polypeptide has a % UU_{Wt} between 24% and 59%. In a particular embodiment, a uracil-modified sequence encoding an IL12B polypeptide, IL12A polypeptide, or both IL12B and IL12A polypeptides of the disclosure has a % UU_{wt} between 29% and 55%.

[2258] In some embodiments, a uracil-modified sequence encoding an IL12A polypeptide has a % UU_{wt} between 14% and 57%. In a particular embodiment, a uracil-modified sequence encoding an IL12B polypeptide, IL12A polypeptide, or both IL12B and IL12A polypeptides of the disclosure has a % UU_{wt} between 19% and 52%.

[2259] In some embodiments, the IL12 polynucleotide comprises a uracil-modified sequence encoding an IL12A polypeptide, an IL12B polypeptide, or both IL12A and IL12B polypeptides disclosed herein. In some embodiments, the uracil-modified sequence encoding an IL12A polypeptide, an IL12B polypeptide, or both IL12A and IL12B polypeptides comprises at least one chemically modified nucleobase, e.g., 5-methoxyuracil. In some embodiments, at least 95% of a nucleobase (e.g., uracil) in a uracil-modified sequence encoding an IL12A polypeptide, an IL12B polypeptide, or both IL12A and IL12B polypeptides of the disclosure are modified nucleobases. In some embodiments, at least 95% of uracil in a uracil-modified sequence encoding an IL12A polypeptide, an IL12B polypeptide, or both IL12A and IL12B polypeptides is 5-methoxyuracil.

[2260] In some embodiments, the IL12 polynucleotide comprising a uracil-modified sequence further comprises a miRNA binding site, e.g., a miRNA binding site that binds to miR-122. In some embodiments, the IL12 polynucleotide comprising a uracil-modified sequence is formulated with a delivery agent, e.g., a compound having Formula (I), e.g., any of Compounds 1-147.

[2261] In some embodiments, the “guanine content of the sequence optimized ORF encoding IL12B and/or IL12A with respect to the theoretical maximum guanine content of a nucleotide sequence encoding the IL12B and/or IL12A polypeptide,” abbreviated as % G_{TMX} is at least 69%, at least 70%, at least 75%, at least about 80%, at least about 85%, at least about 90%, at least about 95%, or about 100%. In some embodiments, the % G_{TMX} is between about 70% and about 80%, between about 71% and about 79%, between about 71% and about 78%, or between about 71% and about 77%.

[2262] In some embodiments, the “cytosine content of the ORF relative to the theoretical maximum cytosine content of a nucleotide sequence encoding the IL12B and/or IL12A polypeptide,” abbreviated as % C_{TMX}, is at least 59%, at least 60%, at least about 65%, at least about 70%, at least about 75%, at least about 80%, at least about 85%, at least about 90%, at least about 95%, or about 100%. In some embodiments, the % C_{TMX} is between about 60% and about 80%, between about 62% and about 80%, between about 63% and about 79%, or between about 68% and about 76%.

[2263] In some embodiments, the “guanine and cytosine content (G/C) of the ORF relative to the theoretical maximum G/C content in a nucleotide sequence encoding the IL12B and/or IL12A polypeptide,” abbreviated as % G/C_{TMX} is at least about 81%, at least about 85%, at least about 90%, at least about 95%, or about 100%. The % G/C_{TMX} is between about 80% and about 100%, between about 85% and about 99%, between about 90% and about 97%, or between about 91% and about 96%.

[2264] In some embodiments, the “G/C content in the ORF relative to the G/C content in the corresponding wild-type ORF,” abbreviated as % G/C_{WT} is at least 102%, at least 103%, at least 104%, at least 105%, at least 106%, at least 107%, at least 110%, at least 115%, or at least 120%.

[2265] In some embodiments, the average G/C content in the 3rd codon position in the ORF is at least 20%, at least 21%, at least 22%, at least 23%, at least 24%, at least 25%, at least 26%, at least 27%, at least 28%, at least 29%, or at least 30% higher than the average G/C content in the 3rd codon position in the corresponding wild-type ORF.

[2266] In some embodiments, the IL12 polynucleotide of the disclosure comprises an open reading frame (ORF) encoding an IL12B and/or IL12A polypeptide, wherein the ORF has been sequence optimized, and wherein each of % U_{TL}, % U_{WT}, % U_{TM}, % G_{TL}, % G_{WT}, % G_{TMX}, % C_{TL}, % C_{WT}, % C_{TMX}, % G/C_{TL}, % G/C_{WT}, or % G/C_{TMX}, alone or in a combination thereof is in a range between (i) a maximum corresponding to the parameter's maximum value (MAX) plus about 0.5, 1, 1.5, 2, 2.5, 3, 3.5, 4, 4.5, 5, 5.5, 6, 6.5, 7, 7.5, 8, 8.5, 9, 9.5, or 10 standard deviations (STD DEV), and (ii) a minimum corresponding to the parameter's minimum value (MIN) less 0.5, 1, 1.5, 2, 2.5, 3, 3.5, 4, 4.5, 5, 5.5, 6, 6.5, 7, 7.5, 8, 8.5, 9, 9.5, or 10 standard deviations (STD DEV).

[2267] Modified nucleotide sequences encoding IL12 polypeptides: In some embodiments, the IL12 polynucleotide (e.g., a RNA, e.g., an mRNA) of the disclosure comprises a chemically modified nucleobase, e.g., 5-methoxyuracil. In some embodiments, the mRNA is a uracil-modified sequence comprising an ORF encoding an IL12B polypeptide, IL12A polypeptide, or both IL12B and IL12A polypeptides, wherein the mRNA comprises a chemically modified nucleobase, e.g., 5-methoxyuracil.

[2268] In certain aspects of the disclosure, when the 5-methoxyuracil base is connected to a ribose sugar, as it is in polynucleotides, the resulting modified nucleoside or nucleotide is referred to as 5-methoxyuridine. In some embodiments, uracil in the IL12 polynucleotide is at least about 25%, at least about 30%, at least about 40%, at least about 50%, at least about 60%, at least about 70%, at least about 80%, at least 90%, at least 95%, at least 99%, or about 100% 5-methoxyuracil. In one embodiment, uracil in the polynucleotide is at least 95% 5-methoxyuracil. In another embodiment, uracil in the polynucleotide is 100% 5-methoxyuracil.

[2269] In embodiments where uracil in the IL12 polynucleotide is at least 95% 5-methoxyuracil, overall uracil content can be adjusted such that an mRNA provides suitable protein expression levels while inducing little to no immune response. In some embodiments, the uracil content of the ORF (% U_{TM}) is between about 105% and about 145%, about 105% and about 140%, about 110% and about 140%, about 110% and about 145%, about 115% and about 135%, about 105% and about 135%, about 110% and about 135%, about 115% and about 145%, or about 115% and about 140%.

[2270] In other embodiments, the uracil content of the ORF is between about 117% and about 134% or between 118% and 132% of the % U_{TM}. In some embodiments, the % U_{TM} is about 115%, about 120%, about 125%, about 130%, about 135%, about 140%, about 145%, or about 150%. In this context, the term “uracil” can refer to 5-methoxyuracil and/or naturally occurring uracil.

[2271] In some embodiments, the uracil content in the ORF of the mRNA encoding an IL12A polypeptide, an IL12B polypeptide, or both IL12A and IL12B polypeptides of the disclosure is less than about 50%, about 40%, about 30%, or about 20% of the total nucleobase content in the ORF. In some embodiments, the uracil content in the ORF is between about 15% and about 25% of the total nucleobase content in the ORF.

[2272] In other embodiments, the uracil content in the ORF is between about 20% and about 30% of the total nucleobase content in the ORF. In one embodiment, the uracil content in the ORF of the mRNA encoding an IL12A polypeptide, an IL12B polypeptide, or both IL12A and IL12B polypeptides is less than about 20% of the total nucleobase content in the open reading frame. In this context, the term “uracil” can refer to 5-methoxyuracil and/or naturally occurring uracil.

[2273] In further embodiments, the ORF of the mRNA encoding an IL12A polypeptide, an IL12B polypeptide, or both IL12A and IL12B polypeptides having 5-methoxyuracil and adjusted uracil content has increased Cytosine (C), Guanine (G), or Guanine/Cytosine (G/C) content (absolute or relative). In some embodiments, the overall increase in C, G, or G/C content (absolute or relative) of the ORF is at least about 2%, at least about 3%, at least about 4%, at least about 5%, at least about 6%, at least about 7%, at least about 10%, at least about 15%, at least about 20%, at least about 40%, at least about 50%, at least about 60%, at least about 70%, at least about 80%, at least about 90%, at least about 95%, or at least about 100% relative to the G/C content (absolute or relative) of the wild-type ORF.

[2274] In some embodiments, the G, the C, or the G/C content in the ORF is less than about 100%, less than about 90%, less than about 85%, or less than about 80% of the theoretical maximum G, C, or G/C content of the corresponding wild type nucleotide sequence encoding the IL12A polypeptide, IL12B polypeptide, or both IL12A and IL12B polypeptides (% G_{TMX}; % C_{TMX}, or % G/C_{TMX}). In other embodiments, the G, the C, or the G/C content in the ORF is between about 70% and about 80%, between about 71% and about 79%, between about 71% and about 78%, or between about 71% and about 77% of the % G_{TMX}, % C_{TMX}, or % G/C_{TMX}. In some embodiments, the increases in G and/or C content (absolute or relative) described herein can be conducted by replacing synonymous codons with low G, C, or G/C content with synonymous codons having higher G, C, or G/C content. In other embodiments, the increase in G and/or C content (absolute or relative) is conducted by replacing a codon ending with U with a synonymous codon ending with G or C.

[2275] In further embodiments, the ORF of the mRNA encoding an IL12A polypeptide, an IL12B polypeptide, or both IL12A and IL12B polypeptides of the disclosure comprises 5-methoxyuracil and has an adjusted uracil content containing less uracil pairs (UU) and/or uracil triplets (UUU) and/or uracil quadruplets (UUUU) than the corresponding wild-type nucleotide sequence encoding the IL12A polypeptide, IL12B polypeptide, or both IL12A and IL12B polypeptides.

[2276] In some embodiments, the ORF of the mRNA encoding an IL12A polypeptide, an IL12B polypeptide, or both IL12A and IL12B polypeptides of the disclosure contains no uracil pairs and/or uracil triplets and/or uracil quadruplets. In some embodiments, uracil pairs and/or uracil triplets and/or uracil quadruplets are reduced below a certain threshold, e.g., no more than 1, 2, 3, 4, 5, 6, 7, 8, 9, 10, 11, 12, 13, 14, 15, 16, 17, 18, 19, or 20 occurrences in the ORF of the mRNA encoding the IL12A polypeptide, IL12B polypeptide, or both IL12A and IL12B polypeptides.

[2277] In a particular embodiment, the ORF of the mRNA encoding the IL12A polypeptide, IL12B polypeptide, or both IL12A and IL12B polypeptides of the disclosure contains less than 20, 19, 18, 17, 16, 15, 14, 13, 12, 11, 10, 9, 8, 7, 6, 5, 4, 3, 2, or 1 non-phenylalanine uracil pairs and/or triplets. In another embodiment, the ORF of the mRNA encoding the IL12A polypeptide, IL12B polypeptide, or both IL12A and IL12B polypeptides contains no non-phenylalanine uracil pairs and/or triplets.

[2278] In further embodiments, the ORF of the mRNA encoding an IL12A polypeptide, an IL12B polypeptide, or both IL12A and IL12B polypeptides of the disclosure comprises 5-methoxyuracil and has an adjusted uracil content containing less uracil-rich clusters than the corresponding wild-type nucleotide sequence encoding the IL12A polypeptide, an IL12B polypeptide, or both IL12A and IL12B polypeptides. In some embodiments, the ORF of the mRNA encoding the IL12A polypeptide, IL12B polypeptide, or both IL12A and IL12B polypeptides of the disclosure contains uracil-rich clusters that are shorter in length than corresponding uracil-rich clusters in the corresponding wild-type nucleotide sequence encoding the IL12A polypeptide, IL12B polypeptide, or both IL12A and IL12B polypeptides.

[2279] In further embodiments, alternative lower frequency codons are employed. At least about 5%, at least about 10%, at least about 15%, at least about 20%, at least about 25%, at least about 30%, at least about 35%, at least about 40%, at least about 45%, at least about 50%, at least about 55%, at least about 60%, at least about 65%, at least about 70%, at least about 75%, at least about 80%, at least about 85%, at least about 90%, at least about 95%, at least about 99%, or 100% of the codons in the IL12A polypeptide, IL12B polypeptide, or both IL12A and IL12B polypeptides-encoding ORF of the 5-methoxyuracil-comprising mRNA are substituted with alternative codons, each alternative codon having a codon frequency lower than the codon frequency of the substituted codon in the synonymous codon set. The ORF also has adjusted uracil content, as described above.

[2280] In some embodiments, at least one codon in the ORF of the mRNA encoding the IL12A polypeptide, IL12B polypeptide, or both IL12A and IL12B polypeptides is substituted with an alternative codon having a codon frequency lower than the codon frequency of the substituted codon in the synonymous codon set.

[2281] In some embodiments, the adjusted uracil content, IL12A polypeptide, IL12B polypeptide, or both IL12A and IL12B polypeptides-encoding ORF of the 5-methoxyuracil-comprising mRNA exhibits expression levels of IL12 when administered to a mammalian cell that are higher than expression levels of IL12 from the corresponding wild-type mRNA. In other embodiments, the expression levels of IL12 when administered to a mammalian cell are increased relative to a corresponding mRNA containing at least 95% 5-methoxyuracil and having a uracil content of about 160%, about 170%, about 180%, about 190%, or about 200% of the theoretical minimum.

[2282] In yet other embodiments, the expression levels of IL12 when administered to a mammalian cell are increased relative to a corresponding mRNA, wherein at least about 50%, at least about 60%, at least about 70%, at least about 80%, at least about 90%, or about 100% of uracils are 1-methylpseudouracil or pseudouracils. In some embodiments, the mammalian cell is a mouse cell, a rat cell, or a rabbit cell. In other embodiments, the mammalian cell is a monkey cell or a human cell. In some embodiments, the human cell is a HeLa cell, a BJ fibroblast cell, or a peripheral blood mononuclear cell (PBMC). In some embodiments, IL12 is expressed when the mRNA is administered to a mammalian cell in vivo. In some embodiments, the mRNA is administered to mice, rabbits, rats, monkeys, or humans. In one embodiment, mice are null mice. In some embodiments, the mRNA is administered to mice in an amount of about 0.01 mg/kg, about 0.05 mg/kg, about 0.1 mg/kg, or about 0.15 mg/kg. In some embodiments, the mRNA is administered intravenously or intramuscularly. In other embodiments, the IL12 polypeptide is expressed when the mRNA is administered to a mammalian cell in vitro. In some embodiments, the expression is increased by at least about 2-fold, at least about 5-fold, at least about 10-fold, at least about 50-fold, at least about 500-fold, at least about 1500-fold, or at least about 3000-fold. In other embodiments, the expression is increased by at least about 10%, about 20%, about 30%, about 40%, about 50%, 60%, about 70%, about 80%, about 90%, or about 100%.

[2283] In some embodiments, adjusted uracil content, IL12A polypeptide, IL12B polypeptide, or both IL12A and IL12B polypeptides-encoding ORF of the 5-methoxyuracil-comprising mRNA exhibits increased stability. In some embodiments, the mRNA exhibits increased stability in a cell relative to the stability of a corresponding wild-type mRNA under the same conditions. In some embodiments, the mRNA exhibits increased stability including resistance to nucleases, thermal stability, and/or increased stabilization of secondary structure. In some embodiments, increased stability exhibited by the mRNA is measured by determining the half-life of the mRNA (e.g., in a plasma, cell, or tissue sample) and/or determining the area under the curve (AUC) of the protein expression by the mRNA over time (e.g., in vitro or in vivo). An mRNA is identified as having increased stability if the half-life and/or the AUC is greater than the half-life and/or the AUC of a corresponding wild-type mRNA under the same conditions.

[2284] In some embodiments, the mRNA of the present disclosure induces a detectably lower immune response (e.g., innate or acquired) relative to the immune response induced by a corresponding wild-type mRNA under the same conditions. In other embodiments, the mRNA of the present disclosure induces a detectably lower immune response (e.g., innate or acquired) relative to the immune response induced by an mRNA that encodes for an IL12B polypeptide, IL12A polypeptide, or both IL12B and IL12A polypeptides but does not comprise 5-methoxyuracil under the same conditions, or relative to the immune response induced by an mRNA that encodes for an IL12A polypeptide, IL12B polypeptide, or both IL12A and IL12B polypeptides and that comprises 5-methoxyuracil but that does not have adjusted uracil content under the same conditions. The innate immune response can be manifested by increased expression of pro-inflammatory cytokines, activation of intracellular PRRs (RIG-I, MDA5, etc), cell death, and/or termination or reduction in protein translation. In some embodiments, a reduction in the innate immune response can be measured by expression or activity level of Type 1 interferons (e.g., IFN-α, IFN-β, IFN-κ, IFN-δ, IFN-ε, IFN-τ, IFN-ω, and IFN-ζ) or the expression of interferon-regulated genes such as the toll-like receptors (e.g., TLR7 and TLR8), and/or by decreased cell death following one or more administrations of the mRNA of the disclosure into a cell.

[2285] In some embodiments, the expression of Type-1 interferons by a mammalian cell in response to the mRNA of the present disclosure is reduced by at least 10%, 20%, 30%, 40%, 50%, 60%, 70%, 80%, 90%, 95%, 99%, 99.9%, or greater than 99.9% relative to a corresponding wild-type mRNA, to an mRNA that encodes an IL12A polypeptide, IL12B polypeptide, or both IL12A and IL12B polypeptides but does not comprise 5-methoxyuracil, or to an mRNA that encodes an IL12A polypeptide, IL12B polypeptide, or both IL12A and IL12B polypeptides and that comprises 5-methoxyuracil but that does not have adjusted uracil content. In some embodiments, the interferon is IFN-β. In some embodiments, cell death frequency caused by administration of mRNA of the present disclosure to a mammalian cell is 10%, 25%, 50%, 75%, 85%, 90%, 95%, or over 95% less than the cell death frequency observed with a corresponding wild-type mRNA, an mRNA that encodes for an IL12A polypeptide, IL12B polypeptide, or both IL12A and IL12B polypeptides but does not comprise 5-methoxyuracil, or an mRNA that encodes for an IL12A polypeptide, IL12B polypeptide, or both IL12A and IL12B polypeptides and that comprises 5-methoxyuracil but that does not have adjusted uracil content. In some embodiments, the mammalian cell is a BJ fibroblast cell. In other embodiments, the mammalian cell is a splenocyte. In some embodiments, the mammalian cell is that of a mouse or a rat. In other embodiments, the mammalian cell is that of a human. In one embodiment, the mRNA of the present disclosure does not substantially induce an innate immune response of a mammalian cell into which the mRNA is introduced.

[2286] In some embodiments, the IL12 polynucleotide is an mRNA that comprises an ORF that encodes an IL12A polypeptide, IL12B polypeptide, or both IL12A and IL12B polypeptides, wherein uracil in the mRNA is at least about 95% 5-methoxyuracil, wherein the uracil content of the ORF is between about 115% and about 135% of the theoretical minimum uracil content in the corresponding wild-type ORF, and wherein the uracil content in the ORF encoding the IL12A polypeptide, IL12B polypeptide, or both IL12A and IL12B polypeptides is less than about 30% of the total nucleobase content in the ORF. In some embodiments, the ORF that encodes the IL12A polypeptide, IL12B polypeptide, or both IL12A and IL12B polypeptides is further modified to increase G/C content of the ORF (absolute or relative) by at least about 40%, as compared to the corresponding wild-type ORF. In yet other embodiments, the ORF encoding the IL12A polypeptide, IL12B polypeptide, or both IL12A and IL12B polypeptides contains less than 20 non-phenylalanine uracil pairs and/or triplets. In some embodiments, at least one codon in the ORF of the mRNA encoding the IL12A polypeptide, IL12B polypeptide, or both IL12A and IL12B polypeptides is further substituted with an alternative codon having a codon frequency lower than the codon frequency of the substituted codon in the synonymous codon set.

[2287] In some embodiments, the expression of the IL12A polypeptide, IL12B polypeptide, or both IL12A and IL12B polypeptides encoded by an mRNA comprising an ORF wherein uracil in the mRNA is at least about 95% 5-methoxyuracil, and wherein the uracil content of the ORF is between about 115% and about 135% of the theoretical minimum uracil content in the corresponding wild-type ORF, is increased by at least about 10-fold when compared to expression of the IL12A polypeptide, IL12B polypeptide, or both IL12A and IL12B polypeptides from the corresponding wild-type mRNA. In some embodiments, the mRNA comprises an open ORF wherein uracil in the mRNA is at least about 95% 5-methoxyuracil, and wherein the uracil content of the ORF is between about 115% and about 135% of the theoretical minimum uracil content in the corresponding wild-type ORF, and wherein the mRNA does not substantially induce an innate immune response of a mammalian cell into which the mRNA is introduced.

[2288] Polynucleotide comprising an mRNA encoding an IL12 polypeptide: In certain embodiments, an IL12 polynucleotide of the present disclosure, for example a polynucleotide comprising an mRNA nucleotide sequence encoding an IL12B polypeptide, IL12A polypeptide, or both IL12B and IL12A polypeptides, comprises from 5′ to 3′ end:
[2289] (i) a 5′ UTR, such as the sequences provided below, comprising a 5′ cap provided below;
[2290] (ii) an open reading frame encoding an IL12B polypeptide, IL12A polypeptide, or both IL12B and IL12A polypeptides, e.g., a sequence optimized nucleic acid sequence encoding IL12 disclosed herein;
[2291] (iii) at least one stop codon;
[2292] (iv) a 3′ UTR, such as the sequences provided below; and
[2293] (v) a poly-A tail provided below.

[2294] In some embodiments, the IL12 polynucleotide further comprises a miRNA binding site, e.g., a miRNA binding site that binds to miRNA-122. In some embodiments, the 3′UTR comprises the miRNA binding site.

[2295] In some embodiments, an IL12 polynucleotide of the present disclosure comprises a nucleotide sequence encoding a polypeptide sequence at least 70%, at least 80%, at least 81%, at least 82%, at least 83%, at least 84%, at least 85%, at least 86%, at least 87%, at least 88%, at least 89%, at least 90%, at least 91%, at least 92%, at least 93%, at least 94%, at least 95%, at least 96%, at least 97%, at least 98%, at least 99%, or 100% identical to the protein sequence of a wild type IL12 (e.g., isoform 1, 2, 3, or 4).

[2296] Compositions and formulations for use comprising an IL12 polynucleotide: Certain aspects of the disclosure are directed to compositions or formulations comprising any of the IL12 polynucleotides disclosed above.

[2297] In some embodiments, the composition or formulation comprises:
[2298] (i) an IL12 polynucleotide (e.g., a RNA, e.g., an mRNA) comprising a sequence-optimized nucleotide sequence (e.g., an ORF) encoding an IL12B polypeptide, IL12A polypeptide, or both IL12B and IL12A polypeptides (e.g., the wild-type sequence, functional fragment, or variant thereof), wherein the IL12 polynucleotide comprises at least one chemically modified nucleobase, e.g., 5-methoxyuracil (e.g., wherein at least about 25%, at least about 30%, at least about 40%, at least about 50%, at least about 60%, at least about 70%, at least about 80%, at least about 90%, at least about 95%, at least about 99%, or 100% of the uracils are 5-methoxyuracils), and wherein the IL12 polynucleotide further comprises a miRNA binding site, e.g., a miRNA binding site that binds to miR-122 (e.g., a miR-122-3p or miR-122-5p binding site); and
[2299] (ii) a delivery agent comprising a compound having Formula (I), e.g., any of Compounds 1-147 (e.g., Compound 18, 25, 26 or 48).

[2300] In some embodiments, the uracil or thymine content of the ORF relative to the theoretical minimum uracil or thymine content of a nucleotide sequence encoding the IL12B polypeptide, IL12A polypeptide, or both IL12B and IL12A polypeptides (% U_{TM} or % T_{TM}), is between about 100% and about 150%.

[2301] In some embodiments, the polynucleotides, compositions or formulations above are used to treat and/or prevent an IL12-related diseases, disorders or conditions, e.g., cancer.

### H. OX40L

[2302] In some embodiments, the combination therapies disclosed herein comprise one or more OX40L polynucleotides (e.g., mRNAs), i.e., polynucleotides comprising one or more ORFs encoding an OX40L polypeptide.

[2303] OX40L, the ligand for OX40 (CD134) has also been designated Tumor Necrosis Factor Superfamily (ligand) Member 4 (TNFSF4), CD252 (cluster of differentiation 252), CD134L, Tax-Transcriptionally Activated Glycoprotein 1 (TXGP1), Glycoprotein 34 (GP34), and ACT-4-L. Human OX40L is a 34 kDa glycosylated type II transmembrane protein that exists on the surface of cells as a trimer. OX40L comprises a cytoplasmic domain (amino acids 1-23), a transmembrane domain (amino acids 24-50) and an extracellular domain (amino acids 51-183). Human OX40L was first identified on the surface of human lymphocytes infected with human T-cell leukemia virus type-I (HTLV-I) by Tanaka et al. (Tanaka et al., International Journal of Cancer (1985), 36(5):549-55).

[2304] In some embodiments, the OX40L polynucleotide comprises an mRNA encoding a mammalian OX40L polypeptide. In some embodiments, the mammalian OX40L polypeptide is a murine OX40L polypeptide. In some embodiments, the mammalian OX40L polypeptide is a human OX40L polypeptide. In some embodiments, the OX40L polypeptide comprises the amino acid sequence set forth in SEQ ID NO: 1160. In another embodiment, the OX40L polypeptide comprises the amino acid sequence set forth in SEQ ID NO: 1161.

[2305] In some embodiments, the OX40L polypeptide comprises an amino acid sequence at least 50%, at least 60%, at least 70%, at least 80%, at least 85%, at least 90%, at least 95%, at least 99%, or 100% identical to an amino acid sequence listed in TABLE 17 (e.g., selected from SEQ ID NOs: 1160-1162) or an amino acid sequence encoded by a nucleotide sequence listed in TABLE 17, wherein the amino acid sequence is capable of binding to an OX40 receptor.

[2306] In other embodiments, the OX40L polypeptide useful for the disclosure comprises an amino acid sequence listed in TABLE 17 with one or more conservative substitutions, wherein the conservative substitutions do not affect the binding of the OX40L polypeptide to an OX40 receptor, i.e., the amino acid sequence binds to the OX40 receptor after the substitutions.

[2307] In certain embodiments, the OX40L polypeptide comprises an amino acid sequence at least 50%, at least 60%, at least 70%, at least 80%, at least 85%, at least 90%, at least 95%, at least 99%, or 100% identical to an extracellular domain of OX40L (e.g., SEQ ID NO:1161), wherein the OX40L polypeptide binds to an OX40 receptor.

[2308] In other embodiments, a polynucleotide sequence (i.e., mRNA) encoding an OX40L polypeptide comprises a sequence at least 50%, at least 60%, at least 70%, at least 80%, at least 85%, at least 90%, at least 95%, at least 99%, or 100% identical to a nucleic acid sequence listed in TABLE 17 (e.g., selected from SEQ ID NOs: 1163-1205).

TABLE 17
OX40L Polypeptide and OX40L Polynucleotide Sequences

| Encoded | | | SEQ ID NO |
|---|---|---|---|
| Polypeptide | Desctiption | Sequence | (no. aa/nt) |
| OX40L | Amino acid | MERVQPLEENVGNAARPRFERNKLLLVASVIQGLGLLLCFTY | 1160 |
| (TNFSF4) | sequence of | ICLHFSALQVSHRYPRIQSIKVQFTEYKKEKGFILTSQKEDE | (183 aa) |
| | tumor necrosis | IMKVQNNSVIINCDGFYLISLKGYFSQEVNISLHYQKDEEPL | |
| | factor ligand | FQLKKVRSVNSLMVASLTYKDKVYLNVTTDNTSLDDFHVNGG | |
| | superfamily | ELILIHQNPGEFCVL | |
| | member 4 | | |
| | isoform 1 [Homo | | |
| | sapiens] | | |
| | NP_003317 | | |
| OX40L | Amino acid | MVSHRYPRIQSIKVQFTEYKKEKGFILTSQKEDEIMKVQNNS | 1161 |
| (TNFSF4) | sequence of | VIINCDGFYLISLKGYFSQEVNISLHYQKDEEPLFQLKKVRS | (133 aa) |
| | tumor necrosis | VNSLMVASLTYKDKVYLNVTTDNTSLDDFHVNGGELILIHQN | |
| | factor ligand | PGEFCVL | |
| | superfamily | | |
| | member 4 | | |
| | isoform 2 [Homo | | |
| | sapiens] | | |
| | NP_001284491 | | |
| OX40L | Amino acid | MEGEGVQPLDENLENGSRPRFKWKKTLRLVVSGIKGAGMLLC | 1162 |
| (TNFSF4) | sequence of | FIYVCLQLSSSPAKDPPIQRLRGAVTRCEDGQLFISSYKNEY | (198 aa) |
| | tumor necrosis | QTMEVQNNSVVIKCDGLYIIYLKGSFFQEVKIDLHFREDHNP | |
| | factor ligand | ISIPMLNDGRRIVFTVVASLAFKDKVYLTVNAPDTLCEHLQI | |
| | superfamily | NDGELIVVQLTPGYCAPEGSYHSTVNQVPL | |
| | member 4 [Mus | | |
| | musculus] | | |
| | NP_033478 | | |
| OX40L | Nucleotide | AUGGAAAGGGUCCAACCCCUGGAAGAGAAUGUGGGAAAUGCA | 1163 |
| (TNFSF4) | sequence of | GCCAGGCCAAGAUUCGAGAGGAACAAGCUAUUGCUGGUGGCC | (552 nts) |
| | TNFSF4 tumor | UCUGUAAUUCAGGGACUGGGGCUGCUCCUGUGCUUCACCUAC | |
| | necrosis factor | AUCUGCCUGCACUUCUCUGCUCUUCAGGUAUCACAUCGGUAU | |
| | (ligand) | CCUCGAAUUCAAAGUAUCAAAGUACAAUUUACCGAAUAUAAG | |
| | superfamily, | AAGGAGAAAGGUUUCAUCCUCACUUCCCAAAAGGAGGAUGAA | |
| | member 4, open | AUCAUGAAGGUGCAGAACAACUCAGUCAUCAUCAACUGUGAU | |
| | reading frame | GGGUUUUAUCUCAUCUCCCUGAAGGGCUACUUCUCCCAGGAA | |
| | [Homo sapiens] | GUCAACAUUAGCCUUCAUUACCAGAAGGAUGAGGAGCCCCUC | |
| | | UUCCAACUGAAGAAGGUCAGGUCUGUCAACUCCUUGAUGGUG | |
| | | GCCUCUCUGACUUACAAAGACAAAGUCUACUUGAAUGUGACC | |
| | | ACUGACAAUACCUCCCUGGAUGACUUCCAUGUGAAUGGCGGA | |
| | | GAACUGAUUCUUAUCCAUCAAAAUCCUGGUGAAUUCUGUGUC | |
| | | CUUUGA | |
| OX40L | Nucleotide | GGCCCUGGGACCUUUGCCUAUUUUCUGAUUGAUAGGCUUUGU | 1164 |
| (TNFSF4) | sequence of | UUUGUCUUUACCUCCUUCUUUCUGGGGAAAACUUCAGUUUUA | (3484 nts) |
| | homo sapiens | UCGCACGUUCCCCUUUUCCAUAUCUUCAUCUUCCCUCUACCC | |
| | tumor necrosis | AGAUUGUGAAGAUGGAAAGGGUCCAACCCCUGGAAGAGAAUG | |
| | factor (ligand) | UGGGAAAUGCAGCCAGGCCAAGAUUCGAGAGGAACAAGCUAU | |
| | superfamily, | UGCUGGUGGCCUCUGUAAUUCAGGGACUGGGGCUGCUCCUGU | |
| | member 4 | GCUUCACCUACAUCUGCCUGCACUUCUCUGCUCUUCAGGUAU | |
| | (TNFSF4), | CACAUCGGUAUCCUCGAAUUCAAAGUAUCAAAGUACAAUUUA | |
| | transcript | CCGAAUAUAAGAAGGAGAAAGGUUUCAUCCUCACUUCCCAAA | |
| | variant 1, mRNA | AGGAGGAUGAAAUCAUGAAGGUGCAGAACAACUCAGUCAUCA | |
| | NM_003326 | UCAACUGUGAUGGGUUUUAUCUCAUCUCCCUGAAGGGCUACU | |
| | | UCUCCCAGGAAGUCAACAUUAGCCUUCAUUACCAGAAGGAUG | |
| | | AGGAGCCCCUCUUCCAACUGAAGAAGGUCAGGUCUGUCAACU | |
| | | CCUUGAUGGUGGCCUCUCUGACUUACAAAGACAAAGUCUACU | |
| | | UGAAUGUGACCACUGACAAUACCUCCCUGGAUGACUUCCAUG | |
| | | UGAAUGGCGGAGAACUGAUUCUUAUCCAUCAAAAUCCUGGUG | |
| | | AAUUCUGUGUCCUUUGAGGGGCUGAUGGCAAUAUCUAAAACC | |
| | | AGGCACCAGCAUGAACACCAAGCUGGGGGUGGACAGGGCAUG | |
| | | GAUUCUUCAUUGCAAGUGAAGGAGCCUCCCAGCUCAGCCACG | |
| | | UGGGAUGUGACAAGAAGCAGAUCCUGGCCCUCCCGCCCCCAC | |
| | | CCCUCAGGGAUAUUUAAAACUUAUUUUAUAUACCAGUUAAUC | |
| | | UUAUUUAUCCUUAUAUUUUCUAAAUUGCCUAGCCGUCACACC | |
| | | CCAAGAUUGCCUUGAGCCUACUAGGCACCUUUGUGAGAAAGA | |
| | | AAAAAUAGAUGCCUCUUCUUCAAGAUGCAUUGUUUCUAUUGG | |
| | | UCAGGCAAUUGUCAUAAUAAACUUAUGUCAUUGAAAACGGUA | |
| | | CCUGACUACCAUUUGCUGGAAAUUUGACAUGUGUGUGGCAUU | |
| | | AUCAAAAUGAAGAGGAGCAAGGAGUGAAGGAGUGGGGUUAUG | |
| | | AAUCUGCCAAAGGUGGUAUGAACCAACCCCUGGAAGCCAAAG | |
| | | CGGCCUCUCCAAGGUUAAAUUGAUUGCAGUUUGCAUAUUGCC | |
| | | UAAAUUUAAACUUUCUCAUUUGGUGGGGGUUCAAAAGAAGAA | |
| | | UCAGCUUGUGAAAAAUCAGGACUUGAAGAGAGCCGUCUAAGA | |
| | | AAUACCACGUGCUUUUUUUCUUUACCAUUUUGCUUUCCCAGC | |
| | | CUCCAAACAUAGUUAAUAGAAAUUUCCCUUCAAAGAACUGUC | |
| | | UGGGGAUGUGAUGCUUUGAAAAAUCUAAUCAGUGACUUAAGA | |
| | | GAGAUUUUCUUGUAUACAGGGAGAGUGAGAUAACUUAUUGUG | |
| | | AAGGGUUAGCUUUACUGUACAGGAUAGCAGGGAACUGGACAU | |
| | | CUCAGGGUAAAAGUCAGUACGGAUUUUAAUAGCCUGGGGAGG | |
| | | AAAACACAUUCUUUGCCACAGACAGGCAAAGCAACACAUGCU | |
| | | CAUCCUCCUGCCUAUGCUGAGAUACGCACUCAGCUCCAUGUC | |
| | | UUGUACACACAGAAACAUUGCUGGUUUCAAGAAAUGAGGUGA | |
| | | UCCUAUUAUCAAAUUCAAUCUGAUGUCAAAUAGCACUAAGAA | |
| | | GUUAUUGUGCCUUAUGAAAAAUAAUGAUCUCUGUCUAGAAAU | |
| | | ACCAUAGACCAUAUAUAGUCUCACAUUGAUAAUUGAAACUAG | |
| | | AAGGGUCUAUAAUCAGCCUAUGCCAGGGCUUCAAUGGAAUAG | |
| | | UAUCCCCUUAUGUUUAGUUGAAAUGUCCCCUUAACUUGAUAU | |
| | | AAUGUGUUAUGCUUAUGGCGCUGUGGACAAUCUGAUUUUUCA | |
| | | UGUCAACUUUCCAGAUGAUUUGUAACUUCUCUGUGCCAAACC | |
| | | UUUUAUAAACAUAAAUUUUUGAGAUAUGUAUUUUAAAAUUGU | |
| | | AGCACAUGUUUCCCUGACAUUUUCAAUAGAGGAUACAACAUC | |
| | | ACAGAAUCUUUCUGGAUGAUUCUGUGUUAUCAAGGAAUUGUA | |
| | | CUGUGCUACAAUUAUCUCUAGAAUCUCCAGAAAGGUGGAGGG | |
| | | CUGUUCGCCCUUACACUAAAUGGUCUCAGUUGGAUUUUUUUU | |
| | | UCCUGUUUUCUAUUUCCUCUUAAGUACACCUUCAACUAUAUU | |
| | | CCCAUCCCUCUAUUUUAAUCUGUUAUGAAGGAAGGUAAAUAA | |
| | | AAAUGCUAAAUAGAAGAAAUUGUAGGUAAGGUAAGAGGAAUC | |
| | | AAGUUCUGAGUGGCUGCCAAGGCACUCACAGAAUCAUAAUCA | |
| | | UGGCUAAAUAUUUAUGGAGGGCCUACUGUGGACCAGGCACUG | |
| | | GGCUAAAUACUUACAUUUACAAGAAUCAUUCUGAGACAGAUA | |
| | | UUCAAUGAUAUCUGGCUUCACUACUCAGAAGAUUGUGUGUGU | |
| | | GUUUGUGUGUGUGUGUGUGUGUGUAUUUCACUUUUUGUUAUU | |
| | | GACCAUGUUCUGCAAAAUUGCAGUUACUCAGUGAGUGAUAUC | |
| | | CGAAAAAGUAAACGUUUAUGACUAUAGGUAAUAUUUAAGAAA | |
| | | AUGCAUGGUUCAUUUUUAAGUUUGGAAUUUUUAUCUAUAUUU | |
| | | CUCACAGAUGUGCAGUGCACAUGCAGGCCUAAGUAUAUGUUG | |
| | | UGUGUGUUGUUUGUCUUUGAUGUCAUGGUCCCCUCUCUUAGG | |
| | | UGCUCACUCGCUUUGGGUGCACCUGGCCUGCUCUUCCCAUGU | |
| | | UGGCCUCUGCAACCACACAGGGAUAUUUCUGCUAUGCACCAG | |
| | | CCUCACUCCACCUUCCUUCCAUCAAAAAUAUGUGUGUGUGUC | |
| | | UCAGUCCCUGUAAGUCAUGUCCUUCACAGGGAGAAUUAACCC | |
| | | UUCGAUAUACAUGGCAGAGUUUUGUGGGAAAAGAAUUGAAUG | |
| | | AAAAGUCAGGAGAUCAGAAUUUUAAAUUUGACUUAGCCACUA | |
| | | ACUAGCCAUGUAACCUUGGGAAAGUCAUUUCCCAUUUCUGGG | |
| | | UCUUGCUUUUCUUUCUGUUAAAUGAGAGGAAUGUUAAAUAUC | |
| | | UAACAGUUUAGAAUCUUAUGCUUACAGUGUUAUCUGUGAAUG | |
| | | CACAUAUUAAAUGUCUAUGUUCUUGUUGCUAUGAGUCAAGGA | |
| | | GUGUAACCUUCUCCUUUACUAUGUUGAAUGUAUUUUUUUCUG | |
| | | GACAAGCUUACAUCUUCCUCAGCCAUCUUUGUGAGUCCUUCA | |
| | | AGAGCAGUUAUCAAUUGUUAGUUAGAUAUUUUCUAUUUAGAG | |
| | | AAUGCUUAAGGGAUUCCAAUCCCGAUCCAAAUCAUAAUUUGU | |
| | | UCUUAAGUAUACUGGGCAGGUCCCCUAUUUUAAGUCAUAAUU | |
| | | UUGUAUUUAGUGCUUUCCUGGCUCUCAGAGAGUAUUAAUAUU | |
| | | GAUAUUAAUAAUAUAGUUAAUAGUAAUAUUGCUAUUUACAUG | |
| | | GAAACAAAUAAAGAUCUCAGAAUUCACUAAAAAAAAAAA | |
| OX40L | Nucleotide | AUUGCUUUUUGUCUCCUGUUCUGGGACCUUUAUCUUCUGACC | 1165 |
| (TNFSF4) | sequence of | CGCAGGCUUGACUUUGCCCUUAUUGGCUCCUUUGUGGUGAAG | (1609 nts) |
| | Mus musculus | AGCAGUCUUCCCCCAGGUUCCCCGCCACAGCUGUAUCUCCUC | |
| | tumor necrosis | UGCACCCCGACUGCAGAGAUGGAAGGGGAAGGGGUUCAACCC | |
| | factor (ligand) | CUGGAUGAGAAUCUGGAAAACGGAUCAAGGCCAAGAUUCAAG | |
| | superfamily, | UGGAAGAAGACGCUAAGGCUGGUGGUCUCUGGGAUCAAGGGA | |
| | member 4 | GCAGGGAUGCUUCUGUGCUUCAUCUAUGUCUGCCUGCAACUC | |
| | (Tnfsf4), mRNA | UCUUCCUCUCCGGCAAAGGACCCUCCAAUCCAAAGACUCAGA | |
| | NM_009452 | GGAGCAGUUACCAGAUGUGAGGAUGGGCAACUAUUCAUCAGC | |
| | | UCAUACAAGAAUGAGUAUCAAACUAUGGAGGUGCAGAACAAU | |
| | | UCGGUUGUCAUCAAGUGCGAUGGGCUUUAUAUCAUCUACCUG | |
| | | AAGGGCUCCUUUUUCCAGGAGGUCAAGAUUGACCUUCAUUUC | |
| | | CGGGAGGAUCAUAAUCCCAUCUCUAUUCCAAUGCUGAACGAU | |
| | | GGUCGAAGGAUUGUCUUCACUGUGGUGGCCUCUUUGGCUUUC | |
| | | AAAGAUAAAGUUUACCUGACUGUAAAUGCUCCUGAUACUCUC | |
| | | UGCGAACACCUCCAGAUAAAUGAUGGGGAGCUGAUUGUUGUC | |
| | | CAGCUAACGCCUGGAUACUGUGCUCCUGAAGGAUCUUACCAC | |
| | | AGCACUGUGAACCAAGUACCACUGUGAAUUCCACUCUGAGGG | |
| | | UGGACGGGACACAGGUUCUUUCUCGAGAGAGAUGAGUGCAUC | |
| | | CUGCUCAUGAGAUGUGACUGAAUGCAGAGCCUACCCUACUUC | |
| | | CUCACUCAGGGAUAUUUAAAUCAUGUCUUACAUAACAGUUGA | |
| | | CCUCUCAUUCCCAGGAUUGCCUUGAGCCUGCUAAGAGCUGUU | |
| | | CUGGGAAUGAAAAAAAAAAUAAAUGUCUCUUCAAGACACAUU | |
| | | GCUUCUGUCGGUCAGAAGCUCAUCGUAAUAAACAUCUGCCAC | |
| | | UGAAAAUGGCGCUUGAUUGCUAUCUUCUAGAAUUUUGAUGUU | |
| | | GUCAAAAGAAAGCAAAACAUGGAAAGGGUGGUGUCCACCGGC | |
| | | CAGUAGGAGCUGGAGUGCUCUCUUCAAGGUUAAGGUGAUAGA | |
| | | AGUUUACAUGUUGCCUAAAACUGUCUCUCAUCUCAUGGGGGG | |
| | | CUUGGAAAGAAGAUUACCCCGUGGAAAGCAGGACUUGAAGAU | |
| | | GACUGUUUAAGCAACAAGGUGCACUCUUUUCCUGGCCCCUGA | |
| | | AUACACAUAAAAGACAACUUCCUUCAAAGAACUACCUAGGGA | |
| | | CUAUGAUACCCACCAAAGAACCACGUCAGCGAUGCAAAGAAA | |
| | | ACCAGGAGAGCUUUGUUUAUUUUGCAGAGUAUACGAGAGAUU | |
| | | UUACCCUGAGGGCUAUUUUUAUUAUACAGGAUGAGAGUGAAC | |
| | | UGGAUGUCUCAGGAUAAAGGCCAAGAAGGAUUUUUCACAGUC | |
| | | UGAGCAAGACUGUUUUUGUAGGUUCUCUCUCCAAAACUUUUA | |
| | | GGUAAAUUUUUGAUAAUUUUAAAAUUUUUAGUUAUAUUUUUG | |
| | | GACCAUUUUCAAUAGAAGAUUGAAACAUUUCCAGAUGGUUUC | |
| | | AUAUCCCCACAAG | |
| OX40L | Codon-optimized | AUGGAGAGAGUGCAGCCCCUGGAGGAGAACGUGGGCAACGCC | 1166 |
| (TNFSF4) | sequence 1 for | GCCAGACCCAGAUUCGAGAGAAACAAGCUGCUGCUGGUGGCC | (552 nts) |
| | ENSP 281834 | AGCGUGAUCCAGGGCCUGGGCCUGCUGCUGUGCUUCACCUAC | |
| | | AUCUGCCUGCACUUCAGCGCCCUGCAGGUGAGCCACAGAUAC | |
| | | CCCAGAAUCCAGAGCAUCAAGGUGCAGUUCACCGAGUACAAG | |
| | | AAGGAGAAGGGCUUCAUCCUGACCAGCCAGAAGGAGGACGAG | |
| | | AUCAUGAAGGUGCAGAACAACAGCGUGAUCAUCAACUGCGAC | |
| | | GGCUUCUACCUGAUCAGCCUGAAGGGCUACUUCAGCCAGGAG | |
| | | GUGAACAUCAGCCUGCACUACCAGAAGGACGAGGAGCCCCUG | |
| | | UUCCAGCUGAAGAAGGUGAGAAGCGUGAACAGCCUGAUGGUG | |
| | | GCCAGCCUGACCUACAAGGACAAGGUGUACCUGAACGUGACC | |
| | | ACCGACAACACCAGCCUGGACGACUUCCACGUGAACGGCGGC | |
| | | GAGCUGAUCCUGAUCCACCAGAACCCCGGCGAGUUCUGCGUG | |
| | | CUGUAG | |
| OX40L | Codon-optimized | AUGGAGCGUGUGCAGCCUCUUGAGGAGAAUGUGGGAAAUGCA | 1167 |
| (TNFSF4) | sequence 2 for | GCCCGGCCUCGAUUCGAACGUAAUAAACUCCUGCUCGUGGCC | (552 nts) |
| | ENSP 281834 | UCCGUGAUCCAGGGUCUCGGUUUAUUGCUGUGUUUUACCUAU | |
| | | AUAUGCUUACACUUUAGUGCAUUACAGGUCUCACACCGGUAC | |
| | | CCUCGCAUUCAGUCUAUAAAAGUGCAGUUUACCGAGUAUAAG | |
| | | AAGGAGAAAGGUUUUAUACUGACUUCUCAGAAAGAGGACGAG | |
| | | AUCAUGAAGGUGCAGAAUAAUAGCGUCAUUAUCAACUGCGAU | |
| | | GGAUUCUAUCUAAUUUCCCUAAAGGGGUACUUCAGCCAGGAG | |
| | | GUCAAUAUAUCACUGCACUAUCAAAAGGACGAGGAGCCCCUG | |
| | | UUUCAACUGAAGAAAGUGCGAUCAGUUAACUCUCUGAUGGUU | |
| | | GCCUCUCUGACCUAUAAGGACAAAGUCUACUUGAACGUGACA | |
| | | ACUGACAACACCUCACUGGAUGACUUUCAUGUGAAUGGGGGG | |
| | | GAACUGAUUCUUAUCCAUCAGAAUCCAGGAGAAUUCUGUGUG | |
| | | CUCUAG | |
| OX40L | Codon-optimized | AUGGAGCGGGUGCAGCCCCUGGAGGAGAAUGUGGGCAAUGCU | 1168 |
| (TNFSF4) | sequence 3 for | GCCCGGCCCAGGUUUGAAAGAAACAAGCUGCUGCUGGUGGCC | (552 nts) |
| | ENSP 281834 | AGCGUCAUCCAGGGCCUGGGCCUGCUGCUGUGCUUCACCUAC | |
| | | AUCUGCCUGCACUUCAGCGCCCUGCAGGUGAGCCACCGCUAC | |
| | | CCCCGCAUCCAGAGCAUCAAGGUGCAGUUCACAGAGUACAAG | |
| | | AAGGAGAAGGGCUUCAUCCUGACCAGCCAGAAGGAGGAUGAG | |
| | | AUCAUGAAGGUGCAGAACAACAGCGUCAUCAUCAACUGUGAU | |
| | | GGCUUCUACCUGAUCAGCCUGAAGGGCUACUUCAGCCAGGAG | |
| | | GUGAACAUCAGCCUGCACUACCAGAAGGAUGAGGAGCCCCUC | |
| | | UUCCAGCUGAAGAAGGUGCGCUCUGUGAACAGCCUGAUGGUG | |
| | | GCCAGCCUGACCUACAAGGACAAGGUGUACCUGAAUGUGACC | |
| | | ACAGACAACACCAGCCUGGAUGACUUCCACGUGAAUGGAGGA | |
| | | GAGCUGAUCCUGAUCCACCAGAACCCUGGAGAGUUCUGUGUG | |
| | | CUGUAG | |
| OX40L | Codon-optimized | AUGGAGCGGGUGCAGCCCCUGGAGGAGAACGUGGGCAACGCC | 1169 |
| (TNFSF4) | sequence 4 for | GCCCGCCCGCGUUUUGAGCGAAAUAAGUUACUGCUUGUUGCA | (552 nts) |
| | ENSP 281834 | UCUGUGAUACAGGGGUUGGGUUUACUUCUUUGCUUUACAUAU | |
| | | AUUUGUCUCCACUUUAGUGCGCUUCAGGUAUCCCAUCGGUAC | |
| | | CCGCGCAUCCAGUCAAUCAAGGUCCAGUUCACUGAAUAUAAA | |
| | | AAGGAGAAAGGAUUCAUUCUGACUUCACAAAAAGAGGACGAA | |
| | | AUCAUGAAAGUGCAGAACAACUCUGUAAUUAUAAACUGCGAU | |
| | | GGGUUCUAUCUGAUCAGUCUGAAGGGAUAUUUUAGCCAGGAA | |
| | | GUAAAUAUUUCACUACAUUAUCAGAAGGACGAAGAACCACUU | |
| | | UUUCAACUGAAGAAAGUCCGGUCCGUGAACUCCCUGAUGGUU | |
| | | GCUAGCCUUACCUACAAGGAUAAAGUCUAUUUAAACGUCACA | |
| | | ACAGAUAACACUAGCCUCGACGAUUUCCAUGUGAACGGAGGU | |
| | | GAACUGAUAUUGAUCCAUCAAAACCCCGGCGAGUUCUGCGUU | |
| | | UUAUAG | |
| OX40L | Codon-optimized | AUGGAGCGGGUCCAGCCCCUCGAGGAGAACGUUGGUAAUGCC | 1170 |
| (TNFSF4) | sequence 5 for | GCACGUCCCAGGUUUGAACGCAACAAGCUGCUGUUGGUGGCC | (552 nts) |
| | ENSP 281834 | AGCGUCAUUCAGGGGCUGGGUUUGUUGCUGUGCUUCACUUAC | |
| | | AUCUGUCUGCAUUUUAGUGCACUCCAGGUGUCCCACCGCUAC | |
| | | CCCCGUAUCCAAUCCAUUAAAGUCCAAUUUACCGAAUACAAA | |
| | | AAAGAGAAGGGUUUCAUUCUUACCUCCCAGAAGGAGGAUGAA | |
| | | AUUAUGAAGGUGCAGAACAAUUCUGUUAUCAUCAACUGUGAC | |
| | | GGAUUCUAUCUGAUUUCACUGAAGGGAUACUUUUCCCAGGAG | |
| | | GUGAACAUCAGUCUGCAUUAUCAGAAGGACGAAGAACCGCUU | |
| | | UUUCAACUGAAGAAGGUUAGGAGUGUGAACUCCUUAAUGGUA | |
| | | GCCAGCCUGACAUAUAAGGACAAGGUAUAUCUGAACGUCACC | |
| | | ACUGAUAACACCUCUUUAGACGAUUUUCAUGUAAAUGGGGGA | |
| | | GAAUUGAUACUCAUUCACCAGAAUCCGGGUGAGUUUUGUGUU | |
| | | CUGUAG | |
| OX40L | Codon-optimized | AUGGUGAGCCACAGAUACCCCAGAAUCCAGAGCAUCAAGGUG | 1171 |
| (TNFSF4) | sequence 1 for | CAGUUCACCGAGUACAAGAAGGAGAAGGGCUUCAUCCUGACC | (402 nts) |
| | ENSP 356691 | AGCCAGAAGGAGGACGAGAUCAUGAAGGUGCAGAACAACAGC | |
| | | GUGAUCAUCAACUGCGACGGCUUCUACCUGAUCAGCCUGAAG | |
| | | GGCUACUUCAGCCAGGAGGUGAACAUCAGCCUGCACUACCAG | |
| | | AAGGACGAGGAGCCCCUGUUCCAGCUGAAGAAGGUGAGAAGC | |
| | | GUGAACAGCCUGAUGGUGGCCAGCCUGACCUACAAGGACAAG | |
| | | GUGUACCUGAACGUGACCACCGACAACACCAGCCUGGACGAC | |
| | | UUCCACGUGAACGGCGGCGAGCUGAUCCUGAUCCACCAGAAC | |
| | | CCCGGCGAGUUCUGCGUGCUGUAG | |
| OX40L | Codon-optimized | AUGGUUUCUCACCGUUACCCACGGAUCCAGUCUAUCAAGGUU | 1172 |
| (TNFSF4) | sequence 2 for | CAGUUUACCGAGUACAAAAAGGAAAAAGGGUUCAUCCUCACC | (402 nts) |
| | ENSP 356691 | UCUCAGAAAGAGGACGAAAUCAUGAAGGUGCAGAAUAACUCU | |
| | | GUAAUCAUUAAUUGCGACGGUUUUUAUCUGAUUUCACUGAAG | |
| | | GGCUACUUUAGUCAGGAAGUUAAUAUUAGUUUGCACUACCAA | |
| | | AAGGACGAGGAGCCUCUCUUCCAACUAAAAAAGGUAAGAUCC | |
| | | GUUAAUUCCCUUAUGGUGGCCUCCUUAACUUAUAAGGACAAG | |
| | | GUGUAUCUGAAUGUGACCACAGAUAACACAUCCCUGGACGAC | |
| | | UUUCAUGUAAAUGGCGGCGAGUUAAUUCUGAUACACCAGAAC | |
| | | CCUGGCGAGUUCUGCGUGCUGUAG | |
| OX40L | Codon-optimized | AUGGUGAGCCACCGCUACCCCCGCAUCCAGAGCAUCAAGGUG | 1173 |
| (TNFSF4) | sequence 3 for | CAGUUCACAGAGUACAAGAAGGAGAAGGGCUUCAUCCUGACC | (402 nts) |
| | ENSP 356691 | AGCCAGAAGGAGGAUGAGAUCAUGAAGGUGCAGAACAACAGC | |
| | | GUCAUCAUCAACUGUGAUGGCUUCUACCUGAUCAGCCUGAAG | |
| | | GGCUACUUCAGCCAGGAGGUGAACAUCAGCCUGCACUACCAG | |
| | | AAGGAUGAGGAGCCCCUCUUCCAGCUGAAGAAGGUGCGCUCU | |
| | | GUGAACAGCCUGAUGGUGGCCAGCCUGACCUACAAGGACAAG | |
| | | GUGUACCUGAAUGUGACCACAGACAACACCAGCCUGGAUGAC | |
| | | UUCCACGUGAAUGGAGGAGAGCUGAUCCUGAUCCACCAGAAC | |
| | | CCUGGAGAGUUCUGUGUGCUGUAG | |
| OX40L | Codon-optimized | AUGGUGAGCCACCGGUACCCCCGGAUCCAGAGCAUCAAGGUG | 1174 |
| (TNFSF4) | sequence 4 for | CAGUUCACCGAAUACAAGAAGGAGAAGGGUUUUAUCCUGACG | (402 nts) |
| | ENSP 356691 | AGCCAGAAGGAAGACGAGAUUAUGAAGGUCCAAAACAACUCA | |
| | | GUCAUCAUAAACUGCGAUGGAUUUUACCUGAUCUCUCUGAAA | |
| | | GGGUACUUCUCCCAGGAAGUGAAUAUUAGCUUGCACUAUCAA | |
| | | AAAGAUGAGGAGCCUCUAUUCCAGCUCAAGAAGGUCAGAAGC | |
| | | GUCAAUAGUCUGAUGGUCGCAUCAUUAACCUAUAAAGACAAA | |
| | | GUAUAUCUAAAUGUGACGACAGACAAUACAUCCCUCGAUGAU | |
| | | UUUCACGUCAACGGAGGCGAACUCAUUCUGAUCCACCAGAAU | |
| | | CCAGGGGAAUUUUGCGUGCUGUAG | |
| OX40L | Codon-optimized | AUGGUCUCACACCGGUACCCCCGUAUCCAGAGUAUUAAGGUG | 1175 |
| (TNFSF4) | sequence 5 for | CAAUUCACGGAGUAUAAAAAAGAAAAGGGAUUCAUUCUGACG | (402 nts) |
| | ENSP 356691 | UCUCAGAAGGAAGAUGAGAUCAUGAAGGUCCAGAACAAUUCU | |
| | | GUGAUCAUUAAUUGCGAUGGAUUUUAUCUGAUUUCACUUAAA | |
| | | GGAUAUUUUUCCCAGGAGGUUAAUAUCAGUUUGCACUAUCAG | |
| | | AAAGACGAGGAGCCAUUAUUCCAGCUGAAGAAGGUGAGAUCA | |
| | | GUGAAUAGCCUGAUGGUUGCGUCACUGACGUAUAAAGACAAA | |
| | | GUUUAUCUAAACGUUACCACUGAUAAUACAUCCCUUGAUGAU | |
| | | UUUCAUGUGAACGGGGGUGAACUGAUCCUUAUACACCAGAAC | |
| | | CCCGGAGAGUUCUGUGUGUUGUAG | |
| OX40L | Codon-optimized | AUGGUGAGCCACAGAUACCCCAGAAUCCAGAGCAU | 1176 |
| (TNFSF4) | sequence 1 for | CAAGGUGCAGUUCACCGAGUACAAGAAGGAGAAGGGCUUCAU | (401 nts) |
| | ENSP 439704 | CCUGACCAGCCAGAAGGAGGACGAGAUCAUGAAGGUGCAGAA | |
| | | CAACAGCGUGAUCAUCAACUGCGACGGCUUCUACCUGAUCAG | |
| | | CCUGAAGGGCUACUUCAGCCAGGAGGUGAACAUCAGCCUGCA | |
| | | CUACCAGAAGGACGAGGAGCCCCUGUUCCAGCUGAAGAAGGU | |
| | | GAGAAGCGUGAACAGCCUGAUGGUGGCCAGCCUGACCUACAA | |
| | | GGACAAGGUGUACCUGAACGUGACCACCGACAACACCAGCCU | |
| | | GGACGACUUCCACGUGAACGGCGGCGAGCUGAUCCUGAUCCA | |
| | | CCAGAACCCCGGCGAGUUCUGCGUGCUGUAG | |
| OX40L | Codon-optimized | AUGGUGUCACACCGGUACCCUCGGAUCCAGUCUAUUAAAGUU | 1177 |
| (TNFSF4) | sequence 2 for | CAAUUUACGGAGUACAAGAAAGAAAAAGGCUUUAUCCUUACA | (402 nts) |
| | ENSP 439704 | AGCCAAAAGGAAGACGAGAUCAUGAAAGUGCAAAACAACAGU | |
| | | GUGAUUAUAAAUUGUGAUGGCUUCUACCUUAUUAGUCUGAAG | |
| | | GGCUACUUUAGUCAGGAAGUCAAUAUUAGCCUACACUACCAG | |
| | | AAAGACGAGGAGCCCCUCUUUCAACUGAAAAAGGUGCGCUCC | |
| | | GUGAAUUCGUUGAUGGUCGCCUCUCUGACCUACAAAGAUAAG | |
| | | GUGUAUCUUAACGUUACUACCGACAAUACUAGUCUGGACGAC | |
| | | UUUCACGUCAACGGAGGCGAACUUAUUCUGAUCCACCAGAAC | |
| | | CCCGGCGAAUUCUGCGUGCUGUAG | |
| OX40L | Codon-optimized | AUGGUGAGCCACCGCUACCCCCGCAUCCAGAGCAUCAAGGUG | 1178 |
| (TNFSF4) | sequence 3 for | CAGUUCACAGAGUACAAGAAGGAGAAGGGCUUCAUCCUGACC | (402 nts) |
| | ENSP 439704 | AGCCAGAAGGAGGAUGAGAUCAUGAAGGUGCAGAACAACAGC | |
| | | GUCAUCAUCAACUGUGAUGGCUUCUACCUGAUCAGCCUGAAG | |
| | | GGCUACUUCAGCCAGGAGGUGAACAUCAGCCUGCACUACCAG | |
| | | AAGGAUGAGGAGCCCCUCUUCCAGCUGAAGAAGGUGCGCUCU | |
| | | GUGAACAGCCUGAUGGUGGCCAGCCUGACCUACAAGGACAAG | |
| | | GUGUACCUGAAUGUGACCACAGACAACACCAGCCUGGAUGAC | |
| | | UUCCACGUGAAUGGAGGAGAGCUGAUCCUGAUCCACCAGAAC | |
| | | CCUGGAGAGUUCUGUGUGCUGUAG | |
| OX40L | Codon-optimized | AUGGUGAGCCACCGGUACCCCCGGAUCCAGAGCAUCAAGGUG | 1179 |
| (TNFSF4) | sequence 4 for | CAGUUCACAGAGUACAAGAAGGAGAAGGGAUUUAUUCUCACA | (402 nts) |
| | ENSP 439704 | AGUCAGAAAGAAGAUGAGAUCAUGAAGGUUCAGAACAACUCA | |
| | | GUCAUUAUUAAUUGCGACGGAUUCUAUCUCAUUAGCCUCAAA | |
| | | GGCUAUUUCAGCCAGGAGGUCAAUAUCAGCCUGCACUACCAG | |
| | | AAGGAUGAGGAACCUCUCUUUCAGCUGAAAAAAGUCCGCUCU | |
| | | GUGAAUUCCCUCAUGGUCGCUUCCCUGACCUACAAGGAUAAA | |
| | | GUUUAUUUGAACGUUACAACAGAUAAUACAUCGCUGGACGAC | |
| | | UUCCAUGUGAAUGGUGGCGAACUAAUUCUAAUACACCAAAAU | |
| | | CCAGGCGAAUUUUGUGUCCUUUAG | |
| OX40L | Codon-optimized | AUGGUAUCCCAUAGAUACCCACGUAUUCAAAGCAUUAAGGUG | 1180 |
| (TNFSF4) | sequence 5 for | CAGUUCACAGAGUACAAAAAGGAGAAGGGUUUCAUACUGACG | (402 nts) |
| | ENSP 439704 | UCACAGAAGGAGGACGAGAUAAUGAAGGUGCAGAAUAAUAGU | |
| | | GUGAUCAUCAAUUGUGAUGGAUUCUAUUUGAUCAGCCUCAAA | |
| | | GGUUAUUUCUCACAGGAAGUCAACAUUUCCCUGCACUACCAG | |
| | | AAGGACGAAGAGCCUUUGUUUCAGCUGAAGAAGGUGCGCUCA | |
| | | GUGAACAGUUUGAUGGUAGCCUCCCUAACUUAUAAAGAUAAA | |
| | | GUUUAUCUGAACGUGACAACCGAUAACACAUCCCUGGACGAC | |
| | | UUUCACGUCAAUGGAGGUGAGUUAAUCCUGAUCCAUCAGAAU | |
| | | CCCGGAGAAUUCUGCGUUCUUUAG | |
| OX40L | Codon-optimized | AUGGAGAGGGUCCAGCCCCUAGAGGAGAACGUAGGCAACGCC | 1181 |
| (TNFSF4) | sequence | GCCCGACCCAGGUUCGAGCGCAACAAGCUCCUCCUGGUCGCC | (549 nts) |
| | OX40L-CO1 | AGCGUCAUCCAAGGCCUCGGCCUCCUCUUGUGCUUCACCUAC | |
| | | AUCUGCCUCCACUUCAGCGCCCUCCAGGUGUCGCACAGGUAC | |
| | | CCGAGGAUUCAGAGCAUCAAAGUACAGUUCACCGAGUACAAG | |
| | | AAGGAGAAGGGCUUCAUCCUCACCUCCCAGAAGGAGGACGAG | |
| | | AUUAUGAAGGUCCAGAACAAUAGCGUCAUCAUCAACUGCGAC | |
| | | GGCUUCUAUCUGAUCAGCCUGAAGGGCUACUUCUCCCAAGAA | |
| | | GUAAACAUCAGCCUGCACUACCAGAAGGACGAGGAGCCACUC | |
| | | UUCCAGCUGAAAAAGGUGAGGUCCGUCAACAGCCUGAUGGUG | |
| | | GCCUCCUUGACAUACAAGGACAAGGUGUACCUGAACGUGACC | |
| | | ACGGAUAACACCAGCCUGGAUGACUUCCAUGUCAACGGCGGC | |
| | | GAGCUGAUCCUGAUCCACCAAAACCCCGGCGAGUUCUGCGUG | |
| | | CUG | |
| OX40L | Codon-optimized | AUGGAGAGGGUCCAGCCCCUUGAGGAGAACGUAGGGAACGCA | 1182 |
| (TNFSF4) | sequence | GCCCGCCCGAGGUUCGAGAGGAACAAGCUCCUCUUGGUCGCC | (549 nts) |
| | OX40L-CO2 | UCGGUUAUCCAGGGACUCGGGCUCCUUCUCUGCUUCACGUAC | |
| | | AUCUGCCUUCACUUUUCGGCCCUACAGGUAAGCCACAGGUAC | |
| | | CCCAGGAUCCAGAGCAUCAAGGUCCAGUUCACCGAGUAUAAG | |
| | | AAGGAAAAGGGGUUCAUCCUCACCUCCCAGAAGGAGGACGAG | |
| | | AUCAUGAAGGUCCAGAACAACAGCGUCAUCAUUAAUUGCGAC | |
| | | GGCUUUUACCUCAUCAGCCUGAAGGGAUACUUCAGCCAGGAG | |
| | | GUGAACAUCAGCCUGCAUUACCAGAAGGACGAAGAACCCCUG | |
| | | UUCCAGCUGAAGAAGGUGCGCUCGGUCAACUCCCUGAUGGUG | |
| | | GCCAGCCUGACCUACAAGGACAAGGUGUACCUGAACGUGACG | |
| | | ACCGACAACACCAGCCUGGAUGAUUUUCACGUGAACGGGGGC | |
| | | GAGCUGAUCCUGAUCCACCAGAACCCCGGCGAGUUCUGCGUG | |
| | | CUG | |
| OX40L | Codon-optimized | AUGGAGAGGGUACAGCCCCUAGAGGAGAACGUCGGGAACGCC | 1183 |
| (TNFSF4) | sequence | GCUCGGCCCCGGUUCGAACGCAACAAGCUCCUCCUCGUCGCG | (549 nts) |
| | OX40L-CO3 | AGCGUCAUCCAGGGCCUCGGGCUCUUGCUUUGCUUCACCUAC | |
| | | AUUUGCCUCCACUUUAGCGCGCUCCAGGUGUCGCACAGGUAC | |
| | | CCGCGAAUACAGAGCAUCAAGGUCCAGUUCACCGAGUACAAA | |
| | | AAAGAGAAGGGGUUCAUCCUCACCAGCCAGAAGGAGGACGAG | |
| | | AUCAUGAAGGUCCAGAACAACAGCGUCAUCAUCAACUGUGAC | |
| | | GGCUUCUACCUCAUCAGCCUGAAGGGCUACUUCAGCCAGGAG | |
| | | GUCAACAUCAGCCUCCACUACCAGAAGGACGAGGAGCCCCUG | |
| | | UUCCAGCUGAAGAAGGUCAGGAGCGUCAACAGCCUGAUGGUG | |
| | | GCGAGCCUGACCUACAAAGACAAGGUCUAUCUGAAUGUGACC | |
| | | ACCGACAAUACCAGCCUGGAUGACUUCCACGUGAACGGCGGA | |
| | | GAGCUCAUCCUGAUCCAUCAGAACCCCGGGGAGUUUUGCGUC | |
| | | CUC | |
| OX40L | Codon-optimized | AUGGAGAGAGUCCAGCCACUCGAGGAGAACGUGGGGAACGCG | 1184 |
| (TNFSF4) | sequence | GCCAGGCCCAGGUUCGAGAGGAAUAAGCUCCUCCUCGUCGCG | (549 nts) |
| | OX40L-CO4 | UCGGUCAUCCAGGGCCUUGGACUCCUUUUGUGCUUCACCUAC | |
| | | AUCUGCUUGCACUUCUCCGCCCUUCAGGUCAGCCACAGGUAC | |
| | | CCCCGCAUCCAGAGCAUCAAGGUCCAAUUUACCGAGUACAAG | |
| | | AAGGAGAAGGGAUUCAUCCUCACCUCCCAGAAGGAGGACGAA | |
| | | AUAAUGAAGGUCCAGAACAACUCCGUCAUAAUCAACUGCGAC | |
| | | GGGUUCUACCUGAUCAGCCUGAAGGGCUACUUCAGCCAGGAG | |
| | | GUGAACAUCAGCCUCCAUUACCAGAAGGACGAGGAGCCGCUA | |
| | | UUUCAGCUUAAGAAGGUGCGGUCCGUGAACAGCCUGAUGGUG | |
| | | GCCAGCCUCACCUAUAAGGACAAAGUGUACCUGAACGUGACC | |
| | | ACGGACAACACCAGCCUGGACGACUUCCACGUGAACGGGGGC | |
| | | GAGCUGAUCCUGAUCCACCAGAACCCCGGGGAAUUCUGCGUG | |
| | | CUG | |
| OX40L | Codon-optimized | AUGGAGAGGGUACAGCCCCUCGAGGAGAACGUCGGGAACGCC | 1185 |
| (TNFSF4) | sequence | GCCCGGCCCCGGUUCGAGAGGAACAAGCUUCUUCUCGUCGCC | (549 nts) |
| | OX40L-CO5 | AGCGUAAUCCAGGGCCUAGGGCUCCUCCUCUGCUUCACCUAU | |
| | | AUCUGCCUCCACUUCUCCGCGCUCCAGGUCAGCCAUCGGUAC | |
| | | CCCAGGAUCCAGAGCAUAAAGGUCCAAUUCACCGAGUACAAA | |
| | | AAGGAGAAGGGUUUUAUCCUCACAAGCCAGAAGGAGGACGAG | |
| | | AUCAUGAAGGUCCAGAACAACAGCGUCAUAAUCAACUGCGAC | |
| | | GGGUUCUACCUGAUCUCCCUGAAAGGCUACUUCAGCCAGGAG | |
| | | GUGAACAUCAGCCUCCACUACCAGAAGGACGAGGAGCCCCUG | |
| | | UUCCAGCUCAAGAAGGUCAGGUCCGUCAACAGCCUGAUGGUG | |
| | | GCCAGCCUGACCUACAAGGACAAGGUGUAUCUGAACGUGACC | |
| | | ACCGACAACACCAGCCUGGACGACUUUCAUGUCAACGGGGGC | |
| | | GAGCUGAUCCUGAUCCACCAGAACCCAGGCGAGUUCUGCGUC | |
| | | CUG | |
| OX40L | Codon-optimized | AUGGAGAGGGUCCAGCCACUAGAGGAGAACGUAGGUAACGCC | 1186 |
| (TNFSF4) | sequence | GCUAGGCCCAGGUUCGAGCGUAACAAGCUCCUGCUCGUUGCC | (549 nts) |
| | OX40L-CO6 | UCCGUUAUCCAGGGCCUCGGGCUCCUCCUCUGCUUCACUUAU | |
| | | AUCUGCCUCCACUUCUCCGCCCUCCAGGUCAGCCACCGGUAC | |
| | | CCGAGGAUCCAGUCCAUCAAGGUUCAGUUCACCGAGUACAAG | |
| | | AAGGAGAAAGGCUUCAUACUCACCAGCCAGAAGGAGGACGAG | |
| | | AUCAUGAAGGUCCAGAAUAACUCCGUCAUCAUCAACUGUGAC | |
| | | GGCUUCUACCUCAUCUCGCUGAAGGGCUACUUUUCCCAGGAG | |
| | | GUGAACAUCAGCCUGCACUACCAGAAGGACGAGGAGCCCCUG | |
| | | UUCCAGCUGAAGAAGGUGCGGUCCGUGAACAGCCUGAUGGUG | |
| | | GCGAGCCUGACCUACAAGGACAAGGUGUAUCUGAAUGUCACC | |
| | | ACCGACAACACCAGCCUGGACGACUUCCAUGUGAACGGCGGC | |
| | | GAGCUGAUCCUGAUCCACCAAAAUCCGGGCGAGUUUUGCGUG | |
| | | CUC | |
| OX40L | Codon-optimized | AUGGAGAGGGUCCAGCCGCUCGAAGAAAACGUGGGCAACGCC | 1187 |
| (TNFSF4) | sequence | GCCCGGCCCAGGUUCGAGAGGAACAAGCUCCUCCUCGUAGCA | (549 nts) |
| | OX40L-CO7 | UCAGUCAUCCAGGGACUCGGCCUUUUGCUCUGCUUCACCUAC | |
| | | AUCUGCCUCCACUUCAGCGCCUUGCAGGUGUCGCACAGGUAC | |
| | | CCCAGGAUCCAGAGCAUCAAGGUCCAGUUCACCGAAUACAAG | |
| | | AAGGAGAAGGGGUUCAUUCUCACCAGCCAGAAGGAGGACGAA | |
| | | AUCAUGAAGGUCCAGAACAACUCCGUCAUCAUCAACUGCGAC | |
| | | GGAUUCUACCUGAUCAGCCUGAAAGGCUACUUCAGCCAGGAG | |
| | | GUGAAUAUCAGCCUCCACUACCAAAAGGACGAAGAACCCCUG | |
| | | UUUCAGCUCAAGAAGGUGCGGUCCGUGAAUUCCCUCAUGGUC | |
| | | GCCAGCCUGACGUACAAGGACAAGGUGUACCUGAACGUGACC | |
| | | ACCGAUAAUACGUCGCUGGAUGACUUUCACGUAAACGGGGGC | |
| | | GAACUGAUCCUGAUCCACCAGAACCCUGGCGAGUUCUGUGUG | |
| | | CUG | |
| OX40L | Codon-optimized | AUGGAGAGGGUCCAGCCGCUAGAGGAGAACGUCGGCAACGCG | 1188 |
| (TNFSF4) | sequence | GCCAGGCCCAGGUUCGAGAGGAACAAGCUCCUACUCGUUGCC | (549 nts) |
| | OX40L-CO8 | AGUGUGAUCCAGGGCCUCGGGCUCCUCCUUUGCUUCACAUAC | |
| | | AUCUGCCUCCACUUCAGCGCCCUCCAGGUGUCGCAUAGGUAC | |
| | | CCCAGGAUCCAGUCCAUCAAGGUCCAGUUCACGGAAUAUAAG | |
| | | AAGGAGAAGGGAUUUAUCCUCACCUCCCAGAAGGAGGACGAG | |
| | | AUCAUGAAGGUCCAGAACAACAGCGUCAUCAUCAACUGCGAC | |
| | | GGGUUCUACCUGAUCAGCCUGAAGGGCUACUUCAGCCAAGAG | |
| | | GUGAAUAUCAGCCUGCACUACCAGAAGGACGAGGAGCCCCUG | |
| | | UUCCAGCUCAAGAAGGUCCGGAGCGUGAACAGCCUGAUGGUC | |
| | | GCCAGCCUGACGUACAAAGACAAGGUGUACCUGAACGUGACU | |
| | | ACGGACAACACCAGCCUGGACGACUUCCACGUGAACGGCGGG | |
| | | GAGCUGAUCCUGAUCCACCAGAACCCCGGGGAGUUCUGCGUG | |
| | | CUG | |
| OX40L | Codon-optimized | AUGGAACGGGUCCAGCCCCUCGAGGAGAACGUAGGCAACGCC | 1189 |
| (TNFSF4) | sequence | GCCAGGCCCAGGUUCGAGCGGAACAAGCUCCUCCUCGUCGCC | (549 nts) |
| | OX40L-CO9 | UCGGUCAUCCAGGGCCUCGGGCUCCUCCUUUGCUUCACCUAU | |
| | | AUCUGCCUUCACUUCUCCGCCCUCCAGGUGUCCCACCGGUAC | |
| | | CCCCGGAUCCAGUCCAUCAAGGUCCAGUUCACCGAGUAUAAG | |
| | | AAAGAGAAGGGAUUCAUCCUCACCUCUCAGAAGGAGGACGAG | |
| | | AUCAUGAAGGUUCAGAACAACAGCGUCAUCAUCAACUGCGAC | |
| | | GGCUUCUAUCUGAUCAGCCUGAAGGGCUACUUCAGCCAAGAA | |
| | | GUCAACAUCAGCCUGCACUACCAGAAGGACGAGGAGCCCCUG | |
| | | UUCCAGCUGAAGAAGGUCAGGAGCGUGAACUCCCUGAUGGUG | |
| | | GCGAGCCUGACCUACAAGGACAAGGUGUACCUGAACGUGACC | |
| | | ACCGACAAUACCAGCCUGGAUGACUUCCACGUGAACGGCGGC | |
| | | GAGCUCAUCCUGAUCCACCAGAACCCCGGCGAGUUCUGCGUG | |
| | | CUG | |
| OX40L | Codon-optimized | AUGGAGAGGGUUCAGCCCCUAGAGGAAAACGUCGGCAACGCG | 1190 |
| (TNFSF4) | sequence | GCCAGGCCCCGGUUCGAGAGGAAUAAGCUCCUCCUCGUGGCG | (549 nts) |
| | OX40L-CO10 | UCGGUCAUCCAGGGCCUCGGCCUCCUCUUGUGCUUCACCUAC | |
| | | AUCUGCCUCCAUUUCAGCGCCCUCCAGGUCAGCCACAGGUAC | |
| | | CCCAGGAUCCAGAGCAUCAAGGUCCAGUUCACCGAGUACAAG | |
| | | AAGGAGAAGGGCUUCAUCCUCACCAGCCAGAAGGAGGACGAG | |
| | | AUCAUGAAGGUCCAGAACAAUUCAGUCAUCAUCAACUGCGAC | |
| | | GGCUUCUACCUGAUCUCCCUGAAGGGAUACUUCAGCCAGGAG | |
| | | GUGAACAUCAGCCUCCACUACCAGAAGGAUGAGGAGCCGCUG | |
| | | UUCCAGCUGAAAAAGGUGAGGUCCGUGAACUCCCUGAUGGUC | |
| | | GCCUCGCUGACCUAUAAGGACAAGGUCUACCUGAACGUGACC | |
| | | ACCGACAACACGAGCCUCGACGAUUUUCACGUCAACGGGGGA | |
| | | GAGCUCAUUCUAAUCCACCAGAACCCCGGCGAGUUCUGCGUG | |
| | | CUG | |
| OX40L | Codon-optimized | AUGGAGAGGGUCCAGCCCCUAGAAGAGAACGUCGGCAACGCC | 1191 |
| (TNFSF4) | sequence | GCCCGCCCCAGGUUCGAGAGGAACAAGCUCCUCCUAGUCGCU | (549 nts) |
| | OX40L-CO11 | UCCGUCAUCCAGGGCCUUGGGCUCCUCCUCUGCUUCACCUAU | |
| | | AUCUGCCUCCACUUCAGCGCCCUCCAGGUGUCCCACCGCUAC | |
| | | CCGCGGAUCCAAUCCAUCAAGGUCCAGUUCACGGAGUAUAAA | |
| | | AAGGAAAAAGGGUUCAUCCUCACCUCCCAGAAGGAAGACGAG | |
| | | AUCAUGAAGGUCCAGAACAACUCCGUCAUCAUCAACUGCGAC | |
| | | GGCUUCUACCUGAUCUCCCUGAAGGGUUAUUUCAGCCAGGAG | |
| | | GUGAACAUCAGCCUGCACUACCAGAAAGACGAGGAGCCGCUG | |
| | | UUCCAGCUGAAAAAGGUGCGGUCCGUGAACAGCCUGAUGGUG | |
| | | GCCUCCCUCACCUACAAGGACAAGGUAUACCUGAACGUGACC | |
| | | ACGGACAACACCAGCCUGGACGACUUCCAUGUGAACGGAGGA | |
| | | GAGCUGAUCCUGAUCCAUCAGAACCCCGGCGAGUUUUGCGUG | |
| | | CUC | |
| OX40L | Codon-optimized | AUGGAGAGGGUACAGCCUCUCGAAGAGAACGUUGGCAACGCC | 1192 |
| (TNFSF4) | sequence | GCCCGGCCCCGGUUCGAGCGGAACAAACUUCUCCUCGUAGCC | (549 nts) |
| | OX40L-CO12 | AGCGUCAUACAGGGGCUAGGCCUCCUACUAUGCUUCACCUAC | |
| | | AUCUGCCUCCACUUCUCGGCCCUACAGGUGUCCCACAGGUAC | |
| | | CCCCGUAUCCAGAGCAUCAAGGUCCAGUUCACCGAGUACAAG | |
| | | AAGGAGAAGGGCUUCAUCUUGACCUCCCAGAAGGAGGACGAG | |
| | | AUCAUGAAGGUCCAGAACAACUCCGUCAUCAUCAAUUGCGAC | |
| | | GGCUUCUACCUCAUCAGCCUGAAGGGGUACUUCAGCCAAGAG | |
| | | GUGAACAUCUCCCUGCACUAUCAGAAGGACGAGGAGCCCCUG | |
| | | UUCCAGCUGAAGAAGGUGCGAAGCGUGAACUCCCUGAUGGUC | |
| | | GCCAGCUUGACCUAUAAGGAUAAGGUCUACCUGAACGUGACC | |
| | | ACCGAUAAUACCUCCCUCGAUGACUUCCACGUCAACGGAGGG | |
| | | GAGCUUAUCCUGAUCCACCAGAAUCCCGGGGAGUUCUGCGUG | |
| | | CUG | |
| OX40L | Codon-optimized | AUGGAGAGGGUCCAGCCGCUCGAGGAGAACGUAGGCAACGCC | 1193 |
| (TNFSF4) | sequence | GCCAGGCCGAGGUUCGAGAGGAACAAACUCCUACUCGUGGCC | (549 nts) |
| | OX40L-CO13 | UCCGUCAUACAGGGCCUAGGUCUGCUCCUCUGUUUCACCUAU | |
| | | AUCUGCCUUCACUUCAGCGCCCUCCAGGUGUCGCACCGAUAU | |
| | | CCCAGGAUCCAGAGUAUCAAGGUUCAGUUCACCGAGUACAAG | |
| | | AAGGAGAAGGGCUUUAUCCUUACCUCCCAGAAGGAGGACGAG | |
| | | AUCAUGAAGGUCCAGAAUAACAGCGUCAUCAUCAAUUGUGAC | |
| | | GGGUUCUACCUCAUCAGCCUGAAGGGGUACUUCUCCCAGGAA | |
| | | GUGAACAUUUCCCUGCACUACCAGAAAGAUGAAGAACCCCUG | |
| | | UUUCAGCUGAAAAAGGUGCGCUCCGUGAACAGCCUGAUGGUG | |
| | | GCCAGCCUGACGUACAAGGACAAGGUGUAUCUGAACGUGACC | |
| | | ACCGACAACACCAGCCUGGAUGAUUUCCACGUCAACGGGGGU | |
| | | GAGCUGAUCCUGAUACACCAGAACCCGGGCGAGUUUUGUGUG | |
| | | CUG | |
| OX40L | Codon-optimized | AUGGAGAGGGUCCAGCCCCUCGAAGAGAACGUCGGCAACGCC | 1194 |
| (TNFSF4) | sequence | GCCAGGCCCAGGUUCGAGCGGAACAAGUUGCUCCUCGUUGCC | (549 nts) |
| | OX40L-CO14 | UCUGUGAUCCAGGGUCUGGGCCUCCUCUUAUGCUUCACCUAC | |
| | | AUCUGCCUCCACUUCAGCGCGCUCCAGGUCAGCCACAGGUAC | |
| | | CCGAGGAUCCAGUCGAUCAAGGUACAGUUCACCGAGUACAAG | |
| | | AAGGAGAAGGGCUUCAUCCUCACCUCCCAAAAGGAGGACGAG | |
| | | AUCAUGAAGGUUCAGAACAAUUCCGUCAUCAUCAACUGCGAC | |
| | | GGGUUCUACCUGAUCUCCCUGAAGGGCUACUUCAGCCAGGAG | |
| | | GUGAACAUUAGCCUGCACUAUCAAAAGGACGAGGAGCCGCUG | |
| | | UUCCAGCUUAAGAAAGUGCGGAGCGUGAACUCCCUGAUGGUC | |
| | | GCCUCACUUACCUACAAGGAUAAGGUGUACCUGAACGUGACC | |
| | | ACCGAUAACACCAGCCUGGACGACUUUCACGUCAAUGGCGGG | |
| | | GAGCUGAUCCUGAUCCACCAGAAUCCCGGCGAGUUCUGCGUG | |
| | | CUG | |
| OX40L | Codon-optimized | AUGGAGCGGGUCCAGCCCCUCGAGGAGAACGUUGGCAACGCC | 1195 |
| (TNFSF4) | sequence | GCCAGGCCCCGGUUCGAGAGGAACAAGCUCCUCCUCGUCGCC | (549 nts) |
| | OX40L-CO15 | AGCGUCAUCCAGGGCUUGGGGCUCCUUCUCUGCUUUACCUAC | |
| | | AUCUGCCUCCACUUUUCCGCCUUACAGGUCAGCCACCGGUAC | |
| | | CCCCGGAUCCAGAGCAUCAAAGUUCAGUUCACCGAAUACAAG | |
| | | AAGGAGAAAGGCUUCAUCCUCACCAGCCAGAAGGAAGACGAA | |
| | | AUCAUGAAGGUCCAGAACAAUUCCGUCAUCAUCAACUGUGAC | |
| | | GGUUUUUAUCUCAUCAGCCUGAAGGGCUACUUCUCGCAGGAG | |
| | | GUCAACAUCAGCCUGCACUAUCAGAAGGACGAGGAGCCCCUG | |
| | | UUCCAACUGAAGAAGGUGAGGAGCGUGAAUAGCCUGAUGGUG | |
| | | GCGUCCCUGACCUACAAGGACAAGGUGUACCUCAACGUGACA | |
| | | ACGGACAACACCAGCCUGGAUGACUUCCACGUGAACGGGGGC | |
| | | GAGCUGAUCCUCAUCCACCAAAACCCCGGCGAAUUCUGCGUG | |
| | | CUC | |
| OX40L | Codon-optimized | AUGGAAAGGGUACAGCCCCUCGAGGAGAACGUCGGCAACGCC | 1196 |
| (TNFSF4) | sequence | GCGCGGCCCAGGUUCGAGAGGAACAAGCUCCUCCUCGUCGCC | (549 nts) |
| | OX40L-CO16 | AGCGUCAUCCAAGGCCUAGGCCUUCUACUCUGUUUCACCUAC | |
| | | AUCUGCUUGCACUUUAGCGCCCUACAGGUCAGCCACCGGUAC | |
| | | CCCCGGAUCCAGUCCAUCAAGGUCCAGUUCACCGAGUACAAG | |
| | | AAGGAGAAGGGCUUCAUCCUCACCUCGCAGAAGGAGGACGAG | |
| | | AUCAUGAAGGUCCAGAAUAACAGCGUCAUCAUCAACUGCGAC | |
| | | GGCUUUUACCUGAUCAGCCUGAAGGGCUACUUUUCCCAGGAG | |
| | | GUGAAUAUCUCGCUGCACUACCAGAAGGAUGAGGAGCCCCUG | |
| | | UUCCAGCUGAAAAAAGUCAGGUCCGUCAAUAGCCUGAUGGUG | |
| | | GCGAGCCUGACCUACAAGGACAAAGUGUAUCUGAACGUGACC | |
| | | ACGGACAACACAAGCCUGGAUGACUUCCACGUGAACGGGGGC | |
| | | GAGCUGAUCCUCAUCCACCAGAACCCCGGCGAAUUUUGCGUG | |
| | | CUG | |
| OX40L | Codon-optimized | AUGGAACGCGUCCAGCCCCUCGAGGAGAACGUCGGGAACGCC | 1197 |
| (TNFSF4) | sequence | GCCCGACCCAGGUUCGAAAGGAACAAGCUCUUGCUCGUCGCC | (549 nts) |
| | OX40L-CO17 | AGCGUCAUCCAGGGCCUCGGCCUCCUCCUCUGUUUCACCUAC | |
| | | AUCUGCCUCCACUUCUCGGCGCUCCAGGUGUCGCACCGGUAC | |
| | | CCCAGGAUCCAGAGCAUCAAGGUCCAGUUUACCGAGUAUAAG | |
| | | AAGGAGAAGGGCUUUAUACUCACCAGCCAGAAGGAGGACGAA | |
| | | AUCAUGAAGGUACAGAACAACAGCGUCAUCAUCAACUGCGAC | |
| | | GGCUUUUACCUGAUCAGCCUGAAGGGGUACUUCUCCCAGGAG | |
| | | GUGAACAUCUCCCUCCACUACCAGAAGGACGAAGAACCCCUG | |
| | | UUCCAGCUGAAGAAGGUACGAAGCGUGAACAGUCUGAUGGUC | |
| | | GCCUCCCUGACCUACAAGGAUAAAGUGUAUCUGAACGUGACC | |
| | | ACCGACAACACCUCCCUGGACGACUUUCAUGUGAACGGCGGC | |
| | | GAGCUGAUCCUGAUCCAUCAGAACCCGGGCGAGUUUUGUGUC | |
| | | CUC | |
| OX40L | Codon-optimized | AUGGAGAGGGUCCAGCCCCUCGAGGAGAACGUCGGCAACGCC | 1198 |
| (TNFSF4) | sequence | GCCCGCCCGAGGUUCGAGCGGAAUAAGCUCCUCCUCGUCGCC | (549 nts) |
| | OX40L-CO18 | UCCGUCAUCCAGGGGCUCGGUUUGCUCUUGUGCUUCACCUAC | |
| | | AUCUGCCUCCACUUCAGCGCCCUUCAGGUUAGCCACCGGUAC | |
| | | CCCCGGAUCCAGUCCAUCAAGGUCCAGUUCACCGAAUACAAG | |
| | | AAAGAGAAAGGGUUCAUCCUCACCUCCCAGAAGGAGGACGAA | |
| | | AUAAUGAAGGUCCAGAAUAACAGCGUCAUCAUCAAUUGCGAC | |
| | | GGCUUUUACCUGAUCUCGCUGAAGGGAUACUUCAGCCAGGAG | |
| | | GUGAAUAUCAGCCUCCACUACCAGAAGGACGAGGAGCCGCUG | |
| | | UUCCAGCUGAAGAAGGUGCGAAGCGUCAACUCCCUCAUGGUG | |
| | | GCGAGCCUGACCUACAAGGACAAGGUCUAUCUGAACGUGACC | |
| | | ACGGACAACACCAGCCUGGACGACUUUCACGUGAACGGGGGC | |
| | | GAACUGAUCCUGAUCCACCAGAACCCCGGCGAGUUCUGCGUG | |
| | | CUC | |
| OX40L | Codon-optimized | AUGGAGAGGGUCCAGCCGCUCGAGGAGAACGUAGGCAACGCC | 1199 |
| (TNFSF4) | sequence | GCCAGGCCACGGUUCGAGAGGAACAAGCUCUUACUCGUCGCC | (549 nts) |
| | OX40L-CO19 | AGCGUCAUCCAGGGCCUCGGCUUGCUCCUCUGUUUCACCUAC | |
| | | AUCUGUCUACACUUCAGCGCCCUUCAAGUCAGCCACAGGUAC | |
| | | CCCCGGAUCCAGUCCAUCAAGGUCCAGUUCACCGAAUACAAG | |
| | | AAAGAGAAGGGGUUCAUCCUCACCUCCCAGAAGGAGGACGAG | |
| | | AUCAUGAAGGUCCAGAACAAUUCCGUCAUCAUAAACUGUGAC | |
| | | GGUUUCUACCUCAUCAGCCUGAAGGGCUACUUCUCGCAGGAA | |
| | | GUGAACAUCAGCCUGCACUACCAGAAGGACGAAGAACCCCUG | |
| | | UUCCAGCUGAAGAAGGUCAGGAGCGUCAAUAGCCUGAUGGUG | |
| | | GCCUCCCUGACCUACAAGGACAAGGUGUAUCUCAAUGUCACC | |
| | | ACCGAUAACACCUCCCUCGACGACUUCCACGUCAACGGCGGG | |
| | | GAGCUGAUCCUUAUCCAUCAGAACCCCGGCGAGUUCUGCGUG | |
| | | CUC | |
| OX40L | Codon-optimized | AUGGAGAGGGUCCAGCCCCUCGAAGAGAACGUAGGCAACGCC | 1200 |
| (TNFSF4) | sequence | GCCAGGCCCAGGUUCGAGCGGAACAAGCUCCUCCUCGUCGCC | (549 nts) |
| | OX40L-CO20 | UCCGUAAUCCAGGGCCUAGGCCUUCUCUUAUGCUUCACCUAC | |
| | | AUCUGCCUACACUUCUCCGCCCUCCAGGUGUCACACAGGUAC | |
| | | CCCCGCAUCCAGAGCAUCAAAGUACAGUUCACCGAGUACAAG | |
| | | AAGGAGAAGGGCUUCAUCCUCACCAGCCAAAAGGAGGACGAG | |
| | | AUCAUGAAAGUACAGAAUAACUCCGUCAUCAUCAACUGCGAC | |
| | | GGGUUCUACCUGAUCUCCCUGAAGGGAUACUUCAGCCAGGAG | |
| | | GUGAACAUCAGCCUCCACUACCAGAAGGACGAGGAGCCCCUC | |
| | | UUCCAGCUGAAGAAGGUGAGGUCCGUGAACAGCCUGAUGGUG | |
| | | GCCAGCCUCACCUACAAGGAUAAGGUGUACCUGAACGUGACC | |
| | | ACGGACAACACCUCCUUGGACGACUUCCACGUGAACGGCGGG | |
| | | GAACUCAUUCUGAUCCACCAAAACCCCGGCGAGUUUUGCGUG | |
| | | CUG | |
| OX40L | Codon-optimized | AUGGAGAGGGUCCAGCCCCUCGAGGAGAACGUCGGCAACGCC | 1201 |
| (TNFSF4) | sequence | GCGAGGCCGAGGUUCGAGAGGAAUAAGCUCCUCCUCGUCGCC | (549 nts) |
| | OX40L-CO21 | AGCGUCAUCCAGGGGCUCGGGUUGCUCCUCUGUUUCACCUAU | |
| | | AUCUGCCUCCACUUCUCCGCCCUCCAGGUGUCGCACAGGUAU | |
| | | CCCCGCAUCCAGAGCAUCAAGGUCCAAUUCACGGAAUACAAG | |
| | | AAGGAGAAGGGAUUCAUCCUCACCUCGCAGAAGGAGGACGAG | |
| | | AUCAUGAAGGUCCAGAACAACAGCGUCAUCAUUAACUGCGAC | |
| | | GGGUUUUACCUGAUCAGCCUGAAGGGGUACUUUAGCCAGGAA | |
| | | GUGAACAUCUCCCUGCAUUAUCAGAAGGAUGAGGAGCCCCUG | |
| | | UUUCAGCUGAAAAAGGUGAGGAGCGUGAACUCCCUGAUGGUC | |
| | | GCCAGCCUGACGUACAAGGACAAAGUCUAUCUGAACGUGACC | |
| | | ACCGACAACACCAGCCUGGAUGACUUUCACGUGAACGGCGGC | |
| | | GAGCUGAUCCUGAUACACCAGAACCCCGGGGAGUUCUGCGUC | |
| | | CUG | |
| OX40L | Codon-optimized | AUGGAAAGGGUACAGCCCCUCGAGGAGAACGUGGGCAACGCC | 1202 |
| (TNFSF4) | sequence | GCCCGCCCCAGGUUCGAGCGCAACAAGCUCCUCCUCGUGGCG | (549 nts) |
| | OX40L-CO22 | AGCGUCAUCCAGGGCCUCGGCCUCCUCCUCUGCUUCACGUAC | |
| | | AUCUGCCUCCACUUCAGCGCGCUCCAAGUAUCCCACAGGUAU | |
| | | CCCCGCAUCCAGUCCAUCAAGGUCCAGUUCACCGAAUACAAG | |
| | | AAGGAGAAGGGGUUCAUCUUAACCAGCCAGAAGGAGGACGAG | |
| | | AUCAUGAAGGUACAGAACAACAGCGUCAUCAUCAACUGCGAC | |
| | | GGCUUCUACCUCAUAUCCCUGAAAGGGUAUUUCUCGCAGGAG | |
| | | GUGAACAUAAGCCUGCACUACCAGAAGGAUGAGGAGCCCCUG | |
| | | UUUCAGCUGAAGAAAGUGCGGAGCGUGAACAGCCUCAUGGUG | |
| | | GCCUCCCUGACGUACAAGGACAAGGUGUAUCUGAACGUGACC | |
| | | ACCGAUAACACCAGCCUGGACGACUUUCACGUGAACGGAGGC | |
| | | GAGCUGAUCCUGAUCCAUCAGAACCCCGGCGAGUUCUGCGUG | |
| | | CUG | |
| OX40L | Codon-optimized | AUGGAGCGGGUACAGCCCUUGGAGGAGAACGUCGGCAACGCC | 1203 |
| (TNFSF4) | sequence | GCCAGGCCCAGGUUCGAGAGGAAUAAACUCCUCCUCGUCGCC | (549 nts) |
| | OX40L-CO23 | UCCGUCAUCCAGGGUCUAGGCCUUCUCCUCUGCUUCACCUAU | |
| | | AUCUGCCUCCACUUCAGCGCCCUCCAGGUUAGCCAUCGGUAC | |
| | | CCCAGGAUCCAGAGCAUCAAGGUACAGUUCACCGAGUACAAA | |
| | | AAGGAGAAGGGCUUCAUCCUCACGUCCCAGAAAGAGGACGAG | |
| | | AUCAUGAAAGUCCAGAACAAUUCCGUAAUCAUCAACUGCGAC | |
| | | GGCUUCUACCUGAUCAGCCUGAAGGGCUACUUCAGCCAGGAG | |
| | | GUAAACAUAAGCCUGCACUACCAGAAGGACGAGGAACCCCUG | |
| | | UUCCAACUUAAAAAGGUGAGGAGCGUGAACAGCCUGAUGGUG | |
| | | GCCUCCCUCACCUAUAAGGACAAGGUGUACCUGAACGUCACG | |
| | | ACGGACAACACCAGCCUGGAUGACUUUCACGUGAACGGCGGC | |
| | | GAGCUGAUCCUGAUCCACCAGAACCCGGGCGAAUUCUGCGUG | |
| | | CUG | |
| OX40L | Codon-optimized | AUGGAGAGGGUCCAGCCCUUGGAGGAGAACGUCGGCAACGCC | 1204 |
| (TNFSF4) | sequence | GCCCGGCCUCGGUUCGAACGGAACAAGCUCCUCCUCGUCGCC | (549 nts) |
| | OX40L-CO24 | AGCGUCAUCCAGGGGCUCGGCCUCCUCCUCUGCUUCACCUAC | |
| | | AUCUGCCUCCACUUCUCCGCCCUCCAGGUAAGCCACCGUUAC | |
| | | CCCAGGAUCCAAAGCAUAAAGGUCCAGUUCACCGAAUACAAG | |
| | | AAGGAGAAGGGCUUCAUCCUAACCAGCCAGAAGGAGGACGAG | |
| | | AUCAUGAAGGUCCAGAACAACUCCGUUAUCAUCAACUGCGAC | |
| | | GGAUUCUACCUGAUCAGCCUGAAGGGUUACUUCAGCCAGGAG | |
| | | GUGAACAUCAGCCUGCACUACCAGAAGGACGAGGAGCCCCUG | |
| | | UUCCAGCUCAAGAAGGUCAGGUCCGUGAACAGCCUGAUGGUG | |
| | | GCCAGCCUGACCUACAAGGAUAAGGUGUACCUAAAUGUGACG | |
| | | ACCGACAACACGAGCCUGGACGACUUCCACGUCAACGGCGGC | |
| | | GAGCUGAUCCUCAUCCACCAGAAUCCGGGCGAGUUCUGUGUG | |
| | | CUG | |
| OX40L | Codon-optimized | AUGGAGAGGGUCCAGCCCCUCGAGGAGAACGUCGGCAACGCC | 1205 |
| (TNFSF4) | sequence | GCCCGGCCCCGCUUCGAGAGGAACAAACUCCUCCUCGUCGCG | (549 nts) |
| | OX40L-CO25 | AGCGUCAUCCAGGGCCUCGGGCUCCUCCUCUGCUUCACCUAC | |
| | | AUUUGCCUCCACUUCUCAGCCUUGCAGGUGUCCCACAGGUAC | |
| | | CCGCGCAUCCAGUCCAUCAAGGUCCAGUUCACCGAAUACAAG | |
| | | AAAGAGAAAGGCUUCAUCCUUACGAGCCAGAAGGAGGACGAG | |
| | | AUCAUGAAGGUCCAGAACAACAGCGUAAUCAUCAACUGUGAC | |
| | | GGCUUCUACCUGAUCAGCCUGAAGGGCUACUUCAGCCAGGAG | |
| | | GUGAACAUCAGCCUCCACUACCAGAAGGACGAGGAGCCCCUG | |
| | | UUCCAGCUGAAGAAGGUGAGGUCCGUCAAUAGCCUGAUGGUG | |
| | | GCCUCCCUCACCUACAAGGAUAAGGUGUACCUCAACGUGACC | |
| | | ACCGAUAACACCUCCCUGGACGACUUUCAUGUGAACGGUGGC | |
| | | GAGCUCAUACUCAUCCACCAGAACCCCGGCGAAUUCUGCGUC | |
| | | CUG | |

[2309] In some embodiments, the mRNA useful for the methods and compositions comprises an open reading frame encoding an extracellular domain of OX40L. In other embodiments, the mRNA comprises an open reading frame encoding a cytoplasmic domain of OX40L. In some embodiments, the mRNA comprises an open reading frame encoding a transmembrane domain of OX40L. In certain embodiments, the mRNA comprises an open reading frame encoding an extracellular domain of OX40L and a transmembrane of OX40L. In other embodiments, the mRNA comprises an open reading frame encoding an extracellular domain of OX40L and a cytoplasmic domain of OX40L. In yet other embodiments, the mRNA comprises an open reading frame encoding an extracellular domain of OX40L, a transmembrane of OX40L, and a cytoplasmic domain of OX40L.

[2310] In some embodiments, the mRNA comprises a codon optimized sequence encoding an OX40L polypeptide, e.g., a codon optimized sequence from TABLE 17 (e.g., selected from SEQ ID NOs: 1165-1205).

[2311] In some embodiments, the OX40L polynucleotides comprise an mRNA encoding an OX40L polypeptide which is full length. In some embodiments, the OX40L polynucleotide comprises an mRNA encoding a human OX40L polypeptide which is 183 amino acids in length. In certain embodiments, the OX40L polypeptide can lack at least one, at least two, at least three, at least four, at least five, at least six, at least seven, at least eight, at least nine, at least 10, at least 14, or at least 15 amino acids at the N-terminus or C-terminus of the OX40L polypeptide.

[2312] In some embodiments, the OX40L polynucleotide (e.g., mRNA) of the present disclosure is structurally modified or chemically modified. As used herein, a “structural” modification is one in which two or more linked nucleosides are inserted, deleted, duplicated, inverted or randomized in a polynucleotide without significant chemical modification to the mRNA themselves. Because chemical bonds will necessarily be broken and reformed to effect a structural modification, structural modifications are of a chemical nature and hence are chemical modifications. However, structural modifications will result in a different sequence of nucleotides. For example, the mRNA “AUCG” can be chemically modified to “AU-5meC-G”. The same mRNA can be structurally modified from “AUCG” to “AUCCCG”. Here, the dinucleotide “CC” has been inserted, resulting in a structural modification to the polynucleotide.

[2313] In some embodiments, the OX40L polynucleotide (e.g., mRNA) of the present disclosure can have a uniform chemical modification of all or any of the same nucleoside type or a population of modifications produced by mere downward titration of the same starting modification in all or any of the same nucleoside type, or a measured percent of a chemical modification of all any of the same nucleoside type but with random incorporation, such as where all uridines are replaced by a uridine analog, e.g., pseudouridine or 5-methoxyuridine. In another embodiment, the OX40L polynucleotide (e.g., mRNA) encoding an OX40L polypeptide can have a uniform chemical modification of two, three, or four of the same nucleoside type throughout the entire polynucleotide (e.g., mRNA) (such as all uridines and all cytosines, etc. are modified in the same way).

[2314] When the OX40L polynucleotide (e.g., mRNA) encoding an OX40L polypeptide is chemically and/or structurally modified the mRNA can be referred to as “modified mRNA.” Non-limiting examples of chemical modifications are described elsewhere herein.

[2315] Sequence-Optimized Nucleotide Sequences Encoding OX40L Polypeptides: In some embodiments, the OX40L polynucleotide comprises a sequence-optimized nucleotide sequence encoding an OX40L polypeptide disclosed herein. In some embodiments, the OX40L polynucleotide comprises an open reading frame (ORF) encoding an OX40L polypeptide, wherein the ORF has been sequence optimized.

[2316] Exemplary sequence-optimized OX40L polynucleotide sequences encoding OX40L are shown in TABLE 17. In some embodiments, the sequence optimized OX40L sequences in TABLE 17, fragments, and variants thereof are used to practice the methods disclosed herein. In some embodiments, the sequence optimized OX40L sequences in TABLE 17, fragments and variants thereof are combined with or alternatives to the wild-type sequences disclosed in TABLE 17.

[2317] The sequence-optimized OX40L polynucleotide sequences disclosed herein are distinct from the corresponding wild type nucleotide acid sequences and from other known sequence-optimized nucleotide sequences, e.g., these sequence-optimized nucleic acids have unique compositional characteristics.

[2318] In some embodiments, the percentage of uracil or thymine nucleobases in a sequence-optimized OX40 polynucleotide sequence (e.g., encoding an OX40L polypeptide, a functional fragment, or a variant thereof) is modified (e.g., reduced) with respect to the percentage of uracil or thymine nucleobases in the reference wild-type nucleotide sequence. Such a sequence is referred to as a uracil-modified or thymine-modified sequence.

[2319] In some embodiments, the sequence-optimized nucleotide sequence has a lower uracil or thymine content than the uracil or thymine content in the reference wild-type sequence. In some embodiments, the uracil or thymine content in a sequence-optimized OX40L polynucleotide sequence of the disclosure is greater than the uracil or thymine content in the reference wild-type sequence and still maintain beneficial effects, e.g., increased expression and/or OX40L signaling response when compared to the reference wild-type sequence.

[2320] In some embodiments, the optimized sequences of the present disclosure contain unique ranges of uracils or thymine (if DNA) in the sequence. The uracil or thymine content of the optimized sequences can be expressed in various ways, e.g., uracil or thymine content of optimized sequences relative to the theoretical minimum (% U_{TM} or % T_{TM}), relative to the wild-type (% U_{WT} or % T_{WT}), and relative to the total nucleotide content (% U_{TL} or % T_{TL}). For DNA it is recognized that thymine is present instead of uracil, and one would substitute T where U appears. Thus, all the disclosures related to, e.g., % U_{TM}, % U_{WT}, or % U_{TL}, with respect to RNA are equally applicable to % T_{TM}, % T_{WT}, or % T_{TL} with respect to DNA.

[2321] In some embodiments, the % U_{TM} of a uracil-modified sequence encoding an OX40L polypeptide of the disclosure is below 170%, below 165%, below 160%, below 155%, below 150%, below 145%, below 140%, below 139%, below 138%, below 137%, below 136%, below 135%, below 134%, below 133%, below 132%, below 131%, below 130%, below 129%, below 128%, below 127%, below 126%, below 125%, below 124%, below 123%, below 122%, below 121%, below 120%, below 119%, below 118%, below 117%, below 116%, below 115%, below 114%, below 113%, below 112%, below 111%, below 110%, below 109%, below 108%, below 107%, below 106%, below 105%, below 104%, or below 103%.

[2322] In some embodiments, the % U_{TM} of a uracil-modified sequence encoding an OX40L polypeptide of the disclosure is below 170% and above 100%, above 101%, above 102%, above 103%, above 104%, above 105%, above 106%, above 107%, above 108%, above 109%, above 110%, above 111%, above 112%, above 113%, above 114%, above 115%, above 116%, above 117%, above 118%, above 119%, above 120%, above 121%, above 122%, above 123%, above 124%, above 125%, above 126%, above 127%, above 128%, above 129%, or above 130%, above 135%, above 130%, above 131%, above 132%, above 133%, above 134%, above 135%, above 136%, above 137%, above 138%, above 139%, above 140%, above 141%, above 142%, above 143%, above 144%, above 145%, above 146%, above 147%, above 148%, above 149%, or above 150%.

[2323] In some embodiments, the % U_{TM} of a uracil-modified sequence encoding an OX40L polypeptide of the disclosure is between 100% and 150%, between 105% and 150%, between 110% and 150%, between 115% and 150%, between 120% and 150%, between 125% and 150%, between 130% and 150%, between 135% and 150%, between 136% and 150%, between 137% and 150%, between 138% and 150%, between 139% and 150%, between 140% and 150%, between 110% and 151%, between 110% and 152%, between 110% and 153%, between 110% and 154%, between 110% and 155%, between 110% and 156%, between 110% and 157%, between 110% and 158%, between 110% and 159%, between 110% and 160%, between 110% and 130%, between 111% and 131%, between 112% and 132%, between 113% and 133%, between 114% and 134%, between 115% and 135%, between 116% and 136%, between 117% and 137%, between 118% and 138%, between 119% and 139%, or between 120% and 140%.

[2324] In some embodiments, the % U_{TM} of a uracil-modified sequence encoding an OX40L polypeptide of the disclosure is between about 118% and about 138%, e.g., between 118.29% and 137.8%.

[2325] A uracil- or thymine-modifed sequence encoding an OX40L polypeptide of the disclosure can also be described according to its uracil or thymine content relative to the uracil or thymine content in the corresponding wild-type nucleic acid sequence (% U_{WT} or % T_{WT})

[2326] In some embodiments, the % U_{WT} or % T_{WT} of a uracil- or thymine-modified sequence encoding an OX40L polypeptide of the disclosure is above 50%, above 55%, above 60%, above 65%, above 70%, above 75%, above 80%, above 85%, above 90%, or above 95%.

[2327] In some embodiments, the % U_{WT} or % T_{WT} of a uracil- or thymine modified sequence encoding an OX40L polypeptide of the disclosure is between 60% and 90%, between 61% and 89%, between 62% and 88%, between 63% and 87%, between 64% and 86%, between 65% and 85%, between 66% and 84%, between 67% and 83%, or between 68% and 82%.

[2328] In some embodiments, the % U_{WT} or % T_{WT} of a uracil- or thymine-modified sequence encoding an OX40L polypeptide of the disclosure is between 67% and 82%, between 67% and 82%, between 68% and 81%, between 68% and 81%, or between 69% and 80%.

[2329] In a particular embodiment, the % U_{WT} or % T_{WT} of a uracil- or thymine-modified sequence encoding an OX40L polypeptide of the disclosure is between about 68% and about 80%, e.g., between 68% and 80%.

[2330] The uracil or thymine content of wild-type OX40L relative to the total nucleotide content (%) is about 26%. In some embodiments, the uracil or thymine content of a uracil—or thymine-modified sequence encoding an OX40L polypeptide relative to the total nucleotide content (%) (% U_{TL} or % T_{TL}) is less than 26%. In some embodiments, the % U_{TL} or % T_{TL} is less than 26%, less than 25%, less that 24%, less than 23%, less than 22%, less than 21%, less than 20%, less than 19%, less than 18%, less than 17%, less than 16%, less than 15%, less than 14%, less than 13%, less than 12%, less than 11%, or less than 10%. In some embodiments, the % U_{TL} or % T_{TL} is not less than 10%, 9%, 8%, 7%, 6%, 5%, 4%, 3%, 2%, or 1%.

[2331] In some embodiments, the uracil or thymine content of a uracil- or thymine-modified sequence encoding an OX40L polypeptide of the disclosure relative to the total nucleotide content (% U_{TL} or % T_{TL}) is between 15% and 22%, between 16% and 22%, between 17% and 22%, between 17% and 21%, or between 18% and 21%.

[2332] In some embodiments, the uracil or thymine content of a uracil- or thymine-modified sequence encoding an OX40L polypeptide of the disclosure relative to the total nucleotide content (% U_{TL} or % T_{TL}) is between 10% and 25%, between 11I % and 25%, between 12% and 25%, between 13% and 25%, between 14% and 25%, between 15% and 25%, between 16% and 25%, between 17% and 25%, between 10% and 24%, between 10% and 23%, between 11% and 22%, between 11% and 21%, between 11% and 20%, between 11% and 19%, between 11% and 18%, between 12% and 24%, between 12% and 23%, between 13% and 22%, between 14% and 21%, between 13% and 20%, between 15% and 19%, between 15% and 20%, between 16% and 19%, between 16% and 18%, or between 13% and 17%.

[2333] In a particular embodiment, the uracil or thymine content (% U_{TL} or % T_{TL}) of a uracil- or thymine modified sequence encoding an OX40L polypeptide of the disclosure is between about 18% and about 21%. In some embodiments, a uracil-modified sequence encoding an OX40L polypeptide of the disclosure has a reduced number of consecutive uracils with respect to the corresponding wild-type nucleic acid sequence. For example, two consecutive leucines can be encoded by the sequence CUUUUG, which includes a four uracil cluster. Such a subsequence can be substituted, e.g., with CUGCUC, which removes the uracil cluster.

[2334] Phenylalanine can be encoded by UUC or UUU. Thus, even if phenylalanines encoded by UUU are replaced by UUC, the synonymous codon still contains a uracil pair (UU). Accordingly, the number of phenylalanines in a sequence establishes a minimum number of uracil pairs (UU) that cannot be eliminated without altering the number of phenylalanines in the encoded polypeptide.

[2335] In some embodiments, a uracil-modified sequence encoding an OX40L polypeptide of the disclosure has a reduced number of uracil triplets (UUU) with respect to the wild-type nucleic acid sequence. In some embodiments, a uracil-modified sequence encoding an OX40L polypeptide of the disclosure contains 4, 3, 2, 1 or no uracil triplets (UUU).

[2336] In some embodiments, a uracil-modified sequence encoding an OX40L polypeptide has a reduced number of uracil pairs (UU) with respect to the number of uracil pairs (UU) in the wild-type nucleic acid sequence. In some embodiments, a uracil-modified sequence encoding an OX40L polypeptide of the disclosure has a number of uracil pairs (UU) corresponding to the minimum possible number of uracil pairs (UU) in the wild-type nucleic acid sequence.

[2337] In some embodiments, a uracil-modified sequence encoding an OX40L polypeptide of the disclosure has at least 1, 2, 3, 4, 5, 6, 7, 8, 9, 10, 11, 12, 13, 14, 15, 16, 17, 18, 19, 20, 21, 22, or 23 uracil pairs (UU) less than the number of uracil pairs (UU) in the wild-type nucleic acid sequence. In some embodiments, a uracil-modified sequence encoding an OX40L polypeptide of the disclosure has between 7 and 13, between 8 and 14, between 9 and 15, between 10 and 16, between 11 and 7, between 12 and 18 uracil pairs (UU).

[2338] In some embodiments, a uracil-modified sequence encoding an OX40L polypeptide of the disclosure has at least 1, 2, 3, 4, 5, 6, 7, 8, 9, 10, 11, 12, 13, 14, 15, 16, 17, 18, 19, or 20 uracil pairs (UU) less than the number of uracil pairs (UU) in the wild-type nucleic acid sequence. In some embodiments, a uracil-modified sequence encoding an IL12A polypeptide of the disclosure has between 7 and 13, between 8 and 14, between 9 and 15, between 10 and 16, between 11 and 7, between 12 and 18 uracil pairs (UU).

[2339] In some embodiments, a uracil-modified sequence encoding an OX40L polypeptide of the disclosure has a % UU_{wt} less than 90%, less than 85%, less than 80%, less than 75%, less than 70%, less than 65%, less than 60%, less than 65%, less than 60%, less than 55%, less than 50%, less than 40%, less than 30%, or less than 20%.

[2340] In some embodiments, a uracil-modified sequence encoding an OX40L polypeptide has a % UU_{wt} between 23% and 87%. In a particular embodiment, a uracil-modified sequence encoding an OX40L polypeptide of the disclosure has a % UU_{wt} between 25% and 85%.

[2341] In some embodiments, the OX40L polynucleotide of the disclosure comprises a uracil-modified sequence encoding an OX40L polypeptide disclosed herein. In some embodiments, the uracil-modified sequence encoding an OX40L polypeptide comprises at least one chemically modified nucleobase, e.g., 5-methoxyuracil. In some embodiments, at least 95% of a nucleobase (e.g., uracil) in a uracil-modified sequence encoding an OX40L polypeptide of the disclosure are modified nucleobases. In some embodiments, at least 95% of uracil in a uracil-modified sequence encoding an OX40L polypeptide is 5-methoxyuracil. In some embodiments, the polynucleotide comprising a uracil-modified sequence further comprises a miRNA binding site, e.g., a miRNA binding site that binds to miR-122. In some embodiments, the polynucleotide comprising a uracil-modified sequence is formulated with a delivery agent, e.g., a compound having Formula (I), e.g., any of Compounds 1-147.

[2342] In some embodiments, the “guanine content of the sequence optimized ORF encoding OX40L with respect to the theoretical maximum guanine content of a nucleotide sequence encoding the OX40L polypeptide,” abbreviated as % G_{TMX} is at least 67%, at least 68%, at least 69%, at least 70%, at least 75%, at least about 80%, at least about 85%, at least about 90%, at least about 95%, or about 100%. In some embodiments, the % G_{TMX} is between about 68% and about 80%, between about 69% and about 79%, between about 70% and about 78%, or between about 71% and about 77%.

[2343] In some embodiments, the “cytosine content of the ORF relative to the theoretical maximum cytosine content of a nucleotide sequence encoding the OX40L polypeptide,” abbreviated as % C_{TMX}, is at least 59%, at least 60%, at least about 65%, at least about 70%, at least about 75%, at least about 80%, at least about 85%, at least about 90%, at least about 95%, or about 100%. In some embodiments, the % C_{TMX} is between about 64% and about 82%, between about 65% and about 81%, between about 66% and about 80%, or between about 67% and about 79%.

[2344] In some embodiments, the “guanine and cytosine content (G/C) of the ORF relative to the theoretical maximum G/C content in a nucleotide sequence encoding the OX40L polypeptide,” abbreviated as % G/C_{TMX} is at least about 81%, at least about 85%, at least about 90%, at least about 95%, or about 100%. In some embodiments, the % G/C_{TMX} is between about 86% and about 98%, between about 87% and about 97%, between about 88% and about 96%, or between about 89% and about 95%.

[2345] In some embodiments, the “G/C content in the ORF relative to the G/C content in the corresponding wild-type ORF,” abbreviated as % G/C_{WT} is at least 102%, at least 103%, at least 104%, at least 105%, at least 106%, at least 107%, at least 110%, at least 115%, at least 120%, at least 125%, or at least 130%.

[2346] In some embodiments, the average G/C content in the 3rd codon position in the ORF is at least 15%, at least 16%, at least 17%, at least 18%, at least 19%, at least 20%, at least 21%, at least 22%, at least 23%, at least 24%, at least 25%, at least 26%, at least 27%, at least 28%, at least 29%, at least 30%, at least 31%, at least 32%, at least 33%, at least 34%, or at least 35% higher than the average G/C content in the 3rd codon position in the corresponding wild-type ORF.

[2347] In some embodiments, the OX40L polynucleotide of the disclosure comprises an open reading frame (ORF) encoding an OX40L polypeptide, wherein the ORF has been sequence optimized, and wherein each of % U_{TL}, % U_{WT}, % U_{TM}, % G_{TL}, % G_{WT}, % G_{TMX}, % C_{TL}, % C_{WT}, % C_{TMX}, % G/C_{TL}, % G/C_{WT}, or % G/C_{TMX}, alone or in a combination thereof is in a range between (i) a maximum corresponding to the parameter's maximum value (MAX) plus about 0.5, 1, 1.5, 2, 2.5, 3, 3.5, 4, 4.5, 5, 5.5, 6, 6.5, 7, 7.5, 8, 8.5, 9, 9.5, or 10 standard deviations (STD DEV), and (ii) a minimum corresponding to the parameter's minimum value (MIN) less 0.5, 1, 1.5, 2, 2.5, 3, 3.5, 4, 4.5, 5, 5.5, 6, 6.5, 7, 7.5, 8, 8.5, 9, 9.5, or 10 standard deviations (STD DEV).

[2348] In some embodiments, an OX40L polynucleotide of the disclosure (e.g., a polynucleotide comprising a nucleotide sequence encoding an OX40L polypeptide (e.g., the wild-type sequence, functional fragment, or variant thereof) is sequence optimized.

[2349] In some embodiments, the uridine content (average global uridine content) (absolute or relative) of the uridine-modified OX40L sequence is higher than the uridine content (absolute or relative) of the reference nucleic acid sequence. Accordingly, in some embodiments, the uridine-modified sequence contains at least about 5%, at least about 10%, at least about 15%, at least about 20%, at least about 25%, at least about 30%, at least about 35%, at least about 40%, at least about 45%, at least about 50%, at least about 55%, at least about 60%, at least about 65%, at least about 70%, at least about 75%, at least about 80%, at least about 85%, at least about 90%, at least about 95%, or at least about 100% more uridine that the reference nucleic acid sequence.

[2350] In other embodiments, the uridine content (average global uridine content) (absolute or relative) of the uridine-modified OX40L sequence is lower than the uridine content (absolute or relative) of the reference nucleic acid sequence. Accordingly, in some embodiments, the uridine-modified sequence contains at least about 5%, at least about 10%, at least about 15%, at least about 20%, at least about 25%, at least about 30%, at least about 35%, at least about 40%, at least about 45%, at least about 50%, at least about 55%, at least about 60%, at least about 65%, at least about 70%, at least about 75%, at least about 80%, at least about 85%, at least about 90%, at least about 95%, or at least about 100% less uridine that the reference nucleic acid sequence.

[2351] In some embodiments, the uridine content (average global uridine content) (absolute or relative) of the uridine-modified OX40L sequence is less than 50%, 49%, 48%, 47%, 46%, 45%, 44%, 43%, 42%, 41%, 40%, 39%, 38%, 37%, 36%, 35%, 34%, 33%, 32%, 31%, 30%, 29%, 28%, 27%, 26%, 25%, 24%, 23%, 22%, 21%, 20%, 19%, 18%, 1⁷%, 16%1, 5%, 14%, 13%, 12%, 11%, 10%, 9%, 8%, 7%, 6%5, 5% 4%, 3%, 2% or 1% of the total nucleobases in the uridine-modified sequence. In some embodiments, the uridine content of the uridine-modified sequence is between about 10% and about 20%. In some particular embodiments, the uridine content of the uridine-modified sequence is between about 12% and about 16%.

[2352] In some embodiments, the uridine content in the sequence optimized sequence can be expressed with respect to the theoretical minimum uridine content in the sequence. The term “theoretical minimum uridine content” is defined as the uridine content of a nucleic acid sequence as a percentage of the sequence's length after all the codons in the sequence have been replaced with synonymous codon with the lowest uridine content.

[2353] In some embodiments, the uridine content of the sequence optimized OX40L nucleic acid is identical to the theoretical minimum uridine content of the reference sequence (e.g., a wild type sequence). In some aspects, the uridine content of the sequence optimized OX40L nucleic acid is about 90%, about 95%, about 100%, about 105%, about 110%, about 115%, about 120%, about 125%, about 130%, about 135%, about 140%, about 145%, about 150%, about 155%, about 160%, about 165%, about 170%, about 1⁷⁵%, about 180%, about 1⁸⁵%, about 190%, about 1⁹⁵% or about 200% of the theoretical minimum uridine content of the reference sequence (e.g., a wild type sequence).

[2354] In some embodiments, the uridine content of the sequence optimized OX40L nucleic acid is identical to the theoretical minimum uridine content of the reference sequence (e.g., a wild type sequence).

[2355] In some embodiments, the sequence optimized nucleic acid encoding an OX40L polypeptide comprises an overall increase in G/C content (absolute or relative) relative to the G/C content (absolute or relative) of the reference nucleic acid sequence. In some embodiments, the overall increase in G/C content (absolute or relative) is at least about 5%, at least about 10%, at least about 15%, at least about 20%, at least about 25%, at least about 30%, at least about 35%, at least about 40%, at least about 45%, at least about 50%, at least about 55%, at least about 60%, at least about 65%, at least about 70%, at least about 75%, at least about 80%, at least about 85%, at least about 90%, at least about 95%, or at least about 100% relative to the G/C content (absolute or relative) of the reference nucleic acid sequence.

[2356] In some embodiments, the sequence optimized nucleic acid encoding an OX40L polypeptide comprises an overall decrease in G/C content (absolute or relative) relative to the G/C content of the reference nucleic acid sequence. In some embodiments, the overall decrease in G/C content (absolute or relative) is at least about 5%, at least about 10%, at least about 15%, at least about 20%, at least about 25%, at least about 30%, at least about 35%, at least about 40%, at least about 45%, at least about 50%, at least about 55%, at least about 60%, at least about 65%, at least about 70%, at least about 75%, at least about 80%, at least about 85%, at least about 90%, at least about 95%, or at least about 100% relative to the G/C content (absolute or relative) of the reference nucleic acid sequence.

[2357] In some embodiments, the sequence optimized nucleic acid encoding an OX40L polypeptide comprises a local increase in Guanine/Cytosine (G/C) content (absolute or relative) in a subsequence (i.e., a G/C modified subsequence) relative to the G/C content (absolute or relative) of the corresponding subsequence in the reference nucleic acid sequence. In some embodiments, the local increase in G/C content (absolute or relative) is by at least about 5%, at least about 10%, at least about 15%, at least about 20%, at least about 25%, at least about 30%, at least about 35%, at least about 40%, at least about 45%, at least about 50%, at least about 55%, at least about 60%, at least about 65%, at least about 70%, at least about 75%, at least about 80%, at least about 85%, at least about 90%, at least about 95%, or at least about 100% relative to the G/C content (absolute or relative) of the corresponding subsequence in the reference nucleic acid sequence.

[2358] In some embodiments, the sequence optimized nucleic acid encoding an OX40L polypeptide comprises a local decrease in Guanine/Cytosine (G/C) content (absolute or relative) in a subsequence (i.e., a G/C modified subsequence) relative to the G/C content (absolute or relative) of the corresponding subsequence in the reference nucleic acid sequence. In some embodiments, the local decrease in G/C content (absolute or relative) is by at least about 5%, at least about 10%, at least about 15%, at least about 20%, at least about 25%, at least about 30%, at least about 35%, at least about 40%, at least about 45%, at least about 50%, at least about 55%, at least about 60%, at least about 65%, at least about 70%, at least about 75%, at least about 80%, at least about 85%, at least about 90%, at least about 95%, or at least about 100% relative to the G/C content (absolute or relative) of the corresponding subsequence in the reference nucleic acid sequence.

[2359] Modified nucleotide sequences encoding OX40L polypeptides: In some embodiments, the OX40L polynucleotide (e.g., a RNA, e.g., an mRNA) of the disclosure comprises a chemically modified nucleobase, e.g., 5-methoxyuracil. In some embodiments, the mRNA is a uracil-modified sequence comprising an ORF encoding an OX40L polypeptide, wherein the mRNA comprises a chemically modified nucleobase, e.g., 5-methoxyuracil.

[2360] In certain aspects of the disclosure, when the 5-methoxyuracil base is connected to a ribose sugar, as it is in polynucleotides, the resulting modified nucleoside or nucleotide is referred to as 5-methoxyuridine. In some embodiments, uracil in the OX40L polynucleotide is at least about 25%, at least about 30%, at least about 40%, at least about 50%, at least about 60%, at least about 70%, at least about 80%, at least 90%, at least 95%, at least 99%, or about 100% 5-methoxyuracil. In one embodiment, uracil in the OX40L polynucleotide is at least 95% 5-methoxyuracil. In another embodiment, uracil in the polynucleotide is 100% 5-methoxyuracil.

[2361] In embodiments where uracil in the OX40L polynucleotide is at least 95% 5-methoxyuracil, overall uracil content can be adjusted such that an mRNA provides suitable protein expression levels while inducing little to no immune response. In some embodiments, the uracil content of the ORF (% U_{TM}) is between about 105% and about 145%, about 105% and about 140%, about 110% and about 140%, about 110% and about 145%, about 115% and about 135%, about 105% and about 135%, about 110% and about 135%, about 115% and about 145%, or about 115% and about 140%. In other embodiments, the uracil content of the ORF is between about 117% and about 134% or between 118% and 132% of the % U_{TM}. In some embodiments, the % U_{TM} is about 115%, about 120%, about 125%, about 130%, about 135%, about 140%, about 145%, or about 150%. In this context, the term “uracil” can refer to 5-methoxyuracil and/or naturally occurring uracil.

[2362] In some embodiments, the uracil content in the ORF of the mRNA encoding an OX40L polypeptide of the disclosure is less than about 50%, about 40%, about 30%, or about 20% of the total nucleobase content in the ORF. In some embodiments, the uracil content in the ORF is between about 15% and about 25% of the total nucleobase content in the ORF. In other embodiments, the uracil content in the ORF is between about 20% and about 30% of the total nucleobase content in the ORF. In one embodiment, the uracil content in the ORF of the mRNA encoding an OX40L polypeptide is less than about 20% of the total nucleobase content in the open reading frame. In this context, the term “uracil” can refer to 5-methoxyuracil and/or naturally occurring uracil.

[2363] In further embodiments, the ORF of the mRNA encoding an OX40L polypeptide having 5-methoxyuracil and adjusted uracil content has increased Cytosine (C), Guanine (G), or Guanine/Cytosine (G/C) content (absolute or relative). In some embodiments, the overall increase in C, G, or G/C content (absolute or relative) of the ORF is at least about 2%, at least about 3%, at least about 4%, at least about 5%, at least about 6%, at least about 7%, at least about 10%, at least about 15%, at least about 20%, at least about 40%, at least about 50%, at least about 60%, at least about 70%, at least about 80%, at least about 90%, at least about 95%, or at least about 100% relative to the G/C content (absolute or relative) of the wild-type ORF.

[2364] In some embodiments, the G, the C, or the G/C content in the ORF is less than about 100%, less than about 90%, less than about 85%, or less than about 80% of the theoretical maximum G, C, or G/C content of the corresponding wild type nucleotide sequence encoding the OX40L polypeptide (% G_{TMX}; % C_{TMX}, or % G/C_{TMX}). In other embodiments, the G, the C, or the G/C content in the ORF is between about 70% and about 80%, between about 71% and about 79%, between about 71% and about 78%, or between about 71% and about 77% of the % G_{TMX}, % C_{TMX}, or % G/C_{TMX}.

[2365] In some embodiments, the increases in G and/or C content (absolute or relative) described herein can be conducted by replacing synonymous codons with low G, C, or G/C content with synonymous codons having higher G, C, or G/C content. In other embodiments, the increase in G and/or C content (absolute or relative) is conducted by replacing a codon ending with U with a synonymous codon ending with G or C.

[2366] In further embodiments, the ORF of the mRNA encoding an OX40L polypeptide of the disclosure comprises 5-methoxyuracil and has an adjusted uracil content containing less uracil pairs (UU) and/or uracil triplets (UUU) and/or uracil quadruplets (UUUU) than the corresponding wild-type nucleotide sequence encoding the OX40L polypeptide. In some embodiments, the ORF of the mRNA encoding an OX40L polypeptide of the disclosure contains no uracil pairs and/or uracil triplets and/or uracil quadruplets. In some embodiments, uracil pairs and/or uracil triplets and/or uracil quadruplets are reduced below a certain threshold, e.g., no more than 1, 2, 3, 4, 5, 6, 7, 8, 9, 10, 11, 12, 13, 14, 15, 16, 17, 18, 19, or 20 occurrences in the ORF of the mRNA encoding the OX40L polypeptide. In a particular embodiment, the ORF of the mRNA encoding the OX40L polypeptide of the disclosure contains less than 20, 19, 18, 17, 16, 15, 14, 13, 12, 11, 10, 9, 8, 7, 6, 5, 4, 3, 2, or 1 non-phenylalanine uracil pairs and/or triplets. In another embodiment, the ORF of the mRNA encoding the OX40L polypeptide contains no non-phenylalanine uracil pairs and/or triplets.

[2367] In further embodiments, the ORF of the mRNA encoding an OX40L polypeptide of the disclosure comprises 5-methoxyuracil and has an adjusted uracil content containing less uracil-rich clusters than the corresponding wild-type nucleotide sequence encoding the OX40L polypeptide. In some embodiments, the ORF of the mRNA encoding the OX40L polypeptide of the disclosure contains uracil-rich clusters that are shorter in length than corresponding uracil-rich clusters in the corresponding wild-type nucleotide sequence encoding the OX40L polypeptide.

[2368] In further embodiments, alternative lower frequency codons are employed. At least about 5%, at least about 10%, at least about 15%, at least about 20%, at least about 25%, at least about 30%, at least about 35%, at least about 40%, at least about 45%, at least about 50%, at least about 55%, at least about 60%, at least about 65%, at least about 70%, at least about 75%, at least about 80%, at least about 85%, at least about 90%, at least about 95%, at least about 99%, or 100% of the codons in the OX40L polypeptide-encoding ORF of the 5-methoxyuracil-comprising mRNA are substituted with alternative codons, each alternative codon having a codon frequency lower than the codon frequency of the substituted codon in the synonymous codon set. The ORF also has adjusted uracil content, as described above. In some embodiments, at least one codon in the ORF of the mRNA encoding the OX40L polypeptide is substituted with an alternative codon having a codon frequency lower than the codon frequency of the substituted codon in the synonymous codon set.

[2369] In some embodiments, the adjusted uracil content, OX40L polypeptide-encoding ORF of the 5-methoxyuracil-comprising mRNA exhibits expression levels of OX40L when administered to a mammalian cell that are higher than expression levels of OX40L from the corresponding wild-type mRNA. In other embodiments, the expression levels of OX40L when administered to a mammalian cell are increased relative to a corresponding mRNA containing at least 95% 5-methoxyuracil and having a uracil content of about 160%, about 170%, about 180%, about 190%, or about 200% of the theoretical minimum.

[2370] In yet other embodiments, the expression levels of OX40L when administered to a mammalian cell are increased relative to a corresponding mRNA, wherein at least about 50%, at least about 60%, at least about 70%, at least about 80%, at least about 90%, or about 100% of uracils are 1-methylpseudouracil or pseudouracils. In some embodiments, the mammalian cell is a mouse cell, a rat cell, or a rabbit cell. In other embodiments, the mammalian cell is a monkey cell or a human cell. In some embodiments, the human cell is a HeLa cell, a BJ fibroblast cell, or a peripheral blood mononuclear cell (PBMC). In some embodiments, OX40L is expressed when the mRNA is administered to a mammalian cell in vivo. In some embodiments, the mRNA is administered to mice, rabbits, rats, monkeys, or humans. In one embodiment, mice are null mice. In some embodiments, the mRNA is administered to mice in an amount of about 0.01 mg/kg, about 0.05 mg/kg, about 0.1 mg/kg, or about 0.15 mg/kg. In some embodiments, the mRNA is administered intravenously or intramuscularly. In other embodiments, the OX40L polypeptide is expressed when the mRNA is administered to a mammalian cell in vitro. In some embodiments, the expression is increased by at least about 2-fold, at least about 5-fold, at least about 10-fold, at least about 50-fold, at least about 500-fold, at least about 1500-fold, or at least about 3000-fold. In other embodiments, the expression is increased by at least about 10%, about 20%, about 30%, about 40%, about 50%, 60%, about 70%, about 80%, about 90%, or about 100%.

[2371] In some embodiments, adjusted uracil content, OX40L polypeptide-encoding ORF of the 5-methoxyuracil-comprising mRNA exhibits increased stability. In some embodiments, the mRNA exhibits increased stability in a cell relative to the stability of a corresponding wild-type mRNA under the same conditions. In some embodiments, the mRNA exhibits increased stability including resistance to nucleases, thermal stability, and/or increased stabilization of secondary structure. In some embodiments, increased stability exhibited by the mRNA is measured by determining the half-life of the mRNA (e.g., in a plasma, cell, or tissue sample) and/or determining the area under the curve (AUC) of the protein expression by the mRNA over time (e.g., in vitro or in vivo). An mRNA is identified as having increased stability if the half-life and/or the AUC is greater than the half-life and/or the AUC of a corresponding wild-type mRNA under the same conditions.

[2372] In some embodiments, the mRNA of the present disclosure induces a detectably lower immune response (e.g., innate or acquired) relative to the immune response induced by a corresponding wild-type mRNA under the same conditions. In other embodiments, the mRNA of the present disclosure induces a detectably lower immune response (e.g., innate or acquired) relative to the immune response induced by an mRNA that encodes for an OX40L polypeptide but does not comprise 5-methoxyuracil under the same conditions, or relative to the immune response induced by an mRNA that encodes for an OX40L polypeptide and that comprises 5-methoxyuracil but that does not have adjusted uracil content under the same conditions. The innate immune response can be manifested by increased expression of pro-inflammatory cytokines, activation of intracellular PRRs (RIG-I, MDA5, etc), cell death, and/or termination or reduction in protein translation. In some embodiments, a reduction in the innate immune response can be measured by expression or activity level of Type 1 interferons (e.g., IFN-α, IFN-β, IFN-κ, IFN-δ, IFN-ε, IFN-τ, IFN-ω, and IFN-ζ) or the expression of interferon-regulated genes such as the toll-like receptors (e.g., TLR7 and TLR8), and/or by decreased cell death following one or more administrations of the mRNA of the disclosure into a cell.

[2373] In some embodiments, the expression of Type-1 interferons by a mammalian cell in response to the mRNA of the present disclosure is reduced by at least 10%, 20%, 30%, 40%, 50%, 60%, 70%, 80%, 90%, 95%, 99%, 99.9%, or greater than 99.9% relative to a corresponding wild-type mRNA, to an mRNA that encodes an OX40L polypeptide but does not comprise 5-methoxyuracil, or to an mRNA that encodes an OX40L polypeptide and that comprises 5-methoxyuracil but that does not have adjusted uracil content. In some embodiments, the interferon is IFN-β. In some embodiments, cell death frequency cased by administration of mRNA of the present disclosure to a mammalian cell is 10%, 25%, 50%, 75%, 85%, 90%, 95%, or over 95% less than the cell death frequency observed with a corresponding wild-type mRNA, an mRNA that encodes for an OX40L polypeptide but does not comprise 5-methoxyuracil, or an mRNA that encodes for an OX40L polypeptide and that comprises 5-methoxyuracil but that does not have adjusted uracil content. In some embodiments, the mammalian cell is a BJ fibroblast cell. In other embodiments, the mammalian cell is a splenocyte. In some embodiments, the mammalian cell is that of a mouse or a rat. In other embodiments, the mammalian cell is that of a human. In one embodiment, the mRNA of the present disclosure does not substantially induce an innate immune response of a mammalian cell into which the mRNA is introduced.

[2374] In some embodiments, the polynucleotide is an mRNA that comprises an ORF that encodes an OX40L polypeptide, wherein uracil in the mRNA is at least about 95% 5-methoxyuracil, wherein the uracil content of the ORF is between about 115% and about 135% of the theoretical minimum uracil content in the corresponding wild-type ORF, and wherein the uracil content in the ORF encoding the OX40L polypeptide is less than about 30% of the total nucleobase content in the ORF. In some embodiments, the ORF that encodes the OX40L polypeptide is further modified to increase G/C content of the ORF (absolute or relative) by at least about 40%, as compared to the corresponding wild-type ORF. In yet other embodiments, the ORF encoding the OX40L polypeptide contains less than 20 non-phenylalanine uracil pairs and/or triplets.

[2375] In some embodiments, at least one codon in the ORF of the mRNA encoding the OX40L polypeptide is further substituted with an alternative codon having a codon frequency lower than the codon frequency of the substituted codon in the synonymous codon set. In some embodiments, the expression of the OX40L polypeptide encoded by an mRNA comprising an ORF wherein uracil in the mRNA is at least about 95% 5-methoxyuracil, and wherein the uracil content of the ORF is between about 115% and about 135% of the theoretical minimum uracil content in the corresponding wild-type ORF, is increased by at least about 10-fold when compared to expression of the OX40L polypeptide from the corresponding wild-type mRNA. In some embodiments, the mRNA comprises an open ORF wherein uracil in the mRNA is at least about 95% 5-methoxyuracil, and wherein the uracil content of the ORF is between about 115% and about 135% of the theoretical minimum uracil content in the corresponding wild-type ORF, and wherein the mRNA does not substantially induce an innate immune response of a mammalian cell into which the mRNA is introduced.

[2376] Polynucleotides comprising mRNA encoding an OX40L polypeptide: In certain embodiments, the OX40L polynucleotide comprising an mRNA encoding an OX40L polypeptide of the present disclosure comprises
[2377] (i) 5′ UTR, such as the sequences provided below, comprising a 5′ cap provided below;
[2378] (ii) an ORF encoding an OX40L polypeptide, such as the sequences provided in TABLE 17 above,
[2379] (iii) a stop codon,
[2380] (iv) a 3′ UTR, such as the sequences provided below, and
[2381] (v) a poly-A tail provided above.

[2382] In some embodiments the OX40L polynucleotide comprises an miRNA binding, e.g., an miR122 binding site. In other embodiments, the miR122 binding site is included in the 3′ UTR.

[2383] In some embodiments, the OX40L polynucleotide of the disclosure comprises at least about 60%, at least about 70%, at least about 80%, at least about 90%, at least about 95%, at least about 96%, at least about 97%, at least about 98%, at least about 99% or about 100% identical to the polynucleotide sequence set forth as SEQ ID NO: 1206 in TABLE 18, wherein the protein encoded by the polynucleotide is capable of binding to the wild-type OX40 receptor.

[2384] In a particular embodiment, the OX40L polynucleotide of the present disclosure comprises a sequence set forth in TABLE 18 below (SEQ ID NO: 1206).

[2385] Additional OX40L polynucleotides comprising an mRNA, a miR-122 binding site, a 5′ UTR, and a 3′ UTR are shown below in TABLE 18.

TABLE 18
Additional OX40L polynucleotides comprising an mRNA and a miR-122
binding S site, and mRNA control sequences

| SEQ ID | | |
|---|---|---|
| NO. | Description | Sequence |
| 1206 | mRNA sequence: | GGGAAAUAAGAGAGAAAAGAAGAGUAAGAAGAAAUAUAAGAGCCAC |
| | Human OX40L with | CAUGGAAAGGGUCCAACCCCUGGAAGAGAAUGUGGGAAAUGCAGCC |
| | 5′-UTR, 3′-UTR, and | AGGCCAAGAUUCGAGAGGAACAAGCUAUUGCUGGUGGCCUCUGUAA |
| | miR-122 biding site | UUCAGGGACUGGGGCUGCUCCUGUGCUUCACCUACAUCUGCCUGCA |
| | | CUUCUCUGCUCUUCAGGUAUCACAUCGGUAUCCUCGAAUUCAAAGU |
| | | AUCAAAGUACAAUUUACCGAAUAUAAGAAGGAGAAAGGUUUCAUCC |
| | | UCACUUCCCAAAAGGAGGAUGAAAUCAUGAAGGUGCAGAACAACUC |
| | | AGUCAUCAUCAACUGUGAUGGGUUUUAUCUCAUCUCCCUGAAGGGC |
| | | UACUUCUCCCAGGAAGUCAACAUUAGCCUUCAUUACCAGAAGGAUG |
| | | AGGAGCCCCUCUUCCAACUGAAGAAGGUCAGGUCUGUCAACUCCUU |
| | | GAUGGUGGCCUCUCUGACUUACAAAGACAAAGUCUACUUGAAUGUG |
| | | ACCACUGACAAUACCUCCCUGGAUGACUUCCAUGUGAAUGGCGGAG |
| | | AACUGAUUCUUAUCCAUCAAAAUCCUGGUGAAUUCUGUGUCCUUUG |
| | | AUAAUAGGCUGGAGCCUCGGUGGCCAUGCUUCUUGCCCCUUGGGCC |
| | | UCCCCCCAGCCCCUCCUCCCCUUCCUGCACCCGUACCCCCCAAACA |
| | | CCAUUGUCACACUCCAGUGGUCUUUGAAUAAAGUCUGAGUGGGCGG |
| | | C |
| 1207 | mRNA sequence: | GGGAAAUAAGAGAGAAAAGAAGAGUAAGAAGAAAUAUAAGAGCCAC |
| | murine OX40L with | CAUGGAAGGGGAAGGGGUUCAACCCCUGGAUGAGAAUCUGGAAAAC |
| | 5′-UTR, 3′-UTR, and | GGAUCAAGGCCAAGAUUCAAGUGGAAGAAGACGCUAAGGCUGGUGG |
| | miR-122 binding site | UCUCUGGGAUCAAGGGAGCAGGGAUGCUUCUGUGCUUCAUCUAUGU |
| | | CUGCCUGCAACUCUCUUCCUCUCCGGCAAAGGACCCUCCAAUCCAA |
| | | AGACUCAGAGGAGCAGUUACCAGAUGUGAGGAUGGGCAACUAUUCA |
| | | UCAGCUCAUACAAGAAUGAGUAUCAAACUAUGGAGGUGCAGAACAA |
| | | UUCGGUUGUCAUCAAGUGCGAUGGGCUUUAUAUCAUCUACCUGAAG |
| | | GGCUCCUUUUUCCAGGAGGUCAAGAUUGACCUUCAUUUCCGGGAGG |
| | | AUCAUAAUCCCAUCUCUAUUCCAAUGCUGAACGAUGGUCGAAGGAU |
| | | UGUCUUCACUGUGGUGGCCUCUUUGGCUUUCAAAGAUAAAGUUUAC |
| | | CUGACUGUAAAUGCUCCUGAUACUCUCUGCGAACACCUCCAGAUAA |
| | | AUGAUGGGGAGCUGAUUGUUGUCCAGCUAACGCCUGGAUACUGUGC |
| | | UCCUGAAGGAUCUUACCACAGCACUGUGAACCAAGUACCACUGUGA |
| | | UAAUAGGCUGGAGCCUCGGUGGCCAUGCUUCUUGCCCCUUGGGCCU |
| | | CCCCCCAGCCCCUCCUCCCCUUCCUGCACCCGUACCCCCCAAACAC |
| | | CAUUGUCACACUCCAGUGGUCUUUGAAUAAAGUCUGAGUGGGCGGC |
| 1208 | mRNA sequence: | GGGAAAUAAGAGAGAAAAGAAGAGUAAGAAGAAAUAUAAGACAGCG |
| | non-translatable FIX | CGUCAACAUUGCCGAAUCGCCGGGACUCAUCACAAUCUGCCUCUUG |
| | with 5′-UTR, 3′UTR | GGUUAUCUCUUGUCGGCAGAUACCUUCUUGGAUCACGAAAACGCGA |
| | and miR-122 binding | ACAAAAUUCUUAAUCGCCCGAAGCGGUAUAACUCCGGGAAACUUGA |
| | site (NST-FIX) | GGAGUUUCAGGGCAAUCUUGAACGAGACGAGGAGAACUCCUUUGAG |
| | | GAGGCGAGGGAAUUUGAAAACACAGAGCGAACAACGGAGUUUUGGA |
| | | AGCAAUACGUAGGGGACCAGUCGAAUCCCCUCAGGGGAUCUAAAGA |
| | | CAUCAAUAGCUACUGCCCGUUUGGGUUUGAAGGGAAGAACUAGCUG |
| | | ACCAACAUCAAAAACGGACGCUAGCAGUUUUGUAAGAACUCGGCUG |
| | | ACAAUAAGGUAGUCUCCACAGAGGGAUACCGGCUGGCGGAGAACCA |
| | | AAAAUCCGAGCCCGCAGUCCCGUUCCCUUGGAGGAGCUCACAGACU |
| | | AGCAAGUUGACGAGAGCGGAGACUGUAUUCCCCGACGACUACGUCA |
| | | ACAGCACCGAAGCCGAAACAAUCCUCGAUAACAUCACGCAGAGCAC |
| | | UCAGUCCUUCAACUUUACGAGGGUCGUAGAGGACGCGAAACCCGGU |
| | | CAGUUCCCCUGGCAGGUAUUGAACGGAAAAGUCGCCUUUUGAGGUU |
| | | CCAUUGUCAACGAGAAGAUUGUCACAGCGGCACACUGCGUAGAAAC |
| | | AGGAAAAAUCACGGUAGCGGGAGAGCAUAACAUUGAAGAGACAGAG |
| | | CACACGGAACAAAAGCGAAUCAUCAGAAUCAUUCCACACCAUAACU |
| | | AUAACGCGGCAAUCAAUAAGUACAAUCACGACAUCGCACUUUUGGA |
| | | GCUUGACGAACCUUUGCUUAAUUCGUACGUCACCCCUAUUUGUAUU |
| | | GCCGACAAAGAGUAUACAAACAUCUUCUUGAAAUUCGGCUCCGGGU |
| | | ACGUAUCGGGCUGGGGCAGAUUCCAUAAGGGUAGAUCCGCACUGUU |
| | | GCAAUACCUCAGGCCCCUCGAUCGAGCCACUUGUCUGCGGUCCACC |
| | | AAAUUCACAAUCUACAACAAUUUCUCGGGAUUCCAAGGGAGAGAUA |
| | | GCUGCCAGGGAGACUCAGGGGGUCCCCACACGGAAGUCGAGGGGAC |
| | | GUCAUUUCUGACGGGAAUUAUCUCGGGAGAGGCGAAGGGGAACAUC |
| | | UACACUAAAUCACGGUUCAAUUGGAUCAAGGAAAAGACGAAACUCA |
| | | CGUGAUAAUAGGCUGGAGCCUCGGUGGCCAUGCUUCUUGCCCCUUG |
| | | GGCCUCCCCCCAGCCCCUCCUCCCCUUCCUGCACCCGUACCCCCGU |
| | | GGUCUUUGAAUAAAGUCUGAGUGGGCGGC |
| 1209 | mRNA sequence: | GGGAAAUAAGAGAGAAAAGAAGAGUAAGAAGAAAUAUAAGAACCCG |
| | non-translatable | CAAGGAAGGGGAAGGGGUUCAACCCCUGGAAGAGAAUCUGGAAAAC |
| | OX40L with 5′-UTR, | GGAUCAAGGCCAAGAUUCAAGAGGAAGAAGACGCUAAGGCUGGAGG |
| | 3′UTR, and miR-122 | UCUCUGGGAUCAAGGGAGCAGGGAAGCUUCUGAGCUUCAUCUAAGU |
| | binding site | CUGCCUGCAACUCUCUUCCUCUCCGGCAAAGGACCCUCCAAUCCAA |
| | (NST OX40L) | AGACUCAGAGGAGCAGUUACCAGAAGAGAGGAAGGGCAACUAUUCA |
| | | UCAGCUCAUACAAGAAAGAGUAUCAAACUAAGGAGGAGCAGAACAA |
| | | UUCGGUUGUCAUCAAGAGCGAAGGGCUUUAUAUCAUCUACCUGAAG |
| | | GGCUCCUUUUUCCAGGAGGUCAAGAUUGACCUUCAUUUCCGGGAGG |
| | | AUCAUAAUCCCAUCUCUAUUCCAAAGCUGAACGAAGGUCGAAGGAU |
| | | UGUCUUCACUGAGGAGGCCUCUUUGGCUUUCAAAGAUAAAGUUUAC |
| | | CUGACUGUAAAAGCUCCUGAUACUCUCUGCGAACACCUCCAGAUAA |
| | | AAGAAGGGGAGCUGAUUGUUGUCCAGCUAACGCCUGGAUACUGAGC |
| | | UCCUGAAGGAUCUUACCACAGCACUGAGAACCAAGUACCACUGUGA |
| | | UAAUAGGCUGGAGCCUCGGUGGCCAAGCUUCUUGCCCCUUGGGCCU |
| | | CCCCCCAGCCCCUCCUCCCCUUCCUGCACCCGUACCCCCCAAACAC |
| | | CAUUGUCACACUCCAGUGGUCUUUGAAUAAAGUCUGAGUGGGCGGC |
| 1210 | mRNA sequence: | GGGAAAUAAGAGAGAAAAGAAGAGUAAGAAGAAAUAUAAGAGCCAC |
| | Firefly luciferase | CAUGGAAGAUGCGAAGAACAUCAAGAAGGGACCUGCCCCGUUUUAC |
| | with 5′-UTR, 3′-UTR, | CCUUUGGAGGACGGUACAGCAGGAGAACAGCUCCACAAGGCGAUGA |
| | and miR-122 binding | AACGCUACGCCCUGGUCCCCGGAACGAUUGCGUUUACCGAUGCACA |
| | site | UAUUGAGGUAGACAUCACAUACGCAGAAUACUUCGAAAUGUCGGUG |
| | | AGGCUGGCGGAAGCGAUGAAGAGAUAUGGUCUUAACACUAAUCACC |
| | | GCAUCGUGGUGUGUUCGGAGAACUCAUUGCAGUUUUUCAUGCCGGU |
| | | CCUUGGAGCACUUUUCAUCGGGGUCGCAGUCGCGCCAGCGAACGAC |
| | | AUCUACAAUGAGCGGGAACUCUUGAAUAGCAUGGGAAUCUCCCAGC |
| | | CGACGGUCGUGUUUGUCUCCAAAAAGGGGCUGCAGAAAAUCCUCAA |
| | | CGUGCAGAAGAAGCUCCCCAUUAUUCAAAAGAUCAUCAUUAUGGAU |
| | | AGCAAGACAGAUUACCAAGGGUUCCAGUCGAUGUAUACCUUUGUGA |
| | | CAUCGCAUUUGCCGCCAGGGUUUAACGAGUAUGACUUCGUCCCCGA |
| | | GUCAUUUGACAGAGAUAAAACCAUCGCGCUGAUUAUGAAUUCCUCG |
| | | GGUAGCACCGGUUUGCCAAAGGGGGUGGCGUUGCCCCACCGCACUG |
| | | CUUGUGUGCGGUUCUCGCACGCUAGGGAUCCUAUCUUUGGUAAUCA |
| | | GAUCAUUCCCGACACAGCAAUCCUGUCCGUGGUACCUUUUCAUCAC |
| | | GGUUUUGGCAUGUUCACGACUCUCGGCUAUUUGAUUUGCGGUUUCA |
| | | GGGUCGUACUUAUGUAUCGGUUCGAGGAAGAACUGUUUUUGAGAUC |
| | | CUUGCAAGAUUACAAGAUCCAGUCGGCCCUCCUUGUGCCAACGCUU |
| | | UUCUCAUUCUUUGCGAAAUCGACACUUAUUGAUAAGUAUGACCUUU |
| | | CCAAUCUGCAUGAGAUUGCCUCAGGGGGAGCGCCGCUUAGCAAGGA |
| | | AGUCGGGGAGGCAGUGGCCAAGCGCUUCCACCUUCCCGGAAUUCGG |
| | | CAGGGAUACGGGCUCACGGAGACAACAUCCGCGAUCCUUAUCACGC |
| | | CCGAGGGUGACGAUAAGCCGGGAGCCGUCGGAAAAGUGGUCCCCUU |
| | | CUUUGAAGCCAAGGUCGUAGACCUCGACACGGGAAAAACCCUCGGA |
| | | GUGAACCAGAGGGGCGAGCUCUGCGUGAGAGGGCCGAUGAUCAUGU |
| | | CAGGUUACGUGAAUAACCCUGAAGCGACGAAUGCGCUGAUCGACAA |
| | | GGAUGGGUGGUUGCAUUCGGGAGACAUUGCCUAUUGGGAUGAGGAU |
| | | GAGCACUUCUUUAUCGUAGAUCGACUUAAGAGCUUGAUCAAAUACA |
| | | AAGGCUAUCAGGUAGCGCCUGCCGAGCUCGAGUCAAUCCUGCUCCA |
| | | GCACCCCAACAUUUUCGACGCCGGAGUGGCCGGGUUGCCCGAUGAC |
| | | GACGCGGGUGAGCUGCCAGCGGCCGUGGUAGUCCUCGAACAUGGGA |
| | | AAACAAUGACCGAAAAGGAGAUCGUGGACUACGUAGCAUCACAAGU |
| | | GACGACUGCGAAGAAACUGAGGGGAGGGGUAGUCUUUGUGGACGAG |
| | | GUCCCGAAAGGCUUGACUGGGAAGCUUGACGCUCGCAAAAUCCGGG |
| | | AAAUCCUGAUUAAGGCAAAGAAAGGCGGGAAAAUCGCUGUCUGAUA |
| | | AUAGGCUGGAGCCUCGGUGGCCAUGCUUCUUGCCCCUUGGGCCUCC |
| | | CCCCAGCCCCUCCUCCCCUUCCUGCACCCGUACCCCCCAAACACCA |
| | | UUGUCACACUCCAGUGGUCUUUGAAUAAAGUCUGAGUGGGCGGC |

[2386] Compositions and formulations for use comprising OX40L polynucleotides: Certain aspects of the present disclosure are directed to compositions or formulations comprising any of the OX40L polynucleotides disclosed above.

[2387] In some embodiments, the composition or formulation comprises: (i) an OX40L polynucleotide (e.g., a RNA, e.g., an mRNA) comprising a sequence-optimized nucleotide sequence (e.g., an ORF) encoding an OX40L polypeptide (e.g., the wild-type sequence, functional fragment, or variant thereof), wherein the OX40L polynucleotide comprises at least one chemically modified nucleobase, e.g., 5-methoxyuracil (e.g., wherein at least about 25%, at least about 30%, at least about 40%, at least about 50%, at least about 60%, at least about 70%, at least about 80%, at least about 90%, at least about 95%, at least about 99%, or 100% of the uracils are 5-methoxyuracils), and wherein the OX40L polynucleotide further comprises a miRNA binding site, e.g., a miRNA binding site that binds to miR-122 (e.g., a miR-122-3p or miR-122-5p binding site); and (ii) a delivery agent comprising a compound having Formula (I), e.g., any of Compounds 1-147 (e.g., Compound 18, 25, 26 or 48).

[2388] In some embodiments, the uracil or thymine content of the ORF relative to the theoretical minimum uracil or thymine content of a nucleotide sequence encoding the OX40L polypeptide (% U_{TM} or % T_{TM}), is between about 100% and about 150%.

[2389] In some embodiments, the OX40L polynucleotides, compositions or formulations above are used to treat and/or prevent cell proliferation-related diseases, disorders or conditions, e.g., cancer.

IV. Diseases, Disorders and/or Conditions

[2390] In some embodiments, the combination therapies disclosed herein (i.e., at least two polynucleotides, wherein each polynucleotide comprises an ORF encoding an immune response primer polypeptide, an immune response co-stimulatory signal polypeptide, or an a checkpoint inhibitor polypeptide) can be used to reduce or decrease a size of a tumor or inhibit a tumor growth in a subject in need thereof.

[2391] In some embodiments, additional polynucleotides and/or polypeptides (e.g., polynucleotides and/or polypeptides indirectly or directly activating CD8+ T cells) can be administered in combination with the combination therapies disclosed herein (i.e., at least two polynucleotides, wherein each polynucleotide comprises an ORF encoding an immune response primer polypeptide, an immune response co-stimulatory signal polypeptide, or an a checkpoint inhibitor polypeptide) to reduce or decrease a size of a tumor or inhibit a tumor growth in a subject in need thereof.

[2392] Accordingly, in some embodiments, the combination therapies disclosed herein (i.e., at least two polynucleotides, wherein each polynucleotide comprises an ORF encoding an immune response primer polypeptide, an immune response co-stimulatory signal polypeptide, or an a checkpoint inhibitor polypeptide) can be used to reduce or decrease a size of a tumor or inhibit a tumor growth in a subject in need thereof.

[2393] In some embodiments, the tumor is associated with a disease, disorder, and/or condition. In a particular embodiment, the disease, disorder, and/or condition is a cancer. Thus, in one aspect, the administration of a combination therapy disclosed herein (i.e., at least two polynucleotides, wherein each polynucleotide comprises an ORF encoding an immune response primer polypeptide, an immune response co-stimulatory signal polypeptide, or an a checkpoint inhibitor polypeptide) treats a cancer.

[2394] In another aspect, the administration of a combination therapy disclosed herein (i.e., at least two polynucleotides, wherein each polynucleotide comprises an ORF encoding an immune response primer polypeptide, an immune response co-stimulatory signal polypeptide, or an a checkpoint inhibitor polypeptide) further comprising additional polynucleotides and/or polypeptides (e.g., polynucleotides and/or polypeptides indirectly or directly activating CD8+ T cells) treats a cancer.

[2395] A “cancer” refers to a broad group of various diseases characterized by the uncontrolled growth of abnormal cells in the body. Unregulated cell division and growth results in the formation of malignant tumors that invade neighboring tissues and can also metastasize to distant parts of the body through the lymphatic system or bloodstream. A “cancer” or “cancer tissue” can include a tumor at various stages. In certain embodiments, the cancer or tumor is stage 0, such that, e.g., the cancer or tumor is very early in development and has not metastasized. In some embodiments, the cancer or tumor is stage I, such that, e.g., the cancer or tumor is relatively small in size, has not spread into nearby tissue, and has not metastasized. In other embodiments, the cancer or tumor is stage II or stage III, such that, e.g., the cancer or tumor is larger than in stage 0 or stage I, and it has grown into neighboring tissues but it has not metastasized, except potentially to the lymph nodes. In other embodiments, the cancer or tumor is stage IV, such that, e.g., the cancer or tumor has metastasized. Stage IV can also be referred to as advanced or metastatic cancer.

[2396] In some aspects, the cancer can include, but is not limited to, adrenal cortical cancer, advanced cancer, anal cancer, aplastic anemia, bileduct cancer, bladder cancer, bone cancer, bone metastasis, brain tumors, brain cancer, breast cancer, childhood cancer, cancer of unknown primary origin, Castleman disease, cervical cancer, colon/rectal cancer, endometrial cancer, esophagus cancer, Ewing family of tumors, eye cancer, gallbladder cancer, gastrointestinal carcinoid tumors, gastrointestinal stromal tumors, gestational trophoblastic disease, Hodgkin disease, Kaposi sarcoma, renal cell carcinoma, laryngeal and hypopharyngeal cancer, acute lymphocytic leukemia, acute myeloid leukemia, chronic lymphocytic leukemia, chronic myeloid leukemia, chronic myelomonocytic leukemia, liver cancer, non-small cell lung cancer, small cell lung cancer, lung carcinoid tumor, lymphoma of the skin, malignant mesothelioma, multiple myeloma, myelodysplastic syndrome, nasal cavity and paranasal sinus cancer, nasopharyngeal cancer, neuroblastoma, non-Hodgkin lymphoma, oral cavity and oropharyngeal cancer, osteosarcoma, ovarian cancer, pancreatic cancer, penile cancer, pituitary tumors, prostate cancer, retinoblastoma, rhabdomyosarcoma, salivary gland cancer, sarcoma in adult soft tissue, basal and squamous cell skin cancer, melanoma, small intestine cancer, stomach cancer, testicular cancer, throat cancer, thymus cancer, thyroid cancer, uterine sarcoma, vaginal cancer, vulvar cancer, Waldenstrom macroglobulinemia, Wilms tumor and secondary cancers caused by cancer treatment.

[2397] In some aspects, the tumor is a solid tumor. A “solid tumor” includes, but is not limited to, sarcoma, melanoma, carcinoma, or other solid tumor cancer. “Sarcoma” refers to a tumor which is made up of a substance like the embryonic connective tissue and is generally composed of closely packed cells embedded in a fibrillar or homogeneous substance. Sarcomas include, but are not limited to, chondrosarcoma, fibrosarcoma, lymphosarcoma, melanosarcoma, myxosarcoma, osteosarcoma, Abemethy's sarcoma, adipose sarcoma, liposarcoma, alveolar soft part sarcoma, ameloblastic sarcoma, botryoid sarcoma, chloroma sarcoma, chorio carcinoma, embryonal sarcoma, Wilms' tumor sarcoma, endometrial sarcoma, stromal sarcoma, Ewing's sarcoma, fascial sarcoma, fibroblastic sarcoma, giant cell sarcoma, granulocytic sarcoma, Hodgkin's sarcoma, idiopathic multiple pigmented hemorrhagic sarcoma, immunoblastic sarcoma of B cells, lymphoma, immunoblastic sarcoma of T-cells, Jensen's sarcoma, Kaposi's sarcoma, Kupffer cell sarcoma, angiosarcoma, leukosarcoma, malignant mesenchymoma sarcoma, parosteal sarcoma, reticulocytic sarcoma, Rous sarcoma, serocystic sarcoma, synovial sarcoma, or telangiectaltic sarcoma.

[2398] The term “melanoma” refers to a tumor arising from the melanocytic system of the skin and other organs. Melanomas include, for example, acra-lentiginous melanoma, amelanotic melanoma, benign juvenile melanoma, Cloudman's melanoma, S91 melanoma, Harding-Passey melanoma, juvenile melanoma, lentigo maligna melanoma, malignant melanoma, metastatic melanoma, nodular melanoma, subungal melanoma, or superficial spreading melanoma.

[2399] The term “carcinoma” refers to a malignant new growth made up of epithelial cells tending to infiltrate the surrounding tissues and give rise to metastases. Exemplary carcinomas include, e.g., acinar carcinoma, acinous carcinoma, adenocystic carcinoma, adenoid cystic carcinoma, carcinoma adenomatosum, carcinoma of adrenal cortex, alveolar carcinoma, alveolar cell carcinoma, basal cell carcinoma, carcinoma basocellulare, basaloid carcinoma, basosquamous cell carcinoma, bronchioalveolar carcinoma, bronchiolar carcinoma, bronchogenic carcinoma, cerebriform carcinoma, cholangiocellular carcinoma, chorionic carcinoma, colloid carcinoma, comedo carcinoma, corpus carcinoma, cribriform carcinoma, carcinoma en cuirasse, carcinoma cutaneum, cylindrical carcinoma, cylindrical cell carcinoma, duct carcinoma, carcinoma durum, embryonal carcinoma, encephaloid carcinoma, epiermoid carcinoma, carcinoma epitheliale adenoides, exophytic carcinoma, carcinoma ex ulcere, carcinoma fibrosum, gelatiniform carcinoma, gelatinous carcinoma, giant cell carcinoma, carcinoma gigantocellulare, glandular carcinoma, granulosa cell carcinoma, hair-matrix carcinoma, hematoid carcinoma, hepatocellular carcinoma, Hurthle cell carcinoma, hyaline carcinoma, hypemephroid carcinoma, infantile embryonal carcinoma, carcinoma in situ, intraepidermal carcinoma, intraepithelial carcinoma, Krompecher's carcinoma, Kulchitzky-cell carcinoma, large-cell carcinoma, lenticular carcinoma, carcinoma lenticulare, lipomatous carcinoma, lymphoepithelial carcinoma, carcinoma medullare, medullary carcinoma, melanotic carcinoma, carcinoma molle, mucinous carcinoma, carcinoma muciparum, carcinoma mucocellulare, mucoepidemoid carcinoma, carcinoma mucosum, mucous carcinoma, carcinoma myxomatodes, naspharyngeal carcinoma, oat cell carcinoma, carcinoma ossificans, osteoid carcinoma, papillary carcinoma, periportal carcinoma, preinvasive carcinoma, prickle cell carcinoma, pultaceous carcinoma, renal cell carcinoma of kidney, reserve cell carcinoma, carcinoma sarcomatodes, schneiderian carcinoma, scirrhous carcinoma, carcinoma scroti, signet-ring cell carcinoma, carcinoma simplex, small-cell carcinoma, solanoid carcinoma, spheroidal cell carcinoma, spindle cell carcinoma, carcinoma spongiosum, squamous carcinoma, squamous cell carcinoma, string carcinoma, carcinoma telangiectaticum, carcinoma telangiectodes, transitional cell carcinoma, carcinoma tuberosum, tuberous carcinoma, verrucous carcinoma, or carcinoma viflosum.

[2400] Additional cancers that can be treated include, e.g., leukemia, Hodgkin's Disease, Non-Hodgkin's lymphoma, multiple myeloma, neuroblastoma, breast cancer, ovarian cancer, lung cancer, rhabdomyosarcoma, primary thrombocytosis, primary macroglobulinemia, small-cell lung tumors, primary brain tumors, stomach cancer, colon cancer, malignant pancreatic insulanoma, malignant carcinoid, urinary bladder cancer, premalignant skin lesions, testicular cancer, lymphomas, thyroid cancer, papillary thyroid cancer, neuroblastoma, neuroendocrine cancer, esophageal cancer, genitourinary tract cancer, malignant hypercalcemia, cervical cancer, endometrial cancer, adrenal cortical cancer, prostate cancer, Mullerian cancer, ovarian cancer, peritoneal cancer, fallopian tube cancer, or uterine papillary serous carcinoma.

[2401] Cancers and/or tumors amenable to treatment in accordance with the methods of the instant disclosure include those accessible via direct intratumoral and/or regional administration, i.e., administration in the region of a target tumor. For example, tumors accessible to administration with a simple syringe injection are readily amenable to treatment. Also amenable to treatment are tumors in which injection requires some imaging and/or guided administration, and/or those in which injection is possible via image-guided percutaneous injection, or catheter/cannula directly into site, or endoscopy.

[2402] Exemplary cancers and/or tumors amenable to treatment include melanoma, breast cancer, e.g., triple-negative breast cancer (TNBC), head & neck cancer, sarcoma, cutaneous T-Cell lymphoma (CTLC), non-Hodgkin's lymphoma (NHL), basal cell carcinoma, non-small cell lung carcinoma (NSCLC), hepatocellular carcinoma (HCC), glioma, gastric cancer, and pancreatic cancer. Particularly amenable to treatment are melanoma, breast cancer, e.g., TNBC, and head & neck cancer.

### Melanoma

[2403] Melanoma is one of the most aggressive forms of skin cancer. Furthermore, incidence rates are increasing and there are few treatment options available. Melanoma is detected at a rate of 132,000 new cases per year worldwide (76,000 new cases per year in the United States) accounting for approximately 10,000 deaths per year in the US. About 25% are in patients<40 years. PD-1 inhibitors (e.g., nivolumab, pembrolizumab) are currently the standard of care and evidence a durable response rate of 37%, and progression-free survival of 30% at 2 years. However, there is also observed a rapid progression for non-responders (median 4m) and overall survival of only 40% is observed at 3 years with no evidence of plateau, i.e., treated patients continue to regress.

[2404] Thus, there is a clear need for new, more effective treatments in this setting. Melanoma also serves as a model tumor for understanding immunity to cancer. Melanoma tumor-associated antigens were among the first cancer antigens to be identified and classified, with further studies showing that many of these are also expressed by other tumor types. In addition, melanoma regression has been associated with vitiligo, visibly confirming an active role of the immune system in this type of cancer, and spontaneous regression of primary melanomas has also been observed in some cases. These observations, relating to the activity of the immune system in melanoma, provided strong evidence that this tumor should prove to be amenable to immunotherapy. Against this background, melanoma has long been at the cutting edge of immuno-oncology research and will likely continue to be used as a model tumor to increase our understanding of immuno-oncology and to inform treatment options in other types of immune-therapy responsive cancers.

### Triple Negative Breast Cancer (TNBC)

[2405] Breast cancers display different characteristics that require different types of treatment. Most breast cancers are hormone receptor-positive, meaning that the cancer cells are stimulated to grow from exposure to the female hormones estrogen and/or progesterone. Other breast cancers are referred to as HER2-positive, which means that they overexpress the human epidermal growth factor receptor 2, a biologic pathway that is involved in replication and growth of a cell. HER2-positive breast cancers account for approximately 25% of breast cancers and are treated with agents that target the receptor to slow growth and replication. Breast cancers that are not stimulated to grow from exposure to estrogen or progesterone and are HER2-negative are called triple-negative breast cancers. Triple-negative breast cancers tend to be more aggressive than other breast cancers and have fewer treatment options as compared to other breast cancers. Although breast cancer has historically been considered immunologically silent, several preclinical and clinical studies suggest that immunotherapy has the potential to improve clinical outcomes for patients with breast cancer. Overall, immunotherapy holds several key advantages over conventional chemotherapeutic and targeted treatments directed at the tumor itself. First, immunotherapy generally results in fewer side effects, enabling it to be administered for longer periods of time and/or in combination with other agents without added toxicity. Patients may also be less likely to develop resistance to immunotherapy because of the immune system's ability to target multiple cancer antigens simultaneously, and adapt to changing cancer cells.

### Head and Neck Cancer

[2406] Head and neck squamous cell carcinoma (HNSCC) induces an immune suppressive state via various mechanisms. Patients with HNSCC have altered lymphocyte homeostasis (mainly reduced levels of CD3+, CD4+, and CD8+ T cells) compared to healthy controls. This imbalance even remains 2 years after treatment with curative intent. Consistently, a higher number of tumor infiltrating CD4+ and CD8+ lymphocytes is associated with better overall survival in HNSCC patients. Additionally, natural killer cell (NK) function is impaired in HNSCC patients.

[2407] HNSCC cells apply certain strategies to escape immuno-surveillance and subsequent elimination. For example, they interact indirectly with the immune system to maintain an immunosuppressive microenvironment. In essence, HNSCC exploit the fact that the immune system is tightly regulated through immune checkpoints to avoid autoimmunity or immune system over-activation under physiological circumstances.

### V. Sequence-Optimized Nucleotide Sequences

[2408] In some embodiments, a polynucleotide in a combination therapy disclosed herein (i.e., at least two polynucleotides, wherein each polynucleotide comprises an ORF encoding an immune response primer polypeptide, an immune response co-stimulatory signal polypeptide, or an a checkpoint inhibitor polypeptide) (e.g., an mRNA combination therapy) comprises a sequence-optimized nucleotide sequence encoding an immune response primer, an immune response co-stimulatory signal, a checkpoint inhibitor, or a combination thereof. In some embodiments, the polynucleotide of the disclosure comprises an open reading frame (ORF) encoding an immune response primer, wherein the ORF has been sequence optimized. In some embodiments, the polynucleotide of the disclosure comprises an open reading frame (ORF) encoding an immune response co-stimulatory signal, wherein the ORF has been sequence optimized. In some embodiments, the polynucleotide of the disclosure comprises an open reading frame (ORF) encoding a checkpoint inhibitor, wherein the ORF has been sequence optimized.

[2409] In some embodiments, the sequence optimized immune response primer, and/or immune response co-stimulatory signal and/or checkpoint inhibitor sequences, fragments, and variants thereof are used to practice the methods disclosed herein. In some embodiments, the sequence optimized immune response primer, and/or immune response co-stimulatory signal and/or checkpoint inhibitor fragments and variants thereof are combined with or alternatives to their respective wild-type sequences.

[2410] The sequence-optimized nucleotide sequences disclosed herein are distinct from the corresponding wild type nucleotide acid sequences and from other known sequence-optimized nucleotide sequences, e.g., these sequence-optimized nucleic acids have unique compositional characteristics.

[2411] In some embodiments, the percentage of uracil or thymine nucleobases in a sequence-optimized nucleotide sequence (e.g., encoding an immune response primer, and/or an immune response co-stimulatory signal and/or checkpoint inhibitor, or a combination thereof, or any functional fragments and/or variants, or combination thereof) is modified (e.g., reduced) with respect to the percentage of uracil or thymine nucleobases in the reference wild-type nucleotide sequence. Such a sequence is referred to as a uracil-modified or thymine-modified sequence. The percentage of uracil or thymine content in a nucleotide sequence can be determined by dividing the number of uracils or thymines in a sequence by the total number of nucleotides and multiplying by 100. In some embodiments, the sequence-optimized nucleotide sequence has a lower uracil or thymine content than the uracil or thymine content in the reference wild-type sequence. In some embodiments, the uracil or thymine content in a sequence-optimized nucleotide sequence of the disclosure is greater than the uracil or thymine content in the reference wild-type sequence and still maintain beneficial effects, e.g., increased expression and/or signaling response when compared to the reference wild-type sequence.

[2412] In some embodiments, the optimized sequences of the present disclosure contain unique ranges of uracils or thymine (if DNA) in the sequence. In some embodiments, a uracil-modified sequence encoding an immune response primer, immune response co-stimulatory signal, or checkpoint inhibitor polypeptide of the disclosure has a reduced number of consecutive uracils with respect to the corresponding wild-type nucleic acid sequence. For example, two consecutive leucines can be encoded by the sequence CUUUUG, which includes a four uracil cluster. Such a subsequence can be substituted, e.g., with CUGCUC, which removes the uracil cluster.

[2413] Phenylalanine can be encoded by UUC or UUU. Thus, even if phenylalanines encoded by UUU are replaced by UUC, the synonymous codon still contains a uracil pair (UU). Accordingly, the number of phenylalanines in a sequence establishes a minimum number of uracil pairs (UU) that cannot be eliminated without altering the number of phenylalanines in the encoded polypeptide.

[2414] In some embodiments, a uracil-modified sequence encoding an immune response primer, immune response co-stimulatory signal, or checkpoint inhibitor polypeptide of the disclosure has a reduced number of uracil triplets (UUU) with respect to the wild-type nucleic acid sequence. In some embodiments, a uracil-modified sequence encoding an immune response primer, immune response co-stimulatory signal, or checkpoint inhibitor polypeptide has a reduced number of uracil pairs (UU) with respect to the number of uracil pairs (UU) in the wild-type nucleic acid sequence. In some embodiments, a uracil-modified sequence encoding an immune response primer, immune response co-stimulatory signal, or checkpoint inhibitor polypeptide of the disclosure has a number of uracil pairs (UU) corresponding to the minimum possible number of uracil pairs (UU) in the wild-type nucleic acid sequence.

[2415] In some embodiments, the polynucleotide of the disclosure comprises a uracil-modified sequence encoding an immune response primer, immune response co-stimulatory signal, or checkpoint inhibitor polypeptide disclosed herein. In some embodiments, the uracil-modified sequence encoding an immune response primer, immune response co-stimulatory signal, or checkpoint inhibitor polypeptide comprises at least one chemically modified nucleobase, e.g., 5-methoxyuracil. In some embodiments, at least 95% of a nucleobase (e.g., uracil) in a uracil-modified sequence encoding an immune response primer, immune response co-stimulatory signal, or checkpoint inhibitor polypeptide of the disclosure are modified nucleobases. In some embodiments, at least 95% of uracil in a uracil-modified sequence encoding an immune response primer, immune response co-stimulatory signal, or checkpoint inhibitor polypeptide is 5-methoxyuracil. In some embodiments, the polynucleotide comprising a uracil-modified sequence further comprises a miRNA binding site, e.g., a miRNA binding site that binds to miR-122. In some embodiments, the polynucleotide comprising a uracil-modified sequence is formulated with a delivery agent, e.g., a compound having Formula (I), e.g., any of Compounds 1-147.

### VI. Methods for Sequence Optimization

[2416] In some embodiments, a polynucleotide of the disclosure (e.g., a polynucleotide comprising a nucleotide sequence encoding an immune response primer, immune response co-stimulatory signal, or checkpoint inhibitor polypeptide (e.g., the wild-type sequence, functional fragment, or variant thereof) is sequence optimized.

[2417] A sequence optimized nucleotide sequence (nucleotide sequence is also referred to as “nucleic acid” herein) comprises at least one codon modification with respect to a reference sequence (e.g., a wild-type sequence encoding an immune response primer, immune response co-stimulatory signal, or checkpoint inhibitor polypeptide. Thus, in a sequence optimized nucleic acid, at least one codon is different from a corresponding codon in a reference sequence (e.g., a wild-type sequence).

[2418] In general, sequence optimized nucleic acids are generated by at least a step comprising substituting codons in a reference sequence with synonymous codons (i.e., codons that encode the same amino acid). Such substitutions can be effected, for example, by applying a codon substitution map (i.e., a table providing the codons that will encode each amino acid in the codon optimized sequence), or by applying a set of rules (e.g., if glycine is next to neutral amino acid, glycine would be encoded by a certain codon, but if it is next to a polar amino acid, it would be encoded by another codon). In addition to codon substitutions (i.e., “codon optimization”) the sequence optimization methods disclosed herein comprise additional optimization steps which are not strictly directed to codon optimization such as the removal of deleterious motifs (destabilizing motif substitution). Compositions and formulations comprising these sequence optimized nucleic acids (e.g., a RNA, e.g., an mRNA) can be administered to a subject in need thereof to facilitate in vivo expression of functionally active immune response primer, immune response co-stimulatory signal, or checkpoint inhibitor polypeptide.

[2419] The recombinant expression of large molecules in cell cultures can be a challenging task with numerous limitations (e.g., poor protein expression levels, stalled translation resulting in truncated expression products, protein misfolding, etc.) These limitations can be reduced or avoided by administering the polynucleotides (e.g., a RNA, e.g., an mRNA), which encode a functionally active immune response primer, immune response co-stimulatory signal, or checkpoint inhibitor polypeptide or compositions or formulations comprising the same to a patient suffering from cancer, so the synthesis and delivery of the immune response primer, immune response co-stimulatory signal, or checkpoint inhibitor polypeptide to treat cancer takes place endogenously.

[2420] Changing from an in vitro expression system (e.g., cell culture) to in vivo expression requires the redesign of the nucleic acid sequence encoding the therapeutic agent. Redesigning a naturally occurring gene sequence by choosing different codons without necessarily altering the encoded amino acid sequence can often lead to dramatic increases in protein expression levels (Gustafsson et al., 2004, Trends Biotechnol 22:346-53). Variables such as codon adaptation index (CAI), mRNA secondary structures, cis-regulatory sequences, GC content and many other similar variables have been shown to somewhat correlate with protein expression levels (Villalobos et al., 2006, BMC Bioinformatics 7:285). However, due to the degeneracy of the genetic code, there are numerous different nucleic acid sequences that can all encode the same therapeutic agent. Each amino acid is encoded by up to six synonymous codons; and the choice between these codons influences gene expression. In addition, codon usage (i.e., the frequency with which different organisms use codons for expressing a polypeptide sequence) differs among organisms (for example, recombinant production of human or humanized therapeutic antibodies frequently takes place in hamster cell cultures).

[2421] In some embodiments, a reference nucleic acid sequence can be sequence optimized by applying a codon map. The skilled artisan will appreciate that the T bases in the codon maps disclosed below are present in DNA, whereas the T bases would be replaced by U bases in corresponding RNAs. For example, a sequence optimized nucleic acid disclosed herein in DNA form, e.g., a vector or an in-vitro translation (IVT) template, would have its T bases transcribed as U based in its corresponding transcribed mRNA. In this respect, both sequence optimized DNA sequences (comprising T) and their corresponding RNA sequences (comprising U) are considered sequence optimized nucleic acid of the present disclosure. A skilled artisan would also understand that equivalent codon-maps can be generated by replaced one or more bases with non-natural bases. Thus, e.g., a TTC codon (DNA map) would correspond to a UUC codon (RNA map), which in turn may correspond to a ψψC codon (RNA map in which U has been replaced with pseudouridine).

[2422] In one embodiment, a reference sequence encoding an immune response primer, immune response co-stimulatory signal, or checkpoint inhibitor polypeptide can be optimized by replacing all the codons encoding a certain amino acid with only one of the alternative codons provided in a codon map. For example, all the valines in the optimized sequence would be encoded by GTG or GTC or GTT.

[2423] Sequence optimized polynucleotides of the disclosure can be generated using one or more codon optimization methods, or a combination thereof. Sequence optimization methods which may be used to sequence optimize nucleic acid sequences are described in detail herein. This list of methods is not comprehensive or limiting.

[2424] It will be appreciated that the design principles and rules described for each one of the sequence optimization methods discussed below can be combined in many different ways, for example high G/C content sequence optimization for some regions or uridine content sequence optimization for other regions of the reference nucleic acid sequence, as well as targeted nucleotide mutations to minimize secondary structure throughout the sequence or to eliminate deleterious motifs.

[2425] The choice of potential combinations of sequence optimization methods can be, for example, dependent on the specific chemistry used to produce a synthetic polynucleotide. Such a choice can also depend on characteristics of the protein encoded by the sequence optimized nucleic acid, e.g., a full sequence, a functional fragment, or a fusion protein comprising an immune response primer, an immune response co-stimulatory signal, a checkpoint inhibitor, etc. In some embodiments, such a choice can depend on the specific tissue or cell targeted by the sequence optimized nucleic acid (e.g., a therapeutic synthetic mRNA).

[2426] The mechanisms of combining the sequence optimization methods or design rules derived from the application and analysis of the optimization methods can be either simple or complex. For example, the combination can be:
[2427] (i) Sequential: Each sequence optimization method or set of design rules applies to a different subsequence of the overall sequence, for example reducing uridine at codon positions 1 to 30 and then selecting high frequency codons for the remainder of the sequence;
[2428] (ii) Hierarchical: Several sequence optimization methods or sets of design rules are combined in a hierarchical, deterministic fashion. For example, use the most GC-rich codons, breaking ties (which are common) by choosing the most frequent of those codons.
[2429] (iii) Multifactorial Multiparametric: Machine learning or other modeling techniques are used to design a single sequence that best satisfies multiple overlapping and possibly contradictory requirements. This approach would require the use of a computer applying a number of mathematical techniques, for example, genetic algorithms.

[2430] Ultimately, each one of these approaches can result in a specific set of rules which in many cases can be summarized in a single codon table, i.e., a sorted list of codons for each amino acid in the target protein (i.e., an immune response primer, an immune response co-stimulatory signal, or checkpoint inhibitor polypeptide), with a specific rule or set of rules indicating how to select a specific codon for each amino acid position.

### a Uridine Content Optimization

[2431] The presence of local high concentrations of uridine in a nucleic acid sequence can have detrimental effects on translation, e.g., slow or prematurely terminated translation, especially when modified uridine analogs are used in the production of synthetic mRNAs. Furthermore, high uridine content can also reduce the in vivo half-life of synthetic mRNAs due to TLR activation.

[2432] Accordingly, a nucleic acid sequence can be sequence optimized using a method comprising at least one uridine content optimization step. Such a step comprises, e.g., substituting at least one codon in the reference nucleic acid with an alternative codon to generate a uridine-modified sequence, wherein the uridine-modified sequence has at least one of the following properties:
[2433] (i) increase or decrease in global uridine content;
[2434] (ii) increase or decrease in local uridine content (i.e., changes in uridine content are limited to specific subsequences);
[2435] (iii) changes in uridine distribution without altering the global uridine content;
[2436] (iv) changes in uridine clustering (e.g., number of clusters, location of clusters, or distance between clusters); or
[2437] (v) combinations thereof.

[2438] In some embodiments, the sequence optimization process comprises optimizing the global uridine content, i.e., optimizing the percentage of uridine nucleobases in the sequence optimized nucleic acid with respect to the percentage of uridine nucleobases in the reference nucleic acid sequence. For example, 30% of nucleobases may be uridines in the reference sequence and 10% of nucleobases may be uridines in the sequence optimized nucleic acid.

[2439] In other embodiments, the sequence optimization process comprises reducing the local uridine content in specific regions of a reference nucleic acid sequence, i.e., reducing the percentage of uridine nucleobases in a subsequence of the sequence optimized nucleic acid with respect to the percentage of uridine nucleobases in the corresponding subsequence of the reference nucleic acid sequence. For example, the reference nucleic acid sequence may have a 5′-end region (e.g., 30 codons) with a local uridine content of 30%, and the uridine content in that same region could be reduced to 10% in the sequence optimized nucleic acid.

[2440] In specific embodiments, codons can be replaced in the reference nucleic acid sequence to reduce or modify, for example, the number, size, location, or distribution of uridine clusters that could have deleterious effects on protein translation. Although as a general rule it is desirable to reduce the uridine content of the reference nucleic acid sequence, in certain embodiments the uridine content, and in particular the local uridine content, of some subsequences of the reference nucleic acid sequence can be increased.

[2441] The reduction of uridine content to avoid adverse effects on translation can be done in combination with other optimization methods disclosed here to achieve other design goals. For example, uridine content optimization can be combined with ramp design, since using the rarest codons for most amino acids will, with a few exceptions, reduce the U content.

[2442] In some embodiments, the uridine-modified sequence is designed to induce a lower Toll-Like Receptor (TLR) response when compared to the reference nucleic acid sequence. Several TLRs recognize and respond to nucleic acids. Double-stranded (ds)RNA, a frequent viral constituent, has been shown to activate TLR3. See Alexopoulou et al. (2001) Nature, 413:732-738 and Wang et al. (2004) Nat. Med., 10:1366-1373. Single-stranded (ss)RNA activates TLR7. See Diebold et al. (2004) Science 303:1529-1531. RNA oligonucleotides, for example RNA with phosphorothioate internucleotide linkages, are ligands of human TLR8. See Heil et al. (2004) Science 303:1526-1529. DNA containing unmethylated CpG motifs, characteristic of bacterial and viral DNA, activate TLR9. See Hemmi et al. (2000) Nature, 408: 740-745.

[2443] As used herein, the term “TLR response” is defined as the recognition of single-stranded RNA by a TLR7 receptor, and in some embodiments encompasses the degradation of the RNA and/or physiological responses caused by the recognition of the single-stranded RNA by the receptor. Methods to determine and quantitate the binding of an RNA to a TLR7 are known in the art. Similarly, methods to determine whether an RNA has triggered a TLR7-mediated physiological response (e.g., cytokine secretion) are well known in the art. In some embodiments, a TLR response can be mediated by TLR3, TLR8, or TLR9 instead of TLR7.

[2444] Suppression of TLR7-mediated response can be accomplished via nucleoside modification. RNA undergoes over hundred different nucleoside modifications in nature (see the RNA Modification Database, available at mods.ma.albany.edu). Human rRNA, for example, has ten times more pseudouridine (ψ) and 25 times more 2′-O-methylated nucleosides than bacterial rRNA. Bacterial mRNA contains no nucleoside modifications, whereas mammalian mRNAs have modified nucleosides such as 5-methylcytidine (m5C), N6-methyladenosine (m6A), inosine and many 2′-O-methylated nucleosides in addition to N7-methylguanosine (m7G).

[2445] Uracil and ribose, the two defining features of RNA, are both necessary and sufficient for TLR7 stimulation, and short single-stranded RNA (ssRNA) act as TLR7 agonists in a sequence-independent manner as long as they contain several uridines in close proximity. See Diebold et al. (2006) Eur. J. Immunol. 36:3256-3267, which is herein incorporated by reference in its entirety. Accordingly, one or more of the optimization methods disclosed herein comprises reducing the uridine content (locally and/or locally) and/or reducing or modifying uridine clustering to reduce or to suppress a TLR7-mediated response.

[2446] In some embodiments, the TLR response (e.g., a response mediated by TLR7) caused by the uridine-modified sequence is at least about 10%, at least about 15%, at least about 20%, at least about 25%, at least about 30%, at least about 35%, at least about 40%, at least about 45%, at least about 50%, at least about 55%, at least about 60%, at least about 65%, at least about 70%, at least about 75%, at least about 80%, at least about 85%, at least about 90%, at least about 95%, or at least about 100% lower than the TLR response caused by the reference nucleic acid sequence.

[2447] In some embodiments, the TLR response caused by the reference nucleic acid sequence is at least about 1-fold, at least about 1.1-fold, at least about 1.2-fold, at least about 1.3-fold, at least about 1.4-fold, at least about 1.5-fold, at least about 1.6-fold, at least about 1.7-fold, at least about 1.8-fold, at least about 1.9-fold, at least about 2-fold, at least about 3-fold, at least about 4-fold, at least about 5-fold, at least about 6-fold, at least about 7-fold, at least about 8-fold, at least about 9-fold, or at least about 10-fold higher than the TLR response caused by the uridine-modified sequence.

[2448] In some embodiments, the uridine content (average global uridine content) (absolute or relative) of the uridine-modified sequence is higher than the uridine content (absolute or relative) of the reference nucleic acid sequence. Accordingly, in some embodiments, the uridine-modified sequence contains at least about 5%, at least about 10%, at least about 15%, at least about 20%, at least about 25%, at least about 30%, at least about 35%, at least about 40%, at least about 45%, at least about 50%, at least about 55%, at least about 60%, at least about 65%, at least about 70%, at least about 75%, at least about 80%, at least about 85%, at least about 90%, at least about 95%, or at least about 100% more uridine that the reference nucleic acid sequence.

[2449] In other embodiments, the uridine content (average global uridine content) (absolute or relative) of the uridine-modified sequence is lower than the uridine content (absolute or relative) of the reference nucleic acid sequence. Accordingly, in some embodiments, the uridine-modified sequence contains at least about 5%, at least about 10%, at least about 15%, at least about 20%, at least about 25%, at least about 30%, at least about 35%, at least about 40%, at least about 45%, at least about 50%, at least about 55%, at least about 60%, at least about 65%, at least about 70%, at least about 75%, at least about 80%, at least about 85%, at least about 90%, at least about 95%, or at least about 100% less uridine that the reference nucleic acid sequence.

[2450] In some embodiments, the uridine content (average global uridine content) (absolute or relative) of the uridine-modified sequence is less than 50%, 49%, 48%, 47%, 46%, 45%, 44%, 43%, 42%, 41%, 40%, 39%, 38%, 37%, 36%, 35%, 34%, 33%, 32%, 31%, 30%, 29%, 28%, 27%, 26%, 25%, 24%, 23%, 22%, 21%, 20%, 19%, 18%, 17%, 1⁶%, 15%, 4%1, 3%1, 12%, 11%, 10%, 9%, 8%, 7%, 6%5, 5% 4%, 3%, 2% or 1% of the total nucleobases in the uridine-modified sequence. In some embodiments, the uridine content of the uridine-modified sequence is between about 10% and about 20%. In some particular embodiments, the uridine content of the uridine-modified sequence is between about 12% and about 16%.

[2451] In some embodiments, the uridine content of the reference nucleic acid sequence can be measured using a sliding window. In some embodiments, the length of the sliding window is 5, 6, 7, 8, 9, 10, 11, 12, 13, 14, 15, 16, 17, 18, 19, 20, 21, 22, 23, 24, 25, 26, 27, 28, 29, 30, 31, 32, 33, 34, 35, 36, 37, 38, 39, or 40 nucleobases. In some embodiments, the sliding window is over 40 nucleobases in length. In some embodiments, the sliding window is 20 nucleobases in length. Based on the uridine content measured with a sliding window, it is possible to generate a histogram representing the uridine content throughout the length of the reference nucleic acid sequence and sequence optimized nucleic acids.

[2452] In some embodiments, a reference nucleic acid sequence can be modified to reduce or eliminate peaks in the histogram that are above or below a certain percentage value. In some embodiments, the reference nucleic acid sequence can be modified to eliminate peaks in the sliding-window representation which are above 65%, 60%, 55%, 50%, 45%, 40%, 35%, or 30% uridine. In another embodiment, the reference nucleic acid sequence can be modified so no peaks are over 30% uridine in the sequence optimized nucleic acid, as measured using a 20 nucleobase sliding window. In some embodiments, the reference nucleic acid sequence can be modified so no more or no less than a predetermined number of peaks in the sequence optimized nucleic sequence, as measured using a 20 nucleobase sliding window, are above or below a certain threshold value. For example, in some embodiments, the reference nucleic acid sequence can be modified so no peaks or no more than 1, 2, 3, 4, 5, 6, 7, 8, 9 or 10 peaks in the sequence optimized nucleic acid are above 10%, 15%, 20%, 25% or 30% uridine. In another embodiment, the sequence optimized nucleic acid contains between 0 peaks and 2 peaks with uridine contents 30% of higher.

[2453] In some embodiments, a reference nucleic acid sequence can be sequence optimized to reduce the incidence of consecutive uridines. For example, two consecutive leucines could be encoded by the sequence CUUUUG, which would include a four uridine cluster. Such subsequence could be substituted with CUGCUC, which would effectively remove the uridine cluster. Accordingly, a reference nucleic sequence can be sequence optimized by reducing or eliminating uridine pairs (UU), uridine triplets (UUU) or uridine quadruplets (UUUU). Higher order combinations of U are not considered combinations of lower order combinations. Thus, for example, UUUU is strictly considered a quadruplet, not two consecutive U pairs; or UUUUUU is considered a sextuplet, not three consecutive U pairs, or two consecutive U triplets, etc.

[2454] In some embodiments, all uridine pairs (UU) and/or uridine triplets (UUU) and/or uridine quadruplets (UUUU) can be removed from the reference nucleic acid sequence. In other embodiments, uridine pairs (UU) and/or uridine triplets (UUU) and/or uridine quadruplets (UUUU) can be reduced below a certain threshold, e.g., no more than 1, 2, 3, 4, 5, 6, 7, 8, 9, 10, 11, 12, 13, 14, 15, 16, 17, 18, 19, or 20 occurrences in the sequence optimized nucleic acid. In a particular embodiment, the sequence optimized nucleic acid contains less than 20, 19, 18, 17, 16, 15, 14, 13, 12, 11, 10, 9, 8, 7, 6, 5, 4, 3, 2, or 1 uridine pairs. In another particular embodiment, the sequence optimized nucleic acid contains no uridine pairs and/or triplets.

[2455] Phenylalanine codons, i.e., UUC or UUU, comprise a uridine pair or triples and therefore sequence optimization to reduce uridine content can at most reduce the phenylalanine U triplet to a phenylalanine U pair. In some embodiments, the occurrence of uridine pairs (UU) and/or uridine triplets (UUU) refers only to non-phenylalanine U pairs or triplets. Accordingly, in some embodiments, non-phenylalanine uridine pairs (UU) and/or uridine triplets (UUU) can be reduced below a certain threshold, e.g., no more than 1, 2, 3, 4, 5, 6, 7, 8, 9, 10, 11, 12, 13, 14, 15, 16, 17, 18, 19, or 20 occurrences in the sequence optimized nucleic acid. In a particular embodiment, the sequence optimized nucleic acid contains less than 20, 19, 18, 17, 16, 15, 14, 13, 12, 11, 10, 9, 8, 7, 6, 5, 4, 3, 2, or 1 non-phenylalanine uridine pairs and/or triplets. In another particular embodiment, the sequence optimized nucleic acid contains no non-phenylalanine uridine pairs and/or triplets.

[2456] In some embodiments, the reduction in uridine combinations (e.g., pairs, triplets, quadruplets) in the sequence optimized nucleic acid can be expressed as a percentage reduction with respect to the uridine combinations present in the reference nucleic acid sequence.

[2457] In some embodiments, a sequence optimized nucleic acid can contain about 1%, 2%, 3%, 4%, 5%, 6%, 7%, 8%, 9%, 10%, 11%, 12%, 13%, 14%, 15, 1⁶%, 17%, 18%, 19%, 20%, 25%, 30%, 35%, 40%, 45%, 50%, 55%, 60%, or 65% of the total number of uridine pairs present in the reference nucleic acid sequence. In some embodiments, a sequence optimized nucleic acid can contain about 1%, 2%, 3%, 4%, 5%, 6%, 7%, 8%, 9%, 10%, 11%, 12%, 13%, 14%, 15%, 16%, 17%, 18%, 19%, 20%, 25%, 30%, 35%, 40%, 45%, 50%, 55%, 60%, or 65% of the total number of uridine triplets present in the reference nucleic acid sequence. In some embodiments, a sequence optimized nucleic acid can contain about 1%, 2%, 3%, 4%, 5%, 6%, 7%, 8%, 9%, 10%, 11%, 12%, 13%, 14%, 15%, 16%, 17%, 18%, 19%, 20%, 25%, 30%, 35%, 40%, 45%, 50%, 55%, 60%, or 65% of the total number of uridine quadruplets present in the reference nucleic acid sequence.

[2458] In some embodiments, a sequence optimized nucleic acid can contain about 1%, 2%, 3%, 4%, 5%, 6%, 7%, 8%, 9%, 10%, 11%, 12%, 13%, 14%, 15%, 16%, 17%, 18%, 19%, 20%, 25%, 30%, 35%, 40%, 45%, 50%, 55%, 60%, or 65% of the total number of non-phenylalanine uridine pairs present in the reference nucleic acid sequence. In some embodiments, a sequence optimized nucleic acid can contain about 1%, 2%, 3%, 4%, 5%, 6%, 7%, 8%, 9%, 10%, 11%, 12%, 13%, 14%, 15%, 16%, 17%, 18%, 19%, 20%, 25%, 30%, 35%, 40%, 45%, 50%, 55%, 60%, or 65% of the total number of non-phenylalanine uridine triplets present in the reference nucleic acid sequence.

[2459] In some embodiments, the uridine content in the sequence optimized sequence can be expressed with respect to the theoretical minimum uridine content in the sequence. The term “theoretical minimum uridine content” is defined as the uridine content of a nucleic acid sequence as a percentage of the sequence's length after all the codons in the sequence have been replaced with synonymous codon with the lowest uridine content. In some embodiments, the uridine content of the sequence optimized nucleic acid is identical to the theoretical minimum uridine content of the reference sequence (e.g., a wild type sequence). In some aspects, the uridine content of the sequence optimized nucleic acid is about 90%, about 95%, about 100%, about 105%, about 110%, about 115%, about 120%, about 125%, about 130%, about 135%, about 140%, about 145%, about 150%, about 155%, about 160%, about 165%, about 170%, about 175%, about 180%, about 185%, about 190%, about 195% or about 200% of the theoretical minimum uridine content of the reference sequence (e.g., a wild type sequence).

[2460] In some embodiments, the uridine content of the sequence optimized nucleic acid is identical to the theoretical minimum uridine content of the reference sequence (e.g., a wild type sequence).

[2461] The reference nucleic acid sequence (e.g., a wild type sequence) can comprise uridine clusters which due to their number, size, location, distribution or combinations thereof have negative effects on translation. As used herein, the term “uridine cluster” refers to a subsequence in a reference nucleic acid sequence or sequence optimized nucleic sequence with contains a uridine content (usually described as a percentage) which is above a certain threshold. Thus, in certain embodiments, if a subsequence comprises more than about 10%, 15%, 20%, 25%, 30%, 35%, 40%, 45%, 50%, 55%, 60% or 65% uridine content, such subsequence would be considered a uridine cluster.

[2462] The negative effects of uridine clusters can be, for example, eliciting a TLR7 response. Thus, in some implementations of the nucleic acid sequence optimization methods disclosed herein it is desirable to reduce the number of clusters, size of clusters, location of clusters (e.g., close to the 5′ and/or 3′ end of a nucleic acid sequence), distance between clusters, or distribution of uridine clusters (e.g., a certain pattern of cluster along a nucleic acid sequence, distribution of clusters with respect to secondary structure elements in the expressed product, or distribution of clusters with respect to the secondary structure of an mRNA).

[2463] In some embodiments, the reference nucleic acid sequence comprises at least one uridine cluster, wherein said uridine cluster is a subsequence of the reference nucleic acid sequence wherein the percentage of total uridine nucleobases in said subsequence is above a predetermined threshold. In some embodiments, the length of the subsequence is at least about 10, at least about 15, at least about 20, at least about 25, at least about 30, at least about 35, at least about 40, at least about 45, at least about 50, at least about 55, at least about 60, at least about 65, at least about 70, at least about 75, at least about 80, at least about 85, at least about 90, at least about 95, or at least about 100 nucleobases. In some embodiments, the subsequence is longer than 100 nucleobases. In some embodiments, the threshold is 1%, 2%, 3%, 4%, 5%, 6%, 7%, 8%, 9%, 10%, 11%, 12%, 13%, 14%, 15%, 16%, 17%, 18%, 19%, 20%, 21%, 22%, 23%, 24% or 25% uridine content. In some embodiments, the threshold is above 25%.

[2464] For example, an amino acid sequence comprising A, D, G, S and R could be encoded by the nucleic acid sequence GCU, GAU, GGU, AGU, CGU. Although such sequence does not contain any uridine pairs, triplets, or quadruplets, one third of the nucleobases would be uridines. Such a uridine cluster could be removed by using alternative codons, for example, by using GCC, GAC, GGC, AGC, and CGC, which would contain no uridines.

[2465] In other embodiments, the reference nucleic acid sequence comprises at least one uridine cluster, wherein said uridine cluster is a subsequence of the reference nucleic acid sequence wherein the percentage of uridine nucleobases of said subsequence as measured using a sliding window that is above a predetermined threshold. In some embodiments, the length of the sliding window is 5, 6, 7, 8, 9, 10, 11, 12, 13, 14, 15, 16, 17, 18, 19, 20, 21, 22, 23, 24, 25, 26, 27, 28, 29, 30, 31, 32, 33, 34, 35, 36, 37, 38, 39, or 40 nucleobases. In some embodiments, the sliding window is over 40 nucleobases in length. In some embodiments, the threshold is 1%, 2%, 3%, 4%, 5%, 6%, 7%, 8%, 9%, 10%, 11%, 12%, 13%, 14%, 15%, 6%1, 7%1, 8%1, 19%, 20 , 21%, 22%, 23%, 24% or 25% uridine content. In some embodiments, the threshold is above 25%.

[2466] In some embodiments, the reference nucleic acid sequence comprises at least two uridine clusters. In some embodiments, the uridine-modified sequence contains fewer uridine-rich clusters than the reference nucleic acid sequence. In some embodiments, the uridine-modified sequence contains more uridine-rich clusters than the reference nucleic acid sequence. In some embodiments, the uridine-modified sequence contains uridine-rich clusters with are shorter in length than corresponding uridine-rich clusters in the reference nucleic acid sequence. In other embodiments, the uridine-modified sequence contains uridine-rich clusters which are longer in length than the corresponding uridine-rich cluster in the reference nucleic acid sequence.

[2467] See, Kariko et al. (2005) Immunity 23:165-175; Kormann et al. (2010) Nature Biotechnology 29:154-157; or Sahin et al. (2014) Nature Reviews Drug Discovery 13:759-780; all of which are herein incorporated by reference their entireties.

b. Guanine/Cytosine (G/C) Content

[2468] A reference nucleic acid sequence can be sequence optimized using methods comprising altering the Guanine/Cytosine (G/C) content (absolute or relative) of the reference nucleic acid sequence. Such optimization can comprise altering (e.g., increasing or decreasing) the global G/C content (absolute or relative) of the reference nucleic acid sequence; introducing local changes in G/C content in the reference nucleic acid sequence (e.g., increase or decrease G/C in selected regions or subsequences in the reference nucleic acid sequence); altering the frequency, size, and distribution of G/C clusters in the reference nucleic acid sequence, or combinations thereof.

[2469] In some embodiments, the sequence optimized nucleic acid encoding an immune response primer, an immune response co-stimulatory signal, or a checkpoint inhibitor polypeptide comprises an overall increase in G/C content (absolute or relative) relative to the G/C content (absolute or relative) of the reference nucleic acid sequence. In some embodiments, the overall increase in G/C content (absolute or relative) is at least about 5%, at least about 10%, at least about 15%, at least about 20%, at least about 25%, at least about 30%, at least about 35%, at least about 40%, at least about 45%, at least about 50%, at least about 55%, at least about 60%, at least about 65%, at least about 70%, at least about 75%, at least about 80%, at least about 85%, at least about 90%, at least about 95%, or at least about 100% relative to the G/C content (absolute or relative) of the reference nucleic acid sequence.

[2470] In some embodiments, the sequence optimized nucleic acid encoding an immune response primer, an immune response co-stimulatory signal, or a checkpoint inhibitor polypeptide comprises an overall decrease in G/C content (absolute or relative) relative to the G/C content of the reference nucleic acid sequence. In some embodiments, the overall decrease in G/C content (absolute or relative) is at least about 5%, at least about 10%, at least about 15%, at least about 20%, at least about 25%, at least about 30%, at least about 35%, at least about 40%, at least about 45%, at least about 50%, at least about 55%, at least about 60%, at least about 65%, at least about 70%, at least about 75%, at least about 80%, at least about 85%, at least about 90%, at least about 95%, or at least about 100% relative to the G/C content (absolute or relative) of the reference nucleic acid sequence.

[2471] In some embodiments, the sequence optimized nucleic acid encoding an immune response primer, an immune response co-stimulatory signal, or a checkpoint inhibitor polypeptide comprises a local increase in Guanine/Cytosine (G/C) content (absolute or relative) in a subsequence (i.e., a G/C modified subsequence) relative to the G/C content (absolute or relative) of the corresponding subsequence in the reference nucleic acid sequence. In some embodiments, the local increase in G/C content (absolute or relative) is by at least about 5%, at least about 10%, at least about 15%, at least about 20%, at least about 25%, at least about 30%, at least about 35%, at least about 40%, at least about 45%, at least about 50%, at least about 55%, at least about 60%, at least about 65%, at least about 70%, at least about 75%, at least about 80%, at least about 85%, at least about 90%, at least about 95%, or at least about 100% relative to the G/C content (absolute or relative) of the corresponding subsequence in the reference nucleic acid sequence.

[2472] In some embodiments, the sequence optimized nucleic acid encoding an immune response primer, an immune response co-stimulatory signal, or a checkpoint inhibitor polypeptide comprises a local decrease in Guanine/Cytosine (G/C) content (absolute or relative) in a subsequence (i.e., a G/C modified subsequence) relative to the G/C content (absolute or relative) of the corresponding subsequence in the reference nucleic acid sequence. In some embodiments, the local decrease in G/C content (absolute or relative) is by at least about 5%, at least about 10%, at least about 15%, at least about 20%, at least about 25%, at least about 30%, at least about 35%, at least about 40%, at least about 45%, at least about 50%, at least about 55%, at least about 60%, at least about 65%, at least about 70%, at least about 75%, at least about 80%, at least about 85%, at least about 90%, at least about 95%, or at least about 100% relative to the G/C content (absolute or relative) of the corresponding subsequence in the reference nucleic acid sequence.

[2473] In some embodiments, the G/C content (absolute or relative) is increased or decreased in a subsequence which is at least about 5, 10, 15, 20, 25, 30, 35, 40, 45, 50, 55, 60, 65, 70, 75, 80, 85, 90, 95, or 100 nucleobases in length.

[2474] In some embodiments, the G/C content (absolute or relative) is increased or decreased in a subsequence which is at least about 100, 110, 120, 130, 140, 150, 160, 170, 180, 190, 200, 210, 220, 230, 240, 250, 260, 270, 280, 290, 300, 310, 320, 330, 340, 350, 360, 370, 380, 390, 400, 410, 420, 430, 440, 450, 460, 470, 480, 490, 500, 510, 520, 530, 540, 550, 560, 570, 580, 590, 600, 610, 620, 630, 640, 650, 660, 670, 680, 690, 700, 710, 720, 730, 740, 750, 760, 770, 780, 790, 800, 810, 820, 830, 840, 850, 860, 870, 880, 890, 900, 910, 920, 930, 940, 950, 960, 970, 980, 990, or 1000 nucleobases in length.

[2475] In some embodiments, the G/C content (absolute or relative) is increased or decreased in a subsequence which is at least about 1100, 1200, 1300, 1400, 1500, 1600, 1700, 1800, 1900, 2000, 2100, 2200, 2300, 2400, 2500, 2600, 2700, 2800, 2900, 3000, 3100, 3200, 3300, 3400, 3500, 3600, 3700, 3800, 3900, 4000, 4100, 4200, 4300, 4400, 4500, 4600, 4700, 4800, 4900, 5000, 5100, 5200, 5300, 5400, 5500, 5600, 5700, 5800, 5900, 6000, 6100, 6200, 6300, 6400, 6500, 6600, 6700, 6800, 6900, 7000, 7100, 7200, 7300, 7400, 7500, 7600, 7700, 7800, 7900, 8000, 8100, 8200, 8300, 8400, 8500, 8600, 8700, 8800, 8900, 9000, 9100, 9200, 9300, 9400, 9500, 9600, 9700, 9800, 9900, or 10000 nucleobases in length.

[2476] The increases or decreases in G and C content (absolute or relative) described herein can be conducted by replacing synonymous codons with low G/C content with synonymous codons having higher G/C content, or vice versa. For example, L has 6 synonymous codons: two of them have 2 G/C (CUC, CUG), 3 have a single G/C (UUG, CUU, CUA), and one has no G/C (UUA). So if the reference nucleic acid had a CUC codon in a certain position, G/C content at that position could be reduced by replacing CUC with any of the codons having a single G/C or the codon with no G/C.

[2477] See, U.S. Publ. Nos. US20140228558, US20050032730 A1; Gustafsson et al. (2012) Protein Expression and Purification 83: 37-46; all of which are incorporated herein by reference in their entireties.

c. Codon Frequency—Codon Usage Bias

[2478] Numerous codon optimization methods known in the art are based on the substitution of codons in a reference nucleic acid sequence with codons having higher frequencies. Thus, in some embodiments, a nucleic acid sequence encoding an immune response primer, an immune response co-stimulatory signal, or a checkpoint inhibitor polypeptide disclosed herein can be sequence optimized using methods comprising the use of modifications in the frequency of use of one or more codons relative to other synonymous codons in the sequence optimized nucleic acid with respect to the frequency of use in the non-codon optimized sequence.

[2479] As used herein, the term “codon frequency” refers to codon usage bias, i.e., the differences in the frequency of occurrence of synonymous codons in coding DNA/RNA. It is generally acknowledged that codon preferences reflect a balance between mutational biases and natural selection for translational optimization. Optimal codons help to achieve faster translation rates and high accuracy. As a result of these factors, translational selection is expected to be stronger in highly expressed genes. In the field of bioinformatics and computational biology, many statistical methods have been proposed and used to analyze codon usage bias. See, e.g., Comeron & Aguade (1998) J. Mol. Evol. 47: 268-74.

[2480] Methods such as the ‘frequency of optimal codons’ (Fop) (Ikemura (1981) J. Mol. Biol. 151 (3): 389-409), the Relative Codon Adaptation (RCA) (Fox & Eril (2010) DNA Res. 17 (3): 185-96) or the ‘Codon Adaptation Index’ (CAI) (Sharp & Li (1987) Nucleic Acids Res. 15 (3): 1281-95) are used to predict gene expression levels, while methods such as the ‘effective number of codons’ (Nc) and Shannon entropy from information theory are used to measure codon usage evenness. Multivariate statistical methods, such as correspondence analysis and principal component analysis, are widely used to analyze variations in codon usage among genes (Suzuki et al. (2008) DNA Res. 15 (6): 357-65; Sandhu et al., In Silico Biol. 2008;8(2):187-92).

[2481] The nucleic acid sequence encoding an immune response primer, an immune response co-stimulatory signal, or a checkpoint inhibitor polypeptide disclosed herein (e.g., a wild type nucleic acid sequence, a mutant nucleic acid sequence, a chimeric nucleic sequence, etc. which can be, for example, an mRNA), can be codon optimized using methods comprising substituting at least one codon in the reference nucleic acid sequence with an alternative codon having a higher or lower codon frequency in the synonymous codon set; wherein the resulting sequence optimized nucleic acid has at least one optimized property with respect to the reference nucleic acid sequence.

[2482] In some embodiments, at least about 5%, at least about 10%, at least about 15%, at least about 20%, at least about 25%, at least about 30%, at least about 35%, at least about 40%, at least about 45%, at least about 50%, at least about 55%, at least about 60%, at least about 65%, at least about 70%, at least about 75%, at least about 80%, at least about 85%, at least about 90%, at least about 95%, at least about 99%, or 100% of the codons in the reference nucleic acid sequence encoding an immune response primer, an immune response co-stimulatory signal, or a checkpoint inhibitor polypeptide are substituted with alternative codons, each alternative codon having a codon frequency higher than the codon frequency of the substituted codon in the synonymous codon set.

[2483] In some embodiments, at least one codon in the reference nucleic acid sequence encoding an immune response primer, an immune response co-stimulatory signal, or a checkpoint inhibitor polypeptide is substituted with an alternative codon having a codon frequency higher than the codon frequency of the substituted codon in the synonymous codon set, and at least one codon in the reference nucleic acid sequence is substituted with an alternative codon having a codon frequency lower than the codon frequency of the substituted codon in the synonymous codon set.

[2484] In some embodiments, at least about 5%, at least about 10%, at least about 15%, at least about 20%, at least about 25%, at least about 30%, at least about 35%, at least about 40%, at least about 45%, at least about 50%, at least about 55%, at least about 60%, at least about 65%, at least about 70%, or at least about 75% of the codons in the reference nucleic acid sequence encoding an immune response primer, an immune response co-stimulatory signal, or a checkpoint inhibitor polypeptide are substituted with alternative codons, each alternative codon having a codon frequency higher than the codon frequency of the substituted codon in the synonymous codon set.

[2485] In some embodiments, at least one alternative codon having a higher codon frequency has the highest codon frequency in the synonymous codon set. In other embodiments, all alternative codons having a higher codon frequency have the highest codon frequency in the synonymous codon set.

[2486] In some embodiments, at least one alternative codon having a lower codon frequency has the lowest codon frequency in the synonymous codon set. In some embodiments, all alternative codons having a higher codon frequency have the highest codon frequency in the synonymous codon set.

[2487] In some specific embodiments, at least one alternative codon has the second highest, the third highest, the fourth highest, the fifth highest or the sixth highest frequency in the synonymous codon set. In some specific embodiments, at least one alternative codon has the second lowest, the third lowest, the fourth lowest, the fifth lowest, or the sixth lowest frequency in the synonymous codon set.

[2488] Optimization based on codon frequency can be applied globally, as described above, or locally to the reference nucleic acid sequence encoding an immune response primer, an immune response co-stimulatory signal, or a checkpoint inhibitor polypeptide. In some embodiments, when applied locally, regions of the reference nucleic acid sequence can modified based on codon frequency, substituting all or a certain percentage of codons in a certain subsequence with codons that have higher or lower frequencies in their respective synonymous codon sets. Thus, in some embodiments, at least about 5%, at least about 10%, at least about 15%, at least about 20%, at least about 25%, at least about 30%, at least about 35%, at least about 40%, at least about 45%, at least about 50%, at least about 55%, at least about 60%, at least about 65%, at least about 70%, at least about 75%, at least about 80%, at least about 85%, at least about 90%, at least about 95%, at least about 99%, or 100% of the codons in a subsequence of the reference nucleic acid sequence are substituted with alternative codons, each alternative codon having a codon frequency higher than the codon frequency of the substituted codon in the synonymous codon set.

[2489] In some embodiments, at least one codon in a subsequence of the reference nucleic acid sequence encoding an immune response primer, an immune response co-stimulatory signal, or a checkpoint inhibitor polypeptide is substituted with an alternative codon having a codon frequency higher than the codon frequency of the substituted codon in the synonymous codon set, and at least one codon in a subsequence of the reference nucleic acid sequence is substituted with an alternative codon having a codon frequency lower than the codon frequency of the substituted codon in the synonymous codon set.

[2490] In some embodiments, at least about 5%, at least about 10%, at least about 15%, at least about 20%, at least about 25%, at least about 30%, at least about 35%, at least about 40%, at least about 45%, at least about 50%, at least about 55%, at least about 60%, at least about 65%, at least about 70%, or at least about 75% of the codons in a subsequence of the reference nucleic acid sequence encoding an immune response primer, an immune response co-stimulatory signal, or a checkpoint inhibitor polypeptide are substituted with alternative codons, each alternative codon having a codon frequency higher than the codon frequency of the substituted codon in the synonymous codon set.

[2491] In some embodiments, at least one alternative codon substituted in a subsequence of the reference nucleic acid sequence encoding an immune response primer, an immune response co-stimulatory signal, or a checkpoint inhibitor polypeptide and having a higher codon frequency has the highest codon frequency in the synonymous codon set. In other embodiments, all alternative codons substituted in a subsequence of the reference nucleic acid sequence and having a lower codon frequency have the lowest codon frequency in the synonymous codon set.

[2492] In some embodiments, at least one alternative codon substituted in a subsequence of the reference nucleic acid sequence encoding an immune response primer, an immune response co-stimulatory signal, or a checkpoint inhibitor polypeptide and having a lower codon frequency has the lowest codon frequency in the synonymous codon set. In some embodiments, all alternative codons substituted in a subsequence of the reference nucleic acid sequence and having a higher codon frequency have the highest codon frequency in the synonymous codon set.

[2493] In specific embodiments, a sequence optimized nucleic acid encoding an immune response primer, an immune response co-stimulatory signal, or a checkpoint inhibitor polypeptide can comprise a subsequence having an overall codon frequency higher or lower than the overall codon frequency in the corresponding subsequence of the reference nucleic acid sequence at a specific location, for example, at the 5′ end or 3′ end of the sequence optimized nucleic acid, or within a predetermined distance from those region (e.g., at least 1, 2, 3, 4, 5, 6, 7, 8, 9, 10, 15, 20, 25, 30, 35, 40, 45, 50, 55, 60, 65, 70, 75, 80, 85, 90, 95 or 100 codons from the 5′ end or 3′ end of the sequence optimized nucleic acid).

[2494] In some embodiments, an sequence optimized nucleic acid encoding an immune response primer, an immune response co-stimulatory signal, or a checkpoint inhibitor polypeptide can comprise more than one subsequence having an overall codon frequency higher or lower than the overall codon frequency in the corresponding subsequence of the reference nucleic acid sequence. A skilled artisan would understand that subsequences with overall higher or lower overall codon frequencies can be organized in innumerable patterns, depending on whether the overall codon frequency is higher or lower, the length of the subsequence, the distance between subsequences, the location of the subsequences, etc.

[2495] See, U.S. Pat. Nos. U.S. Pat. Nos. 5,082,767, 8,126,653, 7,561,973, 8,401,798; U.S. Publ. No. US 20080046192, US 20080076161; Int'l. Publ. No. WO2000018778; Welch et al. (2009) PLoS ONE 4(9): e7002; Gustafsson et al. (2012) Protein Expression and Purification 83: 37-46; Chung et al. (2012) BMC Systems Biology 6:134; all of which are incorporated herein by reference in their entireties.

d. Destabilizing Motif Substitution

[2496] There is a variety of motifs that can affect sequence optimization, which fall into various non-exclusive categories, for example:
[2497] (i) Primary sequence based motifs: Motifs defined by a simple arrangement of nucleotides.
[2498] (ii) Structural motifs: Motifs encoded by an arrangement of nucleotides that tends to form a certain secondary structure.
[2499] (iii) Local motifs: Motifs encoded in one contiguous subsequence.
[2500] (iv) Distributed motifs: Motifs encoded in two or more disjoint subsequences.
[2501] (v) Advantageous motifs: Motifs which improve nucleotide structure or function.
[2502] (vi) Disadvantageous motifs: Motifs with detrimental effects on nucleotide structure or function.

[2503] There are many motifs that fit into the category of disadvantageous motifs. Some examples include, for example, restriction enzyme motifs, which tend to be relatively short, exact sequences such as the restriction site motifs for Xbal (TCTAGA), EcoRI (GAATTC), EcoRII(CCWGG, wherein W means A or T, per the IUPAC ambiguity codes), or HindIII (AAGCTT); enzyme sites, which tend to be longer and based on consensus not exact sequence, such in the T7 RNA polymerase (GnnnnWnCRnCTCnCnnWnD, wherein n means any nucleotide, R means A or G, W means A or T, D means A or G or T but not C); structural motifs, such as GGGG repeats (Kim et al. (1991) Nature 351(6324):331-2); or other motifs such as CUG-triplet repeats (Querido et al. (2014) J. Cell Sci. 124:1703-1714).

[2504] Accordingly, the nucleic acid sequence encoding an immune response primer, an immune response co-stimulatory signal, or a checkpoint inhibitor polypeptide e disclosed herein can be sequence optimized using methods comprising substituting at least one destabilizing motif in a reference nucleic acid sequence, and removing such disadvantageous motif or replacing it with an advantageous motif.

[2505] In some embodiments, the optimization process comprises identifying advantageous and/or disadvantageous motifs in the reference nucleic sequence, wherein such motifs are, e.g., specific subsequences that can cause a loss of stability in the reference nucleic acid sequence prior or during the optimization process. For example, substitution of specific bases during optimization may generate a subsequence (motif) recognized by a restriction enzyme. Accordingly, during the optimization process the appearance of disadvantageous motifs can be monitored by comparing the sequence optimized sequence with a library of motifs known to be disadvantageous. Then, the identification of disadvantageous motifs could be used as a post-hoc filter, i.e., to determine whether a certain modification which potentially could be introduced in the reference nucleic acid sequence should be actually implemented or not.

[2506] In some embodiments, the identification of disadvantageous motifs can be used prior to the application of the sequence optimization methods disclosed herein, i.e., the identification of motifs in the reference nucleic acid sequence encoding an immune response primer, an immune response co-stimulatory signal, or a checkpoint inhibitor polypeptide and their replacement with alternative nucleic acid sequences can be used as a preprocessing step, for example, before uridine reduction.

[2507] In other embodiments, the identification of disadvantageous motifs and their removal is used as an additional sequence optimization technique integrated in a multiparametric nucleic acid optimization method comprising two or more of the sequence optimization methods disclosed herein. When used in this fashion, a disadvantageous motif identified during the optimization process would be removed, for example, by substituting the lowest possible number of nucleobases in order to preserve as closely as possible the original design principle(s) (e.g., low U, high frequency, etc.).

[2508] See, e.g., U.S. Publ. Nos. US20140228558, US20050032730, or US20140228558, which are herein incorporated by reference in their entireties.

e. Limited Codon Set Optimization

[2509] In some particular embodiments, sequence optimization of a reference nucleic acid sequence encoding an immune response primer, an immune response co-stimulatory signal, or a checkpoint inhibitor polypeptide can be conducted using a limited codon set, e.g., a codon set wherein less than the native number of codons is used to encode the 20 natural amino acids, a subset of the 20 natural amino acids, or an expanded set of amino acids including, for example, non-natural amino acids.

[2510] The genetic code is highly similar among all organisms and can be expressed in a simple table with 64 entries which would encode the 20 standard amino acids involved in protein translation plus start and stop codons. The genetic code is degenerate, i.e., in general, more than one codon specifies each amino acid. For example, the amino acid leucine is specified by the UUA, UUG, CUU, CUC, CUA, or CUG codons, while the amino acid serine is specified by UCA, UCG, UCC, UCU, AGU, or AGC codons (difference in the first, second, or third position). Native genetic codes comprise 62 codons encoding naturally occurring amino acids. Thus, in some embodiments of the methods disclosed herein optimized codon sets (genetic codes) comprising less than 62 codons to encode 20 amino acids can comprise 61, 60, 59, 58, 57, 56, 55, 54, 53, 52, 51, 50, 49, 48, 47, 46, 45, 44, 43, 42, 41, 40, 39, 38, 37, 36, 35, 34, 33, 32, 31, 30, 30, 29, 28, 27, 26, 25, 24, 23, 22, 21, or 20 codons.

[2511] In some embodiments, the limited codon set comprises less than 20 codons. For example, if a protein contains less than 20 types of amino acids, such protein could be encoded by a codon set with less than 20 codons. Accordingly, in some embodiments, an optimized codon set comprises as many codons as different types of amino acids are present in the protein encoded by the reference nucleic acid sequence. In some embodiments, the optimized codon set comprises 19, 18, 17, 16, 15, 14, 13, 12, 11, 10, 9, 8, 7, 6, 5, 4, 3, 2 or even 1 codon.

[2512] In some embodiments, at least one amino acid selected from the group consisting of Ala, Arg, Asn, Asp, Cys, Gln, Glu, Gly, His, Ile, Leu, Lys, Phe, Pro, Ser, Thr, Tyr, and Val, i.e., amino acids which are naturally encoded by more than one codon, is encoded with less codons than the naturally occurring number of synonymous codons. For example, in some embodiments, Ala can be encoded in the sequence optimized nucleic acid by 3, 2 or 1 codons; Cys can be encoded in the sequence optimized nucleic acid by 1 codon; Asp can be encoded in the sequence optimized nucleic acid by 1 codon; Glu can be encoded in the sequence optimized nucleic acid by 1 codon; Phe can be encoded in the sequence optimized nucleic acid by 1 codon; Gly can be encoded in the sequence optimized nucleic acid by 3 codons, 2 codons or 1 codon; His can be encoded in the sequence optimized nucleic acid by 1 codon; Ile can be encoded in the sequence optimized nucleic acid by 2 codons or 1 codon; Lys can be encoded in the sequence optimized nucleic acid by 1 codon; Leu can be encoded in the sequence optimized nucleic acid by 5 codons, 4 codons, 3 codons, 2 codons or 1 codon; Asn can be encoded in the sequence optimized nucleic acid by 1 codon; Pro can be encoded in the sequence optimized nucleic acid by 3 codons, 2 codons, or 1 codon; Gln can be encoded in the sequence optimized nucleic acid by 1 codon; Arg can be encoded in the sequence optimized nucleic acid by 5 codons, 4 codons, 3 codons, 2 codons, or 1 codon; Ser can be encoded in the sequence optimized nucleic acid by 5 codons, 4 codons, 3 codons, 2 codons, or 1 codon; Thr can be encoded in the sequence optimized nucleic acid by 3 codons, 2 codons, or 1 codon; Val can be encoded in the sequence optimized nucleic acid by 3 codons, 2 codons, or 1 codon; and, Tyr can be encoded in the sequence optimized nucleic acid by 1 codon.

[2513] In some embodiments, at least one amino acid selected from the group consisting of Ala, Arg, Asn, Asp, Cys, Gln, Glu, Gly, His, Ile, Leu, Lys, Phe, Pro, Ser, Thr, Tyr, and Val, i.e., amino acids which are naturally encoded by more than one codon, is encoded by a single codon in the limited codon set.

[2514] In some specific embodiments, the sequence optimized nucleic acid is a DNA and the limited codon set consists of 20 codons, wherein each codon encodes one of 20 amino acids. In some embodiments, the sequence optimized nucleic acid is a DNA and the limited codon set comprises at least one codon selected from the group consisting of GCT, GCC, GCA, and GCG; at least a codon selected from the group consisting of CGT, CGC, CGA, CGG, AGA, and AGG; at least a codon selected from AAT or ACC; at least a codon selected from GAT or GAC; at least a codon selected from TGT or TGC; at least a codon selected from CAA or CAG; at least a codon selected from GAA or GAG; at least a codon selected from the group consisting of GGT, GGC, GGA, and GGG; at least a codon selected from CAT or CAC; at least a codon selected from the group consisting of ATT, ATC, and ATA; at least a codon selected from the group consisting of TTA, TTG, CTT, CTC, CTA, and CTG; at least a codon selected from AAA or AAG; an ATG codon; at least a codon selected from TTT or TTC; at least a codon selected from the group consisting of CCT, CCC, CCA, and CCG; at least a codon selected from the group consisting of TCT, TCC, TCA, TCG, AGT, and AGC; at least a codon selected from the group consisting of ACT, ACC, ACA, and ACG; a TGG codon; at least a codon selected from TAT or TAC; and, at least a codon selected from the group consisting of GTT, GTC, GTA, and GTG.

[2515] In other embodiments, the sequence optimized nucleic acid is an RNA (e.g., an mRNA) and the limited codon set consists of 20 codons, wherein each codon encodes one of 20 amino acids. In some embodiments, the sequence optimized nucleic acid is an RNA and the limited codon set comprises at least one codon selected from the group consisting of GCU, GCC, GCA, and GCG; at least a codon selected from the group consisting of CGU, CGC, CGA, CGG, AGA, and AGG; at least a codon selected from AAU or ACC; at least a codon selected from GAU or GAC; at least a codon selected from UGU or UGC; at least a codon selected from CAA or CAG; at least a codon selected from GAA or GAG; at least a codon selected from the group consisting of GGU, GGC, GGA, and GGG; at least a codon selected from CAU or CAC; at least a codon selected from the group consisting of AUU, AUC, and AUA; at least a codon selected from the group consisting of UUA, UUG, CUU, CUC, CUA, and CUG; at least a codon selected from AAA or AAG; an AUG codon; at least a codon selected from UUU or UUC; at least a codon selected from the group consisting of CCU, CCC, CCA, and CCG; at least a codon selected from the group consisting of UCU, UCC, UCA, UCG, AGU, and AGC; at least a codon selected from the group consisting of ACU, ACC, ACA, and ACG; a UGG codon; at least a codon selected from UAU or UAC; and, at least a codon selected from the group consisting of GUU, GUC, GUA, and GUG.

[2516] In some specific embodiments, the limited codon set has been optimized for in vivo expression of a sequence optimized nucleic acid (e.g., a synthetic mRNA) following administration to a certain tissue or cell.

[2517] In some embodiments, the optimized codon set (e.g., a 20 codon set encoding 20 amino acids) complies at least with one of the following properties:
[2518] (i) the optimized codon set has a higher average G/C content than the original or native codon set; or,
[2519] (ii) the optimized codon set has a lower average U content than the original or native codon set; or,
[2520] (iii) the optimized codon set is composed of codons with the highest frequency; or,
[2521] (iv) the optimized codon set is composed of codons with the lowest frequency; or,
[2522] (v) a combination thereof.

[2523] In some specific embodiments, at least one codon in the optimized codon set has the second highest, the third highest, the fourth highest, the fifth highest or the sixth highest frequency in the synonymous codon set. In some specific embodiments, at least one codon in the optimized codon has the second lowest, the third lowest, the fourth lowest, the fifth lowest, or the sixth lowest frequency in the synonymous codon set.

[2524] As used herein, the term “native codon set” refers to the codon set used natively by the source organism to encode the reference nucleic acid sequence. As used herein, the term “original codon set” refers to the codon set used to encode the reference nucleic acid sequence before the beginning of sequence optimization, or to a codon set used to encode an optimized variant of the reference nucleic acid sequence at the beginning of a new optimization iteration when sequence optimization is applied iteratively or recursively.

[2525] In some embodiments, 5%, 10%, 15%, 20%, 25%, 30%, 35%, 40%, 45%, 50%, 55%, 60%, 65%, 70%, 75%, 80%, 85%, 90%, 95% or 100% of codons in the codon set are those with the highest frequency. In other embodiments, 5%, 10%, 15%, 20%, 25%, 30%, 35%, 40%, 45%, 50%, 55%, 60%, 65%, 70%, 75%, 80%, 85%, 90%, 95% or 100% of codons in the codon set are those with the lowest frequency.

[2526] In some embodiments, 5%, 10%, 15%, 20%, 25%, 30%, 35%, 40%, 45%, 50%, 55%, 60%, 65%, 70%, 75%, 80%, 85%, 90%, 95% or 100% of codons in the codon set are those with the highest uridine content. In some embodiments, 5%, 10%, 15%, 20%, 25%, 30%, 35%, 40%, 45%, 50%, 55%, 60%, 65%, 70%, 75%, 80%, 85%, 90%, 95% or 100% of codons in the codon set are those with the lowest uridine content.

[2527] In some embodiments, the average G/C content (absolute or relative) of the codon set is 5%, 10%, 15%, 20%, 25%, 30%, 35%, 40%, 45%, 50%, 55%, 60%, 65%, 70%, 75%, 80%, 85%, 90%, 95% or 100% higher than the average G/C content (absolute or relative) of the original codon set. In some embodiments, the average G/C content (absolute or relative) of the codon set is 5%, 1, 1%, 20%, 25%, 30%, 35%, 40%, 45%, 50%, 55%, 60%, 65%, 70%, 75%, 80%, 85%, 90%, 95% or 100% lower than the average G/C content (absolute or relative) of the original codon set.

[2528] In some embodiments, the uracil content (absolute or relative) of the codon set is 5%, 10, 1%, 20%, 25%, 30%, 35%, 40%, 45%, 50%, 55%, 60%, 65%, 70%, 75%, 80%, 85%, 90%, 95% or 100% higher than the average uracil content (absolute or relative) of the original codon set. In some embodiments, the uracil content (absolute or relative) of the codon set is 5%, 10, 1%, 20%, 25%, 30%, 35%, 40%, 45%, 50%, 55%, 60%, 65%, 70%, 75%, 80%, 85%, 90%, 95% or 100% lower than the average uracil content (absolute or relative) of the original codon set.

[2529] See also U.S. Appl. Publ. No. 2011/0082055, and Int'l. Publ. No. WO2000018778, both of which are incorporated herein by reference in their entireties.

### VII. Characterization of Sequence Optimized Nucleic Acids

[2530] In some embodiments of the disclosure, the polynucleotide (e.g., a RNA, e.g., an mRNA) comprising a sequence optimized nucleic acid disclosed herein encoding an immune response primer, an immune response co-stimulatory signal, or a checkpoint inhibitor polypeptide can be can be tested to determine whether at least one nucleic acid sequence property (e.g., stability when exposed to nucleases) or expression property has been improved with respect to the non-sequence optimized nucleic acid.

[2531] As used herein, “expression property” refers to a property of a nucleic acid sequence either in vivo (e.g., translation efficacy of a synthetic mRNA after administration to a subject in need thereof) or in vitro (e.g., translation efficacy of a synthetic mRNA tested in an in vitro model system). Expression properties include but are not limited to the amount of protein produced by an mRNA encoding an immune response primer, an immune response co-stimulatory signal, or a checkpoint inhibitor polypeptide after administration, and the amount of soluble or otherwise functional protein produced. In some embodiments, sequence optimized nucleic acids disclosed herein can be evaluated according to the viability of the cells expressing a protein encoded by a sequence optimized nucleic acid sequence (e.g., a RNA, e.g., an mRNA) encoding an immune response primer, an immune response co-stimulatory signal, or a checkpoint inhibitor polypeptide disclosed herein.

[2532] In a particular embodiment, a plurality of sequence optimized nucleic acids disclosed herein (e.g., a RNA, e.g., an mRNA) containing codon substitutions with respect to the non-optimized reference nucleic acid sequence can be characterized functionally to measure a property of interest, for example an expression property in an in vitro model system, or in vivo in a target tissue or cell.

a. Optimization of Nucleic Acid Sequence Intrinsic Properties

[2533] In some embodiments of the disclosure, the desired property of the polynucleotide is an intrinsic property of the nucleic acid sequence. For example, the nucleotide sequence (e.g., a RNA, e.g., an mRNA) can be sequence optimized for in vivo or in vitro stability. In some embodiments, the nucleotide sequence can be sequence optimized for expression in a particular target tissue or cell. In some embodiments, the nucleic acid sequence is sequence optimized to increase its plasma half by preventing its degradation by endo and exonucleases.

[2534] In other embodiments, the nucleic acid sequence is sequence optimized to increase its resistance to hydrolysis in solution, for example, to lengthen the time that the sequence optimized nucleic acid or a pharmaceutical composition comprising the sequence optimized nucleic acid can be stored under aqueous conditions with minimal degradation.

[2535] In other embodiments, the sequence optimized nucleic acid can be optimized to increase its resistance to hydrolysis in dry storage conditions, for example, to lengthen the time that the sequence optimized nucleic acid can be stored after lyophilization with minimal degradation.

b. Nucleic Acids Sequence Optimized for Protein Expression

[2536] In some embodiments of the disclosure, the desired property of the polynucleotide is the level of expression of an immune response primer, an immune response co-stimulatory signal, or a checkpoint inhibitor polypeptide encoded by a sequence optimized sequence disclosed herein. Protein expression levels can be measured using one or more expression systems. In some embodiments, expression can be measured in cell culture systems, e.g., CHO cells or HEK293 cells. In some embodiments, expression can be measured using in vitro expression systems prepared from extracts of living cells, e.g., rabbit reticulocyte lysates, or in vitro expression systems prepared by assembly of purified individual components. In other embodiments, the protein expression is measured in an in vivo system, e.g., mouse, rabbit, monkey, etc.

[2537] In some embodiments, protein expression in solution form can be desirable. Accordingly, in some embodiments, a reference sequence can be sequence optimized to yield a sequence optimized nucleic acid sequence having optimized levels of expressed proteins in soluble form. Levels of protein expression and other properties such as solubility, levels of aggregation, and the presence of truncation products (i.e., fragments due to proteolysis, hydrolysis, or defective translation) can be measured according to methods known in the art, for example, using electrophoresis (e.g., native or SDS-PAGE) or chromatographic methods (e.g., HPLC, size exclusion chromatography, etc.).

c. Optimization of Target Tissue or Target Cell Viability

[2538] In some embodiments, the expression of heterologous therapeutic proteins encoded by a nucleic acid sequence can have deleterious effects in the target tissue or cell, reducing protein yield, or reducing the quality of the expressed product (e.g., due to the presence of protein fragments or precipitation of the expressed protein in inclusion bodies), or causing toxicity.

[2539] Accordingly, in some embodiments of the disclosure, the sequence optimization of a nucleic acid sequence disclosed herein, e.g., a nucleic acid sequence encoding an immune response primer, an immune response co-stimulatory signal, or a checkpoint inhibitor polypeptide, can be used to increase the viability of target cells expressing the protein encoded by the sequence optimized nucleic acid.

[2540] Heterologous protein expression can also be deleterious to cells transfected with a nucleic acid sequence for autologous or heterologous transplantation. Accordingly, in some embodiments of the present disclosure the sequence optimization of a nucleic acid sequence disclosed herein can be used to increase the viability of target cells expressing the protein encoded by the sequence optimized nucleic acid sequence. Changes in cell or tissue viability, toxicity, and other physiological reaction can be measured according to methods known in the art.

d. Reduction of Immune and/or Inflammatory Response

[2541] In some cases, the administration of a sequence optimized nucleic acid encoding an immune response primer, an immune response co-stimulatory signal, a checkpoint inhibitor polypeptide, or a combination thereof may trigger an immune response, which could be caused by (i) the therapeutic agent (e.g., an mRNA combination therapy encoding an immune response primer and/or an immune response co-stimulatory signal and/or a checkpoint inhibitor polypeptide, or a combination thereof), or (ii) the expression product of such therapeutic agent, or (iv) a combination thereof. Accordingly, in some embodiments of the present disclosure the sequence optimization of nucleic acid sequence (e.g., an mRNA) disclosed herein can be used to decrease an immune or inflammatory response triggered by the administration of a nucleic acid encoding an immune response primer, an immune response co-stimulatory signal, or a checkpoint inhibitor polypeptide or by the expression product of the immune response primer, immune response co-stimulatory signal, or checkpoint inhibitor polypeptide encoded by such nucleic acid.

[2542] In some aspects, an inflammatory response can be measured by detecting increased levels of one or more inflammatory cytokines using methods known in the art, e.g., ELISA. The term “inflammatory cytokine” refers to cytokines that are elevated in an inflammatory response. Examples of inflammatory cytokines include interleukin-6 (IL-6), CXCL1 (chemokine (C-X-C motif) ligand 1; also known as GROα, interferon-γ (IFNγ), tumor necrosis factor α (TNFα), interferon γ-induced protein 10 (IP-10), or granulocyte-colony stimulating factor (G-CSF). The term inflammatory cytokines includes also other cytokines associated with inflammatory responses known in the art, e.g., interleukin-1 (IL-1), interleukin-8 (IL-8), interleukin-13 (IL-13), interferon a (IFN-α), etc.

### VIII. Micro-RNA Binding Sites

[2543] The polynucleotide(s), e.g., mRNA(s), encoding the immune response primer, immune response co-stimulatory signal, or checkpoint inhibitor polypeptides in the combination therapies disclosed herein (i.e., at least two polynucleotides, wherein each polynucleotide comprises an ORF encoding an immune response primer polypeptide, an immune response co-stimulatory signal polypeptide, or an a checkpoint inhibitor polypeptide) can comprise, in addition to the ORFs encoding immune response primer, immune response co-stimulatory signal, or checkpoint inhibitor polypeptides, one or more microRNA binding sites.

[2544] microRNAs (or miRNA) are 19-25 nucleotides long noncoding RNAs that bind to the 3′UTR of nucleic acid molecules and down-regulate gene expression either by reducing nucleic acid molecule stability or by inhibiting translation. By engineering microRNA target sequences into the polynucleotides (e.g., in a 3′UTR like region or other region) of the disclosure, one can target the molecule for degradation or reduced translation, provided the microRNA in question is available. In one embodiment, the miRNA binding site (e.g., miR-122 binding site) binds to the corresponding mature miRNA that is part of an active RNA-induced silencing complex (RISC) containing Dicer. In another embodiment, binding of the miRNA binding site to the corresponding miRNA in RISC degrades the mRNA containing the miRNA binding site or prevents the mRNA from being translated.

[2545] As used herein, the term “microRNA binding site” refers to a microRNA target site or a microRNA recognition site, or any nucleotide sequence to which a microRNA binds or associates. It should be understood that “binding” can follow traditional Watson-Crick hybridization rules or can reflect any stable association of the microRNA with the target sequence at or adjacent to the microRNA site.

[2546] Some microRNAs, e.g., miR-122, are abundant in normal tissue but are present in much lower levels in cancer or tumor tissue. Thus, engineering microRNA target sequences (i.e., microRNA binding site) into the polynucleotides encoding immune response primers, immune response co-stimulatory signals, or checkpoint inhibitor polypeptides (e.g., in a 3′UTR like region or other region) can effectively target the molecule for degradation or reduced translation in normal tissue (where the microRNA is abundant) while providing high levels of translation in the cancer or tumor tissue (where the microRNA is present in much lower levels). This provides a tumor-targeting approach for the methods and compositions of the disclosure.

[2547] In some embodiments, the microRNA binding site (e.g., miR-122 binding site) is fully complementary to miRNA (e.g., miR-122), thereby degrading the mRNA fused to the miRNA binding site. In other embodiments, the miRNA binding site is not fully complementary to the corresponding miRNA. In certain embodiments, the miRNA binding site (e.g., miR-122 binding site) is the same length as the corresponding miRNA (e.g., miR-122). In other embodiments, the microRNA binding site (e.g., miR-122 binding site) is one nucleotide shorter than the corresponding microRNA (e.g., miR-122, which has 22 nts) at the 5′ terminus, the 3′ terminus, or both. In still other embodiments, the microRNA binding site (e.g., miR-122 binding site) is two nucleotides shorter than the corresponding microRNA (e.g., miR-122) at the 5′ terminus, the 3′ terminus, or both. In yet other embodiments, the microRNA binding site (e.g., miR-122 binding site) is three nucleotides shorter than the corresponding microRNA (e.g., miR-122) at the 5′ terminus, the 3′ terminus, or both. In some embodiments, the microRNA binding site (e.g., miR-122 binding site) is four nucleotides shorter than the corresponding microRNA (e.g., miR-122) at the 5′ terminus, the 3′ terminus, or both. In other embodiments, the microRNA binding site (e.g., miR-122 binding site) is five nucleotides shorter than the corresponding microRNA (e.g., miR-122) at the 5′ terminus, the 3′ terminus, or both. In some embodiments, the microRNA binding site (e.g., miR-122 binding site) is six nucleotides shorter than the corresponding microRNA (e. g., miR-122) at the 5′ terminus, the 3′ terminus, or both. In other embodiments, the microRNA binding site (e.g., miR-122 binding site) is seven nucleotides shorter than the corresponding microRNA (e.g., miR-122) at the 5′ terminus or the 3′ terminus. In other embodiments, the microRNA binding site (e.g., miR-122 binding site) is eight nucleotides shorter than the corresponding microRNA (e.g., miR-122) at the 5′ terminus or the 3′ terminus. In other embodiments, the microRNA binding site (e.g., miR-122 binding site) is nine nucleotides shorter than the corresponding microRNA (e.g., miR-122) at the 5′ terminus or the 3′ terminus. In other embodiments, the microRNA binding site (e.g., miR-122 binding site) is ten nucleotides shorter than the corresponding microRNA (e. g., miR-122) at the 5′ terminus or the 3′ terminus. In other embodiments, the microRNA binding site (e.g., miR-122 binding site) is eleven nucleotides shorter than the corresponding microRNA (e. g., miR-122) at the 5′ terminus or the 3′ terminus. In other embodiments, the microRNA binding site (e.g., miR-122 binding site) is twelve nucleotides shorter than the corresponding microRNA (e.g., miR-122) at the 5′ terminus or the 3′ terminus. The miRNA binding sites that are shorter than the corresponding miRNAs are still capable of degrading the mRNA incorporating one or more of the miRNA binding sites or preventing the mRNA from translation.

[2548] In some embodiments, the microRNA binding site (e.g., miR-122 binding site) has sufficient complementarity to miRNA (e.g., miR-122) so that a RISC complex comprising the miRNA (e.g., miR-122) cleaves the polynucleotide comprising the microRNA binding site. In other embodiments, the microRNA binding site (e.g., miR-122 binding site) has imperfect complementarity so that a RISC complex comprising the miRNA (e.g., miR-122) induces instability in the polynucleotide comprising the microRNA binding site. In another embodiment, the microRNA binding site (e.g., miR-122 binding site) has imperfect complementarity so that a RISC complex comprising the miRNA (e.g., miR-122) represses transcription of the polynucleotide comprising the microRNA binding site. In one embodiment, the miRNA binding site (e.g., miR-122 binding site) has one mismatch from the corresponding miRNA (e.g., miR-122). In another embodiment, the miRNA binding site has two mismatches from the corresponding miRNA. In other embodiments, the miRNA binding site has three mismatches from the corresponding miRNA. In other embodiments, the miRNA binding site has four mismatches from the corresponding miRNA. In some embodiments, the miRNA binding site has five mismatches from the corresponding miRNA. In other embodiments, the miRNA binding site has six mismatches from the corresponding miRNA. In certain embodiments, the miRNA binding site has seven mismatches from the corresponding miRNA. In other embodiments, the miRNA binding site has eight mismatches from the corresponding miRNA. In other embodiments, the miRNA binding site has nine mismatches from the corresponding miRNA. In other embodiments, the miRNA binding site has ten mismatches from the corresponding miRNA. In other embodiments, the miRNA binding site has eleven mismatches from the corresponding miRNA. In other embodiments, the miRNA binding site has twelve mismatches from the corresponding miRNA.

[2549] In certain embodiments, the miRNA binding site (e.g., miR-122 binding site) has at least about ten contiguous nucleotides complementary to at least about ten contiguous nucleotides of the corresponding miRNA (e.g., miR-122), at least about eleven contiguous nucleotides complementary to at least about eleven contiguous nucleotides of the corresponding miRNA, at least about twelve contiguous nucleotides complementary to at least about twelve contiguous nucleotides of the corresponding miRNA, at least about thirteen contiguous nucleotides complementary to at least about thirteen contiguous nucleotides of the corresponding miRNA, or at least about fourteen contiguous nucleotides complementary to at least about fourteen contiguous nucleotides of the corresponding miRNA. In some embodiments, the miRNA binding sites have at least about fifteen contiguous nucleotides complementary to at least about fifteen contiguous nucleotides of the corresponding miRNA, at least about sixteen contiguous nucleotides complementary to at least about sixteen contiguous nucleotides of the corresponding miRNA, at least about seventeen contiguous nucleotides complementary to at least about seventeen contiguous nucleotides of the corresponding miRNA, at least about eighteen contiguous nucleotides complementary to at least about eighteen contiguous nucleotides of the corresponding miRNA, at least about nineteen contiguous nucleotides complementary to at least about nineteen contiguous nucleotides of the corresponding miRNA, at least about twenty contiguous nucleotides complementary to at least about twenty contiguous nucleotides of the corresponding miRNA, or at least about twenty one contiguous nucleotides complementary to at least about twenty one contiguous nucleotides of the corresponding miRNA.

[2550] In some embodiments, the polynucleotide comprise an mRNA encoding an immune response primer, an immune response co-stimulatory signal, or a checkpoint inhibitor polypeptide comprising at least one miR-122 binding site, at least two miR-122 binding sites, at least three miR-122 binding sites, at least four miR-122 binding sites, or at least five miR-122 binding sites. In one aspect, the miRNA binding site binds miR-122 or is complementary to miR-122. In another aspect, the miRNA binding site binds to miR-122-3p or miR-122-5p. In a particular aspect, the miRNA binding site comprises a nucleotide sequence at least 80%, at least 85%, at least 90%, at least 95%, or 100% identical to SEQ ID NO: 1213, wherein the miRNA binding site binds to miR-122. In another particular aspect, the miRNA binding site comprises a nucleotide sequence at least 80%, at least 85%, at least 90%, at least 95%, or 100% identical to SEQ ID NO: 1215, wherein the miRNA binding site binds to miR-122. These sequences are shown below in TABLE 19.

TABLE 19
miR-122 and miR-122 binding sites

| SEQ | | |
|---|---|---|
| ID | | |
| NO. | Description | Sequence |
| 1211 | miR-122 | CCUUAGCAGAGCUGUGGAGUGU |
| | | GACAAUGGUGUUUGUGUCUAA |
| | | ACUAUCAAACGCCAUUAUCAC |
| | | ACUAAAUAGCUACUGCUAGGC |
| 1212 | miR-122-3p | AACGCCAUUAUCACACUAAAUA |
| 1213 | miR-122-3p | UAUUUAGUGUGAUAAUGGCGUU |
| | binding site | |
| 1214 | miR-122-5p | UGGAGUGUGACAAUGGUGUUUG |
| 1215 | miR-122-5p | CAAACACCAUUGUCACACUCCA |
| | binding site | |

[2551] In some embodiments, a miRNA binding site (e.g., miR-122 binding site) is inserted in the polynucleotide of the disclosure in any position of the polynucleotide (e.g., 3′ UTR); the insertion site in the polynucleotide can be anywhere in the polynucleotide as long as the insertion of the miRNA binding site in the polynucleotide does not interfere with the translation of the functional immune response primer, immune response co-stimulatory signal, or a checkpoint inhibitor polypeptide in the absence of the corresponding miRNA (e.g., miR122); and in the presence of the miRNA (e.g., miR122), the insertion of the miRNA binding site in the polynucleotide and the binding of the miRNA binding site to the corresponding miRNA are capable of degrading the polynucleotide or preventing the translation of the polynucleotide. In one embodiment, a miRNA binding site is inserted in a 3′UTR of the polynucleotide.

[2552] In certain embodiments, a miRNA binding site is inserted in at least about 30 nucleotides downstream from the stop codon of the immune response primer, immune response co-stimulatory signal, or checkpoint inhibitor polypeptide-encoding mRNA. In other embodiments, a miRNA binding site is inserted in at least about 10 nucleotides, at least about 15 nucleotides, at least about 20 nucleotides, at least about 25 nucleotides, at least about 30 nucleotides, at least about 35 nucleotides, at least about 40 nucleotides, at least about 45 nucleotides, at least about 50 nucleotides, at least about 55 nucleotides, at least about 60 nucleotides, at least about 65 nucleotides, at least about 70 nucleotides, at least about 75 nucleotides, at least about 80 nucleotides, at least about 85 nucleotides, at least about 90 nucleotides, at least about 95 nucleotides, or at least about 100 nucleotides downstream from the stop codon of the polynucleotide, e.g., the immune response primer, immune response co-stimulatory signal, or checkpoint inhibitor polypeptide-encoding mRNA. In other embodiments, a miRNA binding site is inserted in about 10 nucleotides to about 100 nucleotides, about 20 nucleotides to about 90 nucleotides, about 30 nucleotides to about 80 nucleotides, about 40 nucleotides to about 70 nucleotides, about 50 nucleotides to about 60 nucleotides, about 45 nucleotides to about 65 nucleotides downstream from the stop codon of the polynucleotide, e.g., the immune response primer, immune response co-stimulatory signal, or checkpoint inhibitor polypeptide-encoding mRNA.

### IVT Polynucleotide Architecture

[2553] In some embodiments, the polynucleotide of the present disclosure (e.g., an mRNA) comprising an ORF encoding an immune response primer, an immune response co-stimulatory signal, or a checkpoint inhibitor polypeptide is an IVT polynucleotide. Traditionally, the basic components of an mRNA molecule include at least a coding region, a 5′UTR, a 3′UTR, a 5′ cap and a poly-A tail. The IVT polynucleotides of the present disclosure can function as mRNA but are distinguished from wild-type mRNA in their functional and/or structural design features which serve, e.g., to overcome existing problems of effective polypeptide production using nucleic-acid based therapeutics.

[2554] The primary construct of an IVT polynucleotide comprises a first region of linked nucleotides that is flanked by a first flanking region and a second flaking region. This first region can include, but is not limited to, the encoded immune response primers, immune response co-stimulatory signals, or a checkpoint inhibitor polypeptide. The first flanking region can include a sequence of linked nucleosides which function as a 5′ untranslated region (UTR) such as the 5′ UTR of any of the nucleic acids encoding the native 5′ UTR of the polypeptide or a non-native 5′UTR such as, but not limited to, a heterologous 5′ UTR or a synthetic 5′ UTR. The IVT polynucleotide encoding an immune response primer, immune response co-stimulatory signal, or checkpoint inhibitor polypeptide can comprise at its 5 terminus a signal sequence region encoding one or more signal sequences. The flanking region can comprise a region of linked nucleotides comprising one or more complete or incomplete 5′ UTRs sequences. The flanking region can also comprise a 5′ terminal cap. The second flanking region can comprise a region of linked nucleotides comprising one or more complete or incomplete 3′ UTR which can be the native 3′ UTR of the immune response primer, immune response co-stimulatory signal, or checkpoint inhibitor or a non-native 3′ UTR such as, but not limited to, a heterologous 3′ UTR or a synthetic 3′ UTR. The flanking region can also comprise a 3′ tailing sequence. The 3′ tailing sequence can be, but is not limited to, a polyA tail, a polyA-G quartet and/or a stem loop sequence.

[2555] Bridging the 5′ terminus of the first region and the first flanking region is a first operational region. Traditionally, this operational region comprises a Start codon. The operational region can alternatively comprise any translation initiation sequence or signal including a Start codon.

[2556] Bridging the 3′ terminus of the first region and the second flanking region is a second operational region. Traditionally this operational region comprises a Stop codon. The operational region can alternatively comprise any translation initiation sequence or signal including a Stop codon. Multiple serial stop codons can also be used in the IVT polynucleotide. In some embodiments, the operation region of the present disclosure can comprise two stop codons. The first stop codon can be “TGA” or “UGA” and the second stop codon can be selected from the group consisting of “TAA,” “TGA,” “TAG,” “UAA,” “UGA” or “UAG.”

[2557] The IVT polynucleotide primary construct comprises a first region of linked nucleotides that is flanked by a first flanking region and a second flaking region. As used herein, the “first region” can be referred to as a “coding region” or “region encoding” or simply the “first region.” This first region can include, but is not limited to, the encoded polypeptide of interest. In one aspect, the first region can include, but is not limited to, the open reading frame encoding at least one polypeptide of interest. The open reading frame can be codon optimized in whole or in part. The flanking region can comprise a region of linked nucleotides comprising one or more complete or incomplete 5′ UTRs sequences which can be completely codon optimized or partially codon optimized. The flanking region can include at least one nucleic acid sequence including, but not limited to, miR sequences, TERZAK™ sequences and translation control sequences. The flanking region can also comprise a 5′ terminal cap 138. The 5′ terminal capping region can include a naturally occurring cap, a synthetic cap or an optimized cap. The second flanking region can comprise a region of linked nucleotides comprising one or more complete or incomplete 3′ UTRs. The second flanking region can be completely codon optimized or partially codon optimized. The flanking region can include at least one nucleic acid sequence including, but not limited to, miR sequences and translation control sequences. After the second flanking region the polynucleotide primary construct can comprise a 3′ tailing sequence. The 3′ tailing sequence can include a synthetic tailing region and/or a chain terminating nucleoside. Non-liming examples of a synthetic tailing region include a polyA sequence, a polyC sequence, a polyA-G quartet. Non-limiting examples of chain terminating nucleosides include 2′-O methyl, F and locked nucleic acids (LNA).

[2558] Bridging the 5′ terminus of the first region and the first flanking region is a first operational region. Traditionally this operational region comprises a Start codon. The operational region can alternatively comprise any translation initiation sequence or signal including a Start codon.

[2559] Bridging the 3′ terminus of the first region and the second flanking region is a second operational region. Traditionally this operational region comprises a Stop codon. The operational region can alternatively comprise any translation initiation sequence or signal including a Stop codon. According to the present disclosure, multiple serial stop codons can also be used.

[2560] In some embodiments, the first and second flanking regions of the IVT polynucleotide can range independently from 15-1,000 nucleotides in length (e.g., greater than 30, 40, 45, 50, 55, 60, 70, 80, 90, 100, 120, 140, 160, 180, 200, 250, 300, 350, 400, 450, 500, 600, 700, 800, 900, 1,000, 1,500, 2,000, 2,500, 3,000, 3,500, 4,000, 4,500, 5,000, 5,500 nucleotides or at least 30, 40, 45, 50, 55, 60, 70, 80, 90, 100, 120, 140, 160, 180, 200, 250, 300, 350, 400, 450, 500, 600, 700, 800, 900, 1,000, 1,500, 2,000, 2,500, 3,000, 3,500, 4,000, 4,500, 5,000, 5,500 nucleotides).

[2561] In some embodiments, the tailing sequence of the IVT polynucleotide can range from absent to 500 nucleotides in length (e.g., at least 60, 70, 80, 90, 120, 140, 160, 180, 200, 250, 300, 350, 400, 450, or 500 nucleotides). Where the tailing region is a polyA tail, the length can be determined in units of or as a function of polyA Binding Protein binding. In this embodiment, the polyA tail is long enough to bind at least 4 monomers of PolyA Binding Protein. PolyA Binding Protein monomers bind to stretches of approximately 38 nucleotides. As such, it has been observed that polyA tails of about 80 nucleotides and 160 nucleotides are functional.

[2562] In some embodiments, the capping region of the IVT polynucleotide can comprise a single cap or a series of nucleotides forming the cap. In this embodiment the capping region can be from 1 to 10, e.g. 2-9, 3-8, 4-7, 1-5, 5-10, or at least 2, or 10 or fewer nucleotides in length. In some embodiments, the cap is absent.

[2563] In some embodiments, the first and second operational regions of the IVT polynucleotide can range from 3 to 40, e.g., 5-30, 10-20, 15, or at least 4, or 30 or fewer nucleotides in length and can comprise, in addition to a Start and/or Stop codon, one or more signal and/or restriction sequences.

[2564] In some embodiments, the IVT polynucleotides can be structurally modified or chemically modified. When the IVT polynucleotides are chemically and/or structurally modified the polynucleotides can be referred to as “modified IVT polynucleotides.”

[2565] In some embodiments, if the IVT polynucleotides are chemically modified they can have a uniform chemical modification of all or any of the same nucleoside type or a population of modifications produced by mere downward titration of the same starting modification in all or any of the same nucleoside type, or a measured percent of a chemical modification of all any of the same nucleoside type but with random incorporation, such as where all uridines are replaced by a uridine analog, e.g., pseudouridine or 5-methoxyuridine. In another embodiment, the IVT polynucleotides can have a uniform chemical modification of two, three, or four of the same nucleoside type throughout the entire polynucleotide (such as all uridines and all cytosines, etc. are modified in the same way).

[2566] In some embodiments, the IVT polynucleotides can include a sequence encoding a self-cleaving peptide, described herein, such as but not limited to the 2A peptide. The polynucleotide sequence of the 2A peptide in the IVT polynucleotide can be modified or codon optimized by the methods described herein and/or are known in the art. In some embodiments, this sequence can be used to separate the coding region of two or more polypeptides of interest in the IVT polynucleotide.

### Chimeric Polynucleotide Architecture

[2567] In some embodiments, the polynucleotide of the present disclosure is a chimeric polynucleotide. The chimeric polynucleotides or RNA constructs disclosed herein maintain a modular organization similar to IVT polynucleotides, but the chimeric polynucleotides comprise one or more structural and/or chemical modifications or alterations which impart useful properties to the polynucleotide. As such, the chimeric polynucleotides which are modified mRNA molecules of the present disclosure are termed “chimeric modified mRNA” or “chimeric mRNA.”

[2568] Chimeric polynucleotides have portions or regions which differ in size and/or chemical modification pattern, chemical modification position, chemical modification percent or chemical modification population and combinations of the foregoing.

[2569] Examples of parts or regions, where the chimeric polynucleotide functions as an mRNA and encodes an immune response primer, immune response co-stimulatory signal, or checkpoint inhibitor polypeptide, but is not limited to, untranslated regions (UTRs, such as the 5′ UTR or 3′ UTR), coding regions, cap regions, polyA tail regions, start regions, stop regions, signal sequence regions, and combinations thereof. Regions or parts that join or lie between other regions can also be designed to have subregions.

[2570] In some embodiments, the chimeric polynucleotides of the disclosure have a structure comprising according to the following schema:

5′[An]x-L1-[Bo]γ-L2-[Cp]z-L33′

[2571] wherein:

[2572] each of A and B independently comprise a region of linked nucleosides, e.g., a 5′ UTR and/or a 3′ UTR; either A or B or both A and B encode an immune response primer, immune response co-stimulatory signal, or checkpoint inhibitor polypeptide described elsewhere herein, or components thereof,

[2573] C is an optional region of linked nucleosides, e.g., a poly A tail;

[2574] at least one of regions A, B, or C is positionally modified, wherein said positionally modified region comprises at least two chemically modified nucleosides of one or more of the same nucleoside type of adenosine, thymidine, guanosine, cytidine, or uridine, and wherein at least two of the chemical modifications of nucleosides of the same type are different chemical modifications;

[2575] n, o and p are independently an integer between 15-1000;

[2576] x and y are independently 1-20;

[2577] z is 0-5;

[2578] L1 and L2 are independently optional linker moieties, said linker moieties being either nucleic acid based or non-nucleic acid based; and

[2579] L3 is an optional conjugate or an optional linker moiety, said linker moiety being either nucleic acid based or non-nucleic acid based.

[2580] In some embodiments, at least one of the regions of linked nucleosides of A comprises a sequence of linked nucleosides which can function as a 5′ untranslated region (UTR). The sequence of linked nucleosides can be a natural or synthetic 5′ UTR. As a non-limiting example, the chimeric polynucleotide can encode an immune response primer, immune response co-stimulatory signal, or checkpoint inhibitor polypeptide, and the sequence of linked nucleosides of A can encode the native 5′ UTR of the immune response primer, immune response co-stimulatory signal, or checkpoint inhibitor polypeptide or a non-heterologous 5′ UTR such as, but not limited to a synthetic UTR.

[2581] In another embodiment, at least one of the regions of linked nucleosides of A is a cap region. The cap region can be located 5′ to a region of linked nucleosides of A functioning as a 5′UTR. The cap region can comprise at least one cap such as, but not limited to, Cap0, Cap1, ARCA, inosine, N1-methyl-guanosine, 2′fluoro-guanosine, 7-deaza-guanosine, 8-oxo-guanosine, 2-amino-guanosine, LNA-guanosine, 2-azido-guanosine, Cap2 and Cap4.

[2582] In some embodiments, the polynucleotide of the disclosure comprises a Cap1 5′UTR. In some embodiments, a polynucleotide comprising 5′UTR sequence, e.g., Cap1, for encoding an immune response primer, immune response co-stimulatory signal, or checkpoint inhibitor polypeptide disclosed herein increases expression of the immune response primer, immune response co-stimulatory signal, or checkpoint inhibitor polypeptide compared to a polynucleotide encoding the immune response primer, immune response co-stimulatory signal, or checkpoint inhibitor polypeptide comprising a different 5′UTR (e.g., Cap0, ARCA, inosine, N1-methyl-guanosine, 2′fluoro-guanosine, 7-deaza-guanosine, 8-oxo-guanosine, 2-amino-guanosine, LNA-guanosine, 2-azido-guanosine, Cap2 or Cap4). In some embodiments, a polynucleotide comprises the Cap1 5′UTR, wherein the polynucleotide encodes an immune response primer, immune response co-stimulatory signal, or checkpoint inhibitor polypeptide. In some embodiments, polynucleotide comprising the Cap1 5′UTR, increases immune response primer, immune response co-stimulatory signal, or checkpoint inhibitor polypeptide expression.

[2583] In some embodiments, at least one of the regions of linked nucleosides of B comprises at least one open reading frame of a nucleic acid sequence encoding an immune response primer, immune response co-stimulatory signal, or checkpoint inhibitor polypeptide. The nucleic acid sequence can be codon optimized and/or comprise at least one modification.

[2584] In some embodiments, at least one of the regions of linked nucleosides of C comprises a sequence of linked nucleosides which can function as a 3′ UTR. The sequence of linked nucleosides can be a natural or synthetic 3′ UTR. As a non-limiting example, the chimeric polynucleotide can encode an immune response primer, immune response co-stimulatory signal, or checkpoint inhibitor polypeptide, and the sequence of linked nucleosides of C can encode the native 3′ UTR of an immune response primer, immune response co-stimulatory signal, or checkpoint inhibitor polypeptide or a non-heterologous 3′ UTR such as, but not limited to a synthetic UTR.

[2585] In some embodiments, at least one of the regions of linked nucleosides of A comprises a sequence of linked nucleosides which functions as a 5′ UTR and at least one of the regions of linked nucleosides of C comprises a sequence of linked nucleosides which functions as a 3′ UTR. In some embodiments, the 5′ UTR and the 3′ UTR can be from the same or different species. In another embodiment, the 5′ UTR and the 3′ UTR can encode the native untranslated regions from different proteins from the same or different species.

[2586] Chimeric polynucleotides, including the parts or regions thereof, of the present disclosure can be classified as hemimers, gapmers, wingmers, or blockmers.

[2587] As used herein, a “hemimer” is a chimeric polynucleotide comprising a region or part which comprises half of one pattern, percent, position or population of a chemical modification(s) and half of a second pattern, percent, position or population of a chemical modification(s). Chimeric polynucleotides of the present disclosure can also comprise hemimer subregions. In some embodiments, a part or region is 50% of one and 50% of another.

[2588] In some embodiments, the entire chimeric polynucleotide is 50% of one and 50% of the other. Any region or part of any chimeric polynucleotide of the disclosure can be a hemimer. Types of hemimers include pattern hemimers, population hemimers or position hemimers. By definition, hemimers are 50:50 percent hemimers.

[2589] As used herein, a “gapmer” is a chimeric polynucleotide having at least three parts or regions with a gap between the parts or regions. The “gap” can comprise a region of linked nucleosides or a single nucleoside which differs from the chimeric nature of the two parts or regions flanking it. The two parts or regions of a gapmer can be the same or different from each other.

[2590] As used herein, a “wingmer” is a chimeric polynucleotide having at least three parts or regions with a gap between the parts or regions. Unlike a gapmer, the two flanking parts or regions surrounding the gap in a wingmer are the same in degree or kind. Such similarity can be in the length of number of units of different modifications or in the number of modifications. The wings of a wingmer can be longer or shorter than the gap. The wing parts or regions can be 20, 30, 40, 50, 60 70, 80, 90 or 95% greater or shorter in length than the region which comprises the gap.

[2591] As used herein, a “blockmer” is a patterned polynucleotide where parts or regions are of equivalent size or number and type of modifications. Regions or subregions in a blockmer can be 50, 51, 52, 53, 54, 55, 56, 57, 58, 59, 60, 61 62, 63, 64, 65, 66, 67, 68, 69, 70, 71, 72, 73, 74, 75, 76, 77, 78, 79, 80, 81, 82, 83, 84, 85, 86, 87, 88, 89, 90, 91, 92, 93, 94, 95, 96, 97, 98, 99, 100, 101, 102, 103, 104, 105, 106, 107, 108, 109, 110, 111, 112, 113, 114, 115, 116, 117, 118, 119, 120, 121, 122, 123, 124, 125, 126, 127, 128, 129, 130, 131, 132, 133, 134, 135, 136, 137, 138, 139, 140, 141, 142, 143, 144, 145, 146, 147, 148, 149, 150, 151, 152, 153, 154, 155, 156, 157, 158, 159, 160, 161, 162, 163, 164, 165, 166, 167, 168, 169, 170, 171, 172, 173, 174, 175, 176, 177, 178, 179, 180, 181, 182, 183, 184, 185, 186, 187, 188, 189, 190, 191, 192, 193, 194, 195, 196, 197, 198, 199, 200, 201, 202, 203, 204, 205, 206, 207, 208, 209, 210, 211, 212, 213, 214, 215, 216, 217, 218, 219, 220, 221, 222, 223, 224, 225, 226, 227, 228, 229, 230, 231, 232, 233, 234, 235, 236, 237, 238, 239, 240, 241, 242, 243, 244, 245, 246, 247, 248, 249, 250, 251, 252, 253, 254, 255, 256, 257, 258, 259, 260, 261, 262, 263, 264, 265, 266, 267, 268, 269, 270, 271, 272, 273, 274, 275, 276, 277, 278, 279, 280, 281, 282, 283, 284, 285, 286, 287, 288, 289, 290, 291, 292, 293, 294, 295, 296, 297, 298, 299, 300, 310, 320, 330, 340, 350, 360, 370, 380, 390, 400, 410, 420, 430, 440, 450, 460, 470, 480, 490 or 500, nucleosides long.

[2592] Chimeric polynucleotides, including the parts or regions thereof, of the present disclosure having a chemical modification pattern are referred to as “pattern chimeras.” Pattern chimeras can also be referred to as blockmers. Pattern chimeras are those polynucleotides having a pattern of modifications within, across or among regions or parts.

[2593] Patterns of modifications within a part or region are those which start and stop within a defined region. Patterns of modifications across a part or region are those patterns which start in on part or region and end in another adjacent part or region. Patterns of modifications among parts or regions are those which begin and end in one part or region and are repeated in a different part or region, which is not necessarily adjacent to the first region or part.

[2594] The regions or subregions of pattern chimeras or blockmers can have simple alternating patterns such as ABAB[AB]n where each “A” and each “B” represent different chemical modifications (at least one of the base, sugar or backbone linker), different types of chemical modifications (e.g., naturally occurring and non-naturally occurring), different percentages of modifications or different populations of modifications. The pattern can repeat n number of times where n=3-300. Further, each A or B can represent from 1-2500 units (e.g., nucleosides) in the pattern. Patterns can also be alternating multiples such as AABBAABB[AABB]n (an alternating double multiple) or AAABBBAAABBB[AAABBB]n (an alternating triple multiple) pattern. The pattern can repeat n number of times where n=3-300.

[2595] Different patterns can also be mixed together to form a second order pattern. For example, a single alternating pattern can be combined with a triple alternating pattern to form a second order alternating pattern A′B′. One example would be [ABABAB][AAABBBAAABBB] [ABABAB][AAABBBAAABBB][ABABAB][AAABBBAAABBB], where [ABABAB] is A′ and [AAABBBAAABBB] is B′. In like fashion, these patterns can be repeated n number of times, where n=3-300.

[2596] Patterns can include three or more different modifications to form an ABCABC[ABC]n pattern. These three component patterns can also be multiples, such as AABBCCAABBCC[AABBCC]n and can be designed as combinations with other patterns such as ABCABCAABBCCABCABCAABBCC, and can be higher order patterns.

[2597] Regions or subregions of position, percent, and population modifications need not reflect an equal contribution from each modification type. They can form series such as “1-2-3-4”, “1-2-4-8”, where each integer represents the number of units of a particular modification type. Alternatively, they can be odd only, such as “1-3-3-1-3-1-5” or even only “2-4-2-4-6-4-8” or a mixture of both odd and even number of units such as “1-3-4-2-5-7-3-3-4”.

[2598] Pattern chimeras can vary in their chemical modification by degree (such as those described above) or by kind (e.g., different modifications).

[2599] Chimeric polynucleotides, including the parts or regions thereof, of the present disclosure having at least one region with two or more different chemical modifications of two or more nucleoside members of the same nucleoside type (A, C, G, T, or U) are referred to as “positionally modified” chimeras. Positionally modified chimeras are also referred to herein as “selective placement” chimeras or “selective placement polynucleotides”. As the name implies, selective placement refers to the design of polynucleotides which, unlike polynucleotides in the art where the modification to any A, C, G, T or U is the same by virtue of the method of synthesis, can have different modifications to the individual As, Cs, Gs, Ts or Us in a polynucleotide or region thereof. For example, in a positionally modified chimeric polynucleotide, there can be two or more different chemical modifications to any of the nucleoside types of As, Cs, Gs, Ts, or Us. There can also be combinations of two or more to any two or more of the same nucleoside type. For example, a positionally modified or selective placement chimeric polynucleotide can comprise 3 different modifications to the population of adenines in the molecule and also have 3 different modifications to the population of cytosines in the construct-all of which can have a unique, non-random, placement.

[2600] Chimeric polynucleotides, including the parts or regions thereof, of the present disclosure having a chemical modification percent are referred to as “percent chimeras.” Percent chimeras can have regions or parts which comprise at least 1%, at least 2%, at least 5%, at least 8%, at least 10%, at least 20%, at least 30%, at least 40%, at least 50%, at least 60%, at least 70%, at least 80%, at least 90%, at least 95%, or at least 99% positional, pattern or population of modifications. Alternatively, the percent chimera can be completely modified as to modification position, pattern, or population. The percent of modification of a percent chimera can be split between naturally occurring and non-naturally occurring modifications.

[2601] Chimeric polynucleotides, including the parts or regions thereof, of the present disclosure having a chemical modification population are referred to as “population chimeras.” A population chimera can comprise a region or part where nucleosides (their base, sugar or backbone linkage, or combination thereof) have a select population of modifications. Such modifications can be selected from functional populations such as modifications which induce, alter or modulate a phenotypic outcome. For example, a functional population can be a population or selection of chemical modifications which increase the level of a cytokine. Other functional populations can individually or collectively function to decrease the level of one or more cytokines. Use of a selection of these like-function modifications in a chimeric polynucleotide would therefore constitute a “functional population chimera.” As used herein, a “functional population chimera” can be one whose unique functional feature is defined by the population of modifications as described above or the term can apply to the overall function of the chimeric polynucleotide itself. For example, as a whole the chimeric polynucleotide can function in a different or superior way as compared to an unmodified or non-chimeric polynucleotide.

[2602] It should be noted that polynucleotides which have a uniform chemical modification of all of any of the same nucleoside type or a population of modifications produced by mere downward titration of the same starting modification in all of any of the same nucleoside type, or a measured percent of a chemical modification of all any of the same nucleoside type but with random incorporation, such as where all uridines are replaced by a uridine analog, e.g., pseudouridine or 5-methoxyuridine, are not considered chimeric polynucleotides. Likewise, polynucleotides having a uniform chemical modification of two, three, or four of the same nucleoside type throughout the entire polynucleotide (such as all uridines and all cytosines, etc. are modified in the same way) are not considered chimeric polynucleotides. One example of a polynucleotide which is not chimeric is the canonical pseudouridine/5-methyl cytosine modified polynucleotide. These uniform polynucleotides are arrived at entirely via in vitro transcription (IVT) enzymatic synthesis; and due to the limitations of the synthesizing enzymes, they contain only one kind of modification at the occurrence of each of the same nucleoside type, i.e., adenosine (A), thymidine (T), guanosine (G), cytidine (C) or uridine (U), found in the polynucleotide. Such polynucleotides can be characterized as IVT polynucleotides.

[2603] The chimeric polynucleotides of the present disclosure can be structurally modified or chemically modified. When the chimeric polynucleotides of the present disclosure are chemically and/or structurally modified the polynucleotides can be referred to as “modified chimeric polynucleotides.”

[2604] The regions or parts of the chimeric polynucleotides can be separated by a linker or spacer moiety. Such linkers or spaces can be nucleic acid based or non-nucleosidic.

[2605] In some embodiments, the chimeric polynucleotides can include a sequence encoding a self-cleaving peptide described herein, such as, but not limited to, a 2A peptide. The polynucleotide sequence of the 2A peptide in the chimeric polynucleotide can be modified or codon optimized by the methods described herein and/or are known in the art.

[2606] Notwithstanding the foregoing, the chimeric polynucleotides of the present disclosure can comprise a region or part which is not positionally modified or not chimeric as defined herein. For example, a region or part of a chimeric polynucleotide can be uniformly modified at one or more A, T, C, G, or U, but the polynucleotides will not be uniformly modified throughout the entire region or part.

[2607] Chimeric polynucleotides of the present disclosure can be completely positionally modified or partially positionally modified. They can also have subregions which can be of any pattern or design.

[2608] In some embodiments, regions or subregions of the polynucleotides can range from absent to 500 nucleotides in length (e.g., at least 60, 70, 80, 90, 100, 110, 120, 130, 140, 150, 160, 170, 180, 190, 200, 250, 300, 350, 400, 450, or 500 nucleotides). Where the region is a polyA tail, the length can be determined in units of or as a function of polyA Binding Protein binding. In this embodiment, the polyA tail is long enough to bind at least 4 monomers of PolyA Binding Protein. PolyA Binding Protein monomers bind to stretches of approximately 38 nucleotides. As such, it has been observed that polyA tails of about 80 nucleotides to about 160 nucleotides are functional. The chimeric polynucleotides of the present disclosure which function as an mRNA need not comprise a polyA tail.

[2609] According to the present disclosure, chimeric polynucleotides which function as an mRNA can have a capping region. The capping region can comprise a single cap or a series of nucleotides forming the cap. In this embodiment the capping region can be from 1 to 10, e.g. 2-9, 3-8, 4-7, 1-5, 5-10, or at least 2, or 10 or fewer nucleotides in length. In some embodiments, the cap is absent.

[2610] The present disclosure contemplates chimeric polynucleotides which are circular or cyclic. As the name implies circular polynucleotides are circular in nature meaning that the termini are joined in some fashion, whether by ligation, covalent bond, common association with the same protein or other molecule or complex or by hybridization.

[2611] Chimeric polynucleotides, formulations and compositions comprising chimeric polynucleotides, and methods of making, using and administering chimeric polynucleotides are also described in International Patent Application No. PCT/US2014/53907.

[2612] In some embodiments, the chimeric polynucleotide encodes an immune response primer, immune response co-stimulatory signal, or checkpoint inhibitor polypeptide. In some embodiments, the chimeric polynucleotides of the disclosure comprise any one of the immune response primers, immune response co-stimulatory signals, or checkpoint inhibitor nucleic acid sequences provided in the present disclosure. In some embodiments the chimeric polynucleotide of the disclosure encodes any one of the immune response primers, immune response co-stimulatory signals, or checkpoint inhibitor polypeptides provided in the present disclosure.

### Circular Polynucleotide

[2613] The polynucleotides (e.g., mRNA) encoding the immune response primers, immune response co-stimulatory signals, or checkpoint inhibitor polypeptides in the combination therapies disclosed herein (i.e., at least two polynucleotides, wherein each polynucleotide comprises an ORF encoding an immune response primer polypeptide, an immune response co-stimulatory signal polypeptide, or an a checkpoint inhibitor polypeptide) can be circular or cyclic. As used herein, “circular polynucleotides” or “circP” means a single stranded circular polynucleotide which acts substantially like, and has the properties of, an RNA. The term “circular” is also meant to encompass any secondary or tertiary configuration of the circP. Circular polynucleotides are circular in nature meaning that the termini are joined in some fashion, whether by ligation, covalent bond, common association with the same protein or other molecule or complex or by hybridization.

[2614] Circular polynucleotides, formulations and compositions comprising circular polynucleotides, and methods of making, using and administering circular polynucleotides are also disclosed in International Patent Application No. PCT/US2014/53904 (published as WO2015034925, see also, US 2016-0194368).

[2615] In some embodiments, the circular polynucleotide encodes an immune response primer, immune response co-stimulatory signal, or checkpoint inhibitor polypeptide. In some embodiments, the circular polynucleotides of the disclosure comprise any one of the immune response primer, immune response co-stimulatory signal, or checkpoint inhibitor nucleic acid sequences provided in the present disclosure. In some embodiments, the circular polynucleotides of the disclosure encode any one of the immune response primers, immune response co-stimulatory signals, or checkpoint inhibitor polypeptide provided in the present disclosure. In some embodiments, the circular polynucleotide increases immune response primer, immune response co-stimulatory signal, or checkpoint inhibitor polypeptide expression.

### Multimers of Polynucleotides

[2616] In some embodiments, multiple distinct chimeric polynucleotides and/or IVT polynucleotides can be linked together through the 3′-end using nucleotides which are modified at the 3′-terminus. Chemical conjugation can be used to control the stoichiometry of delivery into cells. This can be controlled by chemically linking chimeric polynucleotides and/or IVT polynucleotides using a 3′-azido terminated nucleotide on one polynucleotides species and a C5-ethynyl or alkynyl-containing nucleotide on the opposite polynucleotide species. The modified nucleotide is added post-transcriptionally using terminal transferase (New England Biolabs, Ipswich, MA) according to the manufacturer's protocol. After the addition of the 3′-modified nucleotide, the two polynucleotides species can be combined in an aqueous solution, in the presence or absence of copper, to form a new covalent linkage via a click chemistry mechanism as described in the literature.

[2617] In another example, more than two chimeric polynucleotides and/or IVT polynucleotides can be linked together using a functionalized linker molecule. For example, a functionalized saccharide molecule can be chemically modified to contain multiple chemical reactive groups (SH—, NH₂—, N₃, etc.) to react with the cognate moiety on a 3′-functionalized mRNA molecule (i.e., a 3′-maleimide ester, 3′-NHS-ester, alkynyl). The number of reactive groups on the modified saccharide can be controlled in a stoichiometric fashion to directly control the stoichiometric ratio of conjugated chimeric polynucleotides and/or IVT polynucleotides.

[2618] In some embodiments, the chimeric polynucleotides and/or IVT polynucleotides can be linked together in a pattern. The pattern can be a simple alternating pattern such as CD[CD]x where each “C” and each “D” represent a chimeric polynucleotide, IVT polynucleotide, different chimeric polynucleotides or different IVT polynucleotides. The pattern can repeat x number of times, where x=1-300. Patterns can also be alternating multiples such as CCDD[CCDD] x (an alternating double multiple) or CCCDDD[CCCDDD] x (an alternating triple multiple) pattern. The alternating double multiple or alternating triple multiple can repeat x number of times, where x=1-300. Conjugates and Combinations of Polynucleotides

[2619] The polynucleotide (e.g., mRNA) encoding an immune response primer, immune response co-stimulatory signal, or checkpoint inhibitor polypeptide of the present disclosure can be designed to be conjugated to other polynucleotides, dyes, intercalating agents (e.g. acridines), cross-linkers (e.g. psoralene, mitomycin C), porphyrins (TPPC4, texaphyrin, Sapphyrin), polycyclic aromatic hydrocarbons (e.g., phenazine, dihydrophenazine), artificial endonucleases (e.g. EDTA), alkylating agents, phosphate, amino, mercapto, PEG (e.g., PEG-40K), MPEG, [MPEG]2, polyamino, alkyl, substituted alkyl, radiolabeled markers, enzymes, haptens (e.g. biotin), transport/absorption facilitators (e.g., aspirin, vitamin E, folic acid), synthetic ribonucleases, proteins, e.g., glycoproteins, or peptides, e.g., molecules having a specific affinity for a co-ligand, or antibodies e.g., an antibody, that binds to a specified cell type such as a cancer cell, endothelial cell, or bone cell, hormones and hormone receptors, non-peptidic species, such as lipids, lectins, carbohydrates, vitamins, cofactors, or a drug.

[2620] Conjugation can result in increased stability and/or half-life and can be particularly useful in targeting the polynucleotides to specific sites in the cell, tissue or organism.

[2621] A polynucleotide (e.g., mRNA) encoding an immune response primer, immune response co-stimulatory signal, or checkpoint inhibitor polypeptide of the disclosure can further comprise a nucleotide sequence encoding one or more heterologous polypeptides. In one embodiment, the one or more heterologous polypeptides improves a pharmacokinetic property or pharmacodynamics property of the immune response primer, immune response co-stimulatory signal, or checkpoint inhibitor polypeptide, or a polynucleotide (e.g., at least one mRNA) encoding the immune response primer, immune response co-stimulatory signal, or checkpoint inhibitor polypeptide. In another embodiment, the one or more heterologous polypeptides comprise a polypeptide that can extend a half-life of the immune response primer polypeptide, immune response co-stimulatory signal polypeptide, or checkpoint inhibitor polypeptide.

[2622] A polynucleotide (e.g., mRNA) encoding an immune response primer, immune response co-stimulatory signal, or checkpoint inhibitor polypeptide of the present disclosure can further comprise one or more regions or parts which act or function as an untranslated region. By definition, wild type untranslated regions (UTRs) of a gene are transcribed but not translated. In mRNA, the 5′UTR starts at the transcription start site and continues to the start codon but does not include the start codon; whereas, the 3′UTR starts immediately following the stop codon and continues until the transcriptional termination signal. There is growing body of evidence about the regulatory roles played by the UTRs in terms of stability of the nucleic acid molecule and translation. The regulatory features of a UTR can be incorporated into the polynucleotides of the present disclosure to, among other things, enhance the stability of the molecule. The specific features can also be incorporated to ensure controlled down-regulation of the transcript in case they are misdirected to undesired organs sites. TABLES 20, 21, and 22 provide a listing of exemplary UTRs which can be utilized in the polynucleotides of the present disclosure. 5′ UTR and Translation Initiation

[2623] In certain embodiments, the polynucleotide (e.g., mRNA) encoding an immune response primer, immune response co-stimulatory signal, or checkpoint inhibitor polypeptide of the present disclosure further comprises a 5′ UTR and/or a translation initiation sequence. Natural 5′UTRs bear features which play roles in translation initiation. They harbor signatures like Kozak sequences which are commonly known to be involved in the process by which the ribosome initiates translation of many genes. 5′UTR also have been known to form secondary structures which are involved in elongation factor binding.

[2624] By engineering the features typically found in abundantly expressed genes of specific target organs, one can enhance the stability and protein production of the polynucleotides of the disclosure. For example, introduction of 5′ UTR of mRNA known to be upregulated in cancers, such as c-myc, could be used to enhance expression of a nucleic acid molecule, such as a polynucleotide, in cancer cells. Untranslated regions useful in the design and manufacture of polynucleotides include, but are not limited, to those disclosed in International Patent Publication No. WO 2014/164253 (see also US20160022840).

[2625] Shown in TABLE 20 is a listing of a 5′-untranslated region of the disclosure. Variants of 5′ UTRs can be utilized wherein one or more nucleotides are added or removed to the termini, including A, U, C or G.

TABLE 20
5′-Untranslated Regions

| 5′ UTR | Name/ | | SEQ ID |
|---|---|---|---|
| Identifier | Description | Sequence | NO. |
| 5UTR-001 | Upstream UTR | GGGAAAUAAGAGAGAAAAGAAGAGUAAGAAGAAAUAUAAGAG | 1216 |
| | | CCACC | |
| 5UTR-002 | Upstream UTR | GGGAGAUCAGAGAGAAAAGAAGAGUAAGAAGAAAUAUAAGAG | 1217 |
| | | CCACC | |
| 5UTR-003 | Upstream UTR | GGAAUAAAAGUCUCAACACAACAUAUACAAAACAAACGAAUC | 1218 |
| | | UCAAGCAAUCAAGCAUUCUACUUCUAUUGCAGCAAUUUAAAU | |
| | | CAUUUCUUUUAAAGCAAAAGCAAUUUUCUGAAAAUUUUCACC | |
| | | AUUUACGAACGAUAGCAAC | |
| 5UTR-004 | Upstream UTR | GGGAGACAAGCUUGGCAUUCCGGUACUGUU | 1219 |
| | | GGUAAAGCCACC | |
| 5UTR-005 | Upstream UTR | GGGAGAUCAGAGAGAAAAGAAGAGUAAGAAGAAAUAUAAGAG | 1220 |
| | | CCACC | |
| 5UTR-006 | Upstream UTR | GGAAUAAAAGUCUCAACACAACAUAUACAAAACAAACGAAUC | 1221 |
| | | UCAAGCAAUCAAGCAUUCUACUUCUAUUGCAGCAAUUUAAAU | |
| | | CAUUUCUUUUAAAGCAAAAGCAAUUUUCUGAAAAUUUUCACC | |
| | | AUUUACGAACGAUAGCAAC | |
| 5UTR-007 | Upstream UTR | GGGAGACAAGCUUGGCAUUCCGGUACUGUU | 1222 |
| | | GGUAAAGCCACC | |
| 5UTR-008 | Upstream UTR | GGGAAUUAACAGAGAAAAGAAGAGUAAGAAGAAAUAUAAGAG | 1223 |
| | | CCACC | |
| 5UTR-009 | Upstream UTR | GGGAAAUUAGACAGAAAAGAAGAGUAAGAAGAAAUAUAAGAG | 1224 |
| | | CCACC | |
| 5UTR-010 | Upstream UTR | GGGAAAUAAGAGAGUAAAGAACAGUAAGAAGAAAUAUAAGAG | 1225 |
| | | CCACC | |
| 5UTR-011 | Upstream UTR | GGGAAAAAAGAGAGAAAAGAAGACUAAGAAGAAAUAUAAGAG | 1226 |
| | | CCACC | |
| 5UTR-012 | Upstream UTR | GGGAAAUAAGAGAGAAAAGAAGAGUAAGAAGAUAUAUAAGAG | 1227 |
| | | CCACC | |
| 5UTR-013 | Upstream UTR | GGGAAAUAAGAGACAAAACAAGAGUAAGAAGAAAUAUAAGAG | 1228 |
| | | CCACC | |
| 5UTR-014 | Upstream UTR | GGGAAAUUAGAGAGUAAAGAACAGUAAGUAGAAUUAAAAGAG | 1229 |
| | | CCACC | |
| 5UTR-015 | Upstream UTR | GGGAAAUAAGAGAGAAUAGAAGAGUAAGAAGAAAUAUAAGAG | 1230 |
| | | CCACC | |
| 5UTR-016 | Upstream UTR | GGGAAAUAAGAGAGAAAAGAAGAGUAAGAAGAAAAUUAAGAG | 1231 |
| | | CCACC | |
| 5UTR-017 | Upstream UTR | GGGAAAUAAGAGAGAAAAGAAGAGUAAGAAGAAAUUUAAGAG | 1232 |
| | | CCACC | |
| 5UTR-018 | Upstream UTR | GGGAAAUAAGAGAGAAAAGAAGAGUAAGAAGAAAUAUAAGAG | 1233 |
| | | CCACC | |
| 5UTR-019 | Upstream UTR | UCAAGCUUUUGGACCCUCGUACAGAAGCUAAUACGACUCACU | 1234 |
| | | AUAGGGAAAUAAGAGAGAAAAGAAGAGUAAGAAGAAAUAUAA | |
| | | GAGCCACC | |

[2626] Other non-UTR sequences can also be used as regions or subregions within the polynucleotides. For example, introns or portions of introns sequences can be incorporated into regions of the polynucleotides. Incorporation of intronic sequences can increase protein production as well as polynucleotide levels.

[2627] Combinations of features can be included in flanking regions and can be contained within other features. For example, the ORF can be flanked by a 5′ UTR which can contain a strong Kozak translational initiation signal and/or a 3′ UTR which can include an oligo(dT) sequence for templated addition of a poly-A tail. 5′UTR can comprise a first polynucleotide fragment and a second polynucleotide fragment from the same and/or different genes such as the 5′UTRs described in U.S. Patent Application Publication No. 2010-0293625.

[2628] These UTRs or portions thereof can be placed in the same orientation as in the transcript from which they were selected or can be altered in orientation or location. Hence a 5′ or 3′ UTR can be inverted, shortened, lengthened, made with one or more other 5′ UTRs or 3′ UTRs.

[2629] In some embodiments, the UTR sequences can be changed in some way in relation to a reference sequence. For example, a 3′ or 5′ UTR can be altered relative to a wild type or native UTR by the change in orientation or location as taught above or can be altered by the inclusion of additional nucleotides, deletion of nucleotides, swapping or transposition of nucleotides. Any of these changes producing an “altered” UTR (whether 3′ or 5′) comprise a variant UTR.

[2630] In some embodiments, a double, triple or quadruple UTR such as a 5′ or 3′ UTR can be used. As used herein, a “double” UTR is one in which two copies of the same UTR are encoded either in series or substantially in series. For example, a double beta-globin 3′ UTR can be used as described in U.S. Patent Application Publication No. 2010-0129877.

[2631] In some embodiments, flanking regions can be heterologous. In some embodiments, the 5′ untranslated region can be derived from a different species than the 3′ untranslated region. The untranslated region can also include translation enhancer elements (TEE). As a non-limiting example, the TEE can include those described in U.S. Patent Application Publication No. 2009-0226470.

### 3′ UTR and the AU Rich Elements

[2632] In certain embodiments, the polynucleotide (e.g., mRNA) encoding an immune response primer, immune response co-stimulatory signal, or checkpoint inhibitor polypeptide further comprises a 3′ UTR. 3′-UTR is the section of mRNA that immediately follows the translation termination codon and often contains regulatory regions that post-transcriptionally influence gene expression. Regulatory regions within the 3′-UTR can influence polyadenylation, translation efficiency, localization, and stability of the mRNA. In one embodiment, the 3′-UTR useful for the disclosure comprises a binding site for regulatory proteins or microRNAs. In some embodiments, the 3-UTR has a silencer region, which binds to repressor proteins and inhibits the expression of the mRNA. In other embodiments, the 3′-UTR comprises an AU-rich element. Proteins bind AREs to affect the stability or decay rate of transcripts in a localized manner or affect translation initiation. In other embodiments, the 3′-UTR comprises the sequence AAUAAA that directs addition of several hundred adenine residues called the poly(A) tail to the end of the mRNA transcript.

[2633] TABLE 21 shows a listing of 3Y-untranslated regions useful for the mRNAs encoding an immune response primer, immune response co-stimulatory signal, or checkpoint inhibitor polypeptide. Variants of 3′ UTRs can be utilized wherein one or more nucleotides are added or removed to the termini, including A, U, C or G.

TABLE 21
Exemplary 3′-Untranslated Regions

| 3′ UTR | Name/ | | SEQ |
|---|---|---|---|
| Identifier | Description | Sequence | ID NO. |
| 3UTR-001 | Creatine Kinase | GCGCCUGCCCACCUGCCACCGACUGCUGGAACCCAGCCAGUGGGA | 1235 |
| | | GGGCCUGGCCCACCAGAGUCCUGCUCCCUCACUCCUCGCCCCGCC | |
| | | CCCUGUCCCAGAGUCCCACCUGGGGGCUCUCUCCACCCUUCUCAG | |
| | | AGUUCCAGUUUCAACCAGAGUUCCAACCAAUGGGCUCCAUCCUCU | |
| | | GGAUUCUGGCCAAUGAAAUAUCUCCCUGGCAGGGUCCUCUUCUUU | |
| | | UCCCAGAGCUCCACCCCAACCAGGAGCUCUAGUUAAUGGAGAGCU | |
| | | CCCAGCACACUCGGAGCUUGUGCUUUGUCUCCACGCAAAGCGAUA | |
| | | AAUAAAAGCAUUGGUGGCCUUUGGUCUUUGAAUAAAGCCUGAGUA | |
| | | GGAAGUCUAGA | |
| 3UTR-002 | Myoglobin | GCCCCUGCCGCUCCCACCCCCACCCAUCUGGGCCCCGGGUUCAAG | 1236 |
| | | AGAGAGCGGGGUCUGAUCUCGUGUAGCCAUAUAGAGUUUGCUUCU | |
| | | GAGUGUCUGCUUUGUUUAGUAGAGGUGGGCAGGAGGAGCUGAGGG | |
| | | GCUGGGGCUGGGGUGUUGAAGUUGGCUUUGCAUGCCCAGCGAUGC | |
| | | GCCUCCCUGUGGGAUGUCAUCACCCUGGGAACCGGGAGUGGCCCU | |
| | | UGGCUCACUGUGUUCUGCAUGGUUUGGAUCUGAAUUAAUUGUCCU | |
| | | UUCUUCUAAAUCCCAACCGAACUUCUUCCAACCUCCAAACUGGCU | |
| | | GUAACCCCAAAUCCAAGCCAUUAACUACACCUGACAGUAGCAAUU | |
| | | GUCUGAUUAAUCACUGGCCCCUUGAAGACAGCAGAAUGUCCCUUU | |
| | | GCAAUGAGGAGGAGAUCUGGGCUGGGCGGGCCAGCUGGGGAAGCA | |
| | | UUUGACUAUCUGGAACUUGUGUGUGCCUCCUCAGGUAUGGCAGUG | |
| | | ACUCACCUGGUUUUAAUAAAACAACCUGCAACAUCUCAUGGUCUU | |
| | | UGAAUAAAGCCUGAGUAGGAAGUCUAGA | |
| 3UTR-003 | α-actin | ACACACUCCACCUCCAGCACGCGACUUCUCAGGACGACGAAUCUU | 1237 |
| | | CUCAAUGGGGGGGCGGCUGAGCUCCAGCCACCCCGCAGUCACUUU | |
| | | CUUUGUAACAACUUCCGUUGCUGCCAUCGUAAACUGACACAGUGU | |
| | | UUAUAACGUGUACAUACAUUAACUUAUUACCUCAUUUUGUUAUUU | |
| | | UUCGAAACAAAGCCCUGUGGAAGAAAAUGGAAAACUUGAAGAAGC | |
| | | AUUAAAGUCAUUCUGUUAAGCUGCGUAAAUGGUCUUUGAAUAAAG | |
| | | CCUGAGUAGGAAGUCUAGA | |
| 3UTR-004 | Albumin | CAUCACAUUUAAAAGCAUCUCAGCCUACCAUGAGAAUAAGAGAAA | 1238 |
| | | GAAAAUGAAGAUCAAAAGCUUAUUCAUCUGUUUUUCUUUUUCGUU | |
| | | GGUGUAAAGCCAACACCCUGUCUAAAAAACAUAAAUUUCUUUAAU | |
| | | CAUUUUGCCUCUUUUCUCUGUGCUUCAAUUAAUAAAAAAUGGAAA | |
| | | GAAUCUAAUAGAGUGGUACAGCACUGUUAUUUUUCAAAGAUGUGU | |
| | | UGCUAUCCUGAAAAUUCUGUAGGUUCUGUGGAAGUUCCAGUGUUC | |
| | | UCUCUUAUUCCACUUCGGUAGAGGAUUUCUAGUUUCUUGUGGGCU | |
| | | AAUUAAAUAAAUCAUUAAUACUCUUCUAAUGGUCUUUGAAUAAAG | |
| | | CCUGAGUAGGAAGUCUAGA | |
| 3UTR-005 | α-globin | GCUGCCUUCUGCGGGGCUUGCCUUCUGGCCAUGCCCUUCUUCUCU | 1239 |
| | | CCCUUGCACCUGUACCUCUUGGUCUUUGAAUAAAGCCUGAGUAGG | |
| | | AAGGCGGCCGCUCGAGCAUGCAUCUAGA | |
| 3UTR-006 | G-CSF | GCCAAGCCCUCCCCAUCCCAUGUAUUUAUCUCUAUUUAAUAUUUA | 1240 |
| | | UGUCUAUUUAAGCCUCAUAUUUAAAGACAGGGAAGAGCAGAACGG | |
| | | AGCCCCAGGCCUCUGUGUCCUUCCCUGCAUUUCUGAGUUUCAUUC | |
| | | UCCUGCCUGUAGCAGUGAGAAAAAGCUCCUGUCCUCCCAUCCCCU | |
| | | GGACUGGGAGGUAGAUAGGUAAAUACCAAGUAUUUAUUACUAUGA | |
| | | CUGCUCCCCAGCCCUGGCUCUGCAAUGGGCACUGGGAUGAGCCGC | |
| | | UGUGAGCCCCUGGUCCUGAGGGUCCCCACCUGGGACCCUUGAGAG | |
| | | UAUCAGGUCUCCCACGUGGGAGACAAGAAAUCCCUGUUUAAUAUU | |
| | | UAAACAGCAGUGUUCCCCAUCUGGGUCCUUGCACCCCUCACUCUG | |
| | | GCCUCAGCCGACUGCACAGCGGCCCCUGCAUCCCCUUGGCUGUGA | |
| | | GGCCCCUGGACAAGCAGAGGUGGCCAGAGCUGGGAGGCAUGGCCC | |
| | | UGGGGUCCCACGAAUUUGCUGGGGAAUCUCGUUUUUCUUCUUAAG | |
| | | ACUUUUGGGACAUGGUUUGACUCCCGAACAUCACCGACGCGUCUC | |
| | | CUGUUUUUCUGGGUGGCCUCGGGACACCUGCCCUGCCCCCACGAG | |
| | | GGUCAGGACUGUGACUCUUUUUAGGGCCAGGCAGGUGCCUGGACA | |
| | | UUUGCCUUGCUGGACGGGGACUGGGGAUGUGGGAGGGAGCAGACA | |
| | | GGAGGAAUCAUGUCAGGCCUGUGUGUGAAAGGAAGCUCCACUGUC | |
| | | ACCCUCCACCUCUUCACCCCCCACUCACCAGUGUCCCCUCCACUG | |
| | | UCACAUUGUAACUGAACUUCAGGAUAAUAAAGUGUUUGCCUCCAU | |
| | | GGUCUUUGAAUAAAGCCUGAGUAGGAAGGCGGCCGCUCGAGCAUG | |
| | | CAUCUAGA | |
| 3UTR-007 | Col1a2; | ACUCAAUCUAAAUUAAAAAAGAAAGAAAUUUGAAAAAACUUUCUC | 1241 |
| | collagen, type I, | UUUGCCAUUUCUUCUUCUUCUUUUUUAACUGAAAGCUGAAUCCUU | |
| | alpha 2 | CCAUUUCUUCUGCACAUCUACUUGCUUAAAUUGUGGGCAAAAGAG | |
| | | AAAAAGAAGGAUUGAUCAGAGCAUUGUGCAAUACAGUUUCAUUAA | |
| | | CUCCUUCCCCCGCUCCCCCAAAAAUUUGAAUUUUUUUUUCAACAC | |
| | | UCUUACACCUGUUAUGGAAAAUGUCAACCUUUGUAAGAAAACCAA | |
| | | AAUAAAAAUUGAAAAAUAAAAACCAUAAACAUUUGCACCACUUGU | |
| | | GGCUUUUGAAUAUCUUCCACAGAGGGAAGUUUAAAACCCAAACUU | |
| | | CCAAAGGUUUAAACUACCUCAAAACACUUUCCCAUGAGUGUGAUC | |
| | | CACAUUGUUAGGUGCUGACCUAGACAGAGAUGAACUGAGGUCCUU | |
| | | GUUUUGUUUUGUUCAUAAUACAAAGGUGCUAAUUAAUAGUAUUUC | |
| | | AGAUACUUGAAGAAUGUUGAUGGUGCUAGAAGAAUUUGAGAAGAA | |
| | | AUACUCCUGUAUUGAGUUGUAUCGUGUGGUGUAUUUUUUAAAAAA | |
| | | UUUGAUUUAGCAUUCAUAUUUUCCAUCUUAUUCCCAAUUAAAAGU | |
| | | AUGCAGAUUAUUUGCCCAAAUCUUCUUCAGAUUCAGCAUUUGUUC | |
| | | UUUGCCAGUCUCAUUUUCAUCUUCUUCCAUGGUUCCACAGAAGCU | |
| | | UUGUUUCUUGGGCAAGCAGAAAAAUUAAAUUGUACCUAUUUUGUA | |
| | | UAUGUGAGAUGUUUAAAUAAAUUGUGAAAAAAAUGAAAUAAAGCA | |
| | | UGUUUGGUUUUCCAAAAGAACAUAU | |
| 3UTR-008 | Col6a2; | CGCCGCCGCCCGGGCCCCGCAGUCGAGGGUCGUGAGCCCACCCCG | 1242 |
| | collagen, type | UCCAUGGUGCUAAGCGGGCCCGGGUCCCACACGGCCAGCACCGCU | |
| | VI, alpha 2 | GCUCACUCGGACGACGCCCUGGGCCUGCACCUCUCCAGCUCCUCC | |
| | | CACGGGGUCCCCGUAGCCCCGGCCCCCGCCCAGCCCCAGGUCUCC | |
| | | CCAGGCCCUCCGCAGGCUGCCCGGCCUCCCUCCCCCUGCAGCCAU | |
| | | CCCAAGGCUCCUGACCUACCUGGCCCCUGAGCUCUGGAGCAAGCC | |
| | | CUGACCCAAUAAAGGCUUUGAACCCAU | |
| 3UTR-009 | RPN1; | GGGGCUAGAGCCCUCUCCGCACAGCGUGGAGACGGGGCAAGGAGG | 1243 |
| | ribophorin I | GGGGUUAUUAGGAUUGGUGGUUUUGUUUUGCUUUGUUUAAAGCCG | |
| | | UGGGAAAAUGGCACAACUUUACCUCUGUGGGAGAUGCAACACUGA | |
| | | GAGCCAAGGGGUGGGAGUUGGGAUAAUUUUUAUAUAAAAGAAGUU | |
| | | UUUCCACUUUGAAUUGCUAAAAGUGGCAUUUUUCCUAUGUGCAGU | |
| | | CACUCCUCUCAUUUCUAAAAUAGGGACGUGGCCAGGCACGGUGGC | |
| | | UCAUGCCUGUAAUCCCAGCACUUUGGGAGGCCGAGGCAGGCGGCU | |
| | | CACGAGGUCAGGAGAUCGAGACUAUCCUGGCUAACACGGUAAAAC | |
| | | CCUGUCUCUACUAAAAGUACAAAAAAUUAGCUGGGCGUGGUGGUG | |
| | | GGCACCUGUAGUCCCAGCUACUCGGGAGGCUGAGGCAGGAGAAAG | |
| | | GCAUGAAUCCAAGAGGCAGAGCUUGCAGUGAGCUGAGAUCACGCC | |
| | | AUUGCACUCCAGCCUGGGCAACAGUGUUAAGACUCUGUCUCAAAU | |
| | | AUAAAUAAAUAAAUAAAUAAAUAAAUAAAUAAAUAAAAAUAAAGC | |
| | | GAGAUGUUGCCCUCAAA | |
| 3UTR-010 | LRP1; low; | GGCCCUGCCCCGUCGGACUGCCCCCAGAAAGCCUCCUGCCCCCUG | 1244 |
| | density | CCAGUGAAGUCCUUCAGUGAGCCCCUCCCCAGCCAGCCCUUCCCU | |
| | lipoprotein | GGCCCCGCCGGAUGUAUAAAUGUAAAAAUGAAGGAAUUACAUUUU | |
| | receptor-related | AUAUGUGAGCGAGCAAGCCGGCAAGCGAGCACAGUAUUAUUUCUC | |
| | protein 1 | CAUCCCCUCCCUGCCUGCUCCUUGGCACCCCCAUGCUGCCUUCAG | |
| | | GGAGACAGGCAGGGAGGGCUUGGGGCUGCACCUCCUACCCUCCCA | |
| | | CCAGAACGCACCCCACUGGGAGAGCUGGUGGUGCAGCCUUCCCCU | |
| | | CCCUGUAUAAGACACUUUGCCAAGGCUCUCCCCUCUCGCCCCAUC | |
| | | CCUGCUUGCCCGCUCCCACAGCUUCCUGAGGGCUAAUUCUGGGAA | |
| | | GGGAGAGUUCUUUGCUGCCCCUGUCUGGAAGACGUGGCUCUGGGU | |
| | | GAGGUAGGCGGGAAAGGAUGGAGUGUUUUAGUUCUUGGGGGAGGC | |
| | | CACCCCAAACCCCAGCCCCAACUCCAGGGGCACCUAUGAGAUGGC | |
| | | CAUGCUCAACCCCCCUCCCAGACAGGCCCUCCCUGUCUCCAGGGC | |
| | | CCCCACCGAGGUUCCCAGGGCUGGAGACUUCCUCUGGUAAACAUU | |
| | | CCUCCAGCCUCCCCUCCCCUGGGGACGCCAAGGAGGUGGGCCACA | |
| | | CCCAGGAAGGGAAAGCGGGCAGCCCCGUUUUGGGGACGUGAACGU | |
| | | UUUAAUAAUUUUUGCUGAAUUCCUUUACAACUAAAUAACACAGAU | |
| | | AUUGUUAUAAAUAAAAUUGU | |
| 3UTR-011 | Nnt1; | AUAUUAAGGAUCAAGCUGUUAGCUAAUAAUGCCACCUCUGCAGUU | 1245 |
| | cardiotrophin- | UUGGGAACAGGCAAAUAAAGUAUCAGUAUACAUGGUGAUGUACAU | |
| | like cytokine | CUGUAGCAAAGCUCUUGGAGAAAAUGAAGACUGAAGAAAGCAAAG | |
| | factor 1 | CAAAAACUGUAUAGAGAGAUUUUUCAAAAGCAGUAAUCCCUCAAU | |
| | | UUUAAAAAAGGAUUGAAAAUUCUAAAUGUCUUUCUGUGCAUAUUU | |
| | | UUUGUGUUAGGAAUCAAAAGUAUUUUAUAAAAGGAGAAAGAACAG | |
| | | CCUCAUUUUAGAUGUAGUCCUGUUGGAUUUUUUAUGCCUCCUCAG | |
| | | UAACCAGAAAUGUUUUAAAAAACUAAGUGUUUAGGAUUUCAAGAC | |
| | | AACAUUAUACAUGGCUCUGAAAUAUCUGACACAAUGUAAACAUUG | |
| | | CAGGCACCUGCAUUUUAUGUUUUUUUUUUCAACAAAUGUGACUAA | |
| | | UUUGAAACUUUUAUGAACUUCUGAGCUGUCCCCUUGCAAUUCAAC | |
| | | CGCAGUUUGAAUUAAUCAUAUCAAAUCAGUUUUAAUUUUUUAAAU | |
| | | UGUACUUCAGAGUCUAUAUUUCAAGGGCACAUUUUCUCACUACUA | |
| | | UUUUAAUACAUUAAAGGACUAAAUAAUCUUUCAGAGAUGCUGGAA | |
| | | ACAAAUCAUUUGCUUUAUAUGUUUCAUUAGAAUACCAAUGAAACA | |
| | | UACAACUUGAAAAUUAGUAAUAGUAUUUUUGAAGAUCCCAUUUCU | |
| | | AAUUGGAGAUCUCUUUAAUUUCGAUCAACUUAUAAUGUGUAGUAC | |
| | | UAUAUUAAGUGCACUUGAGUGGAAUUCAACAUUUGACUAAUAAAA | |
| | | UGAGUUCAUCAUGUUGGCAAGUGAUGUGGCAAUUAUCUCUGGUGA | |
| | | CAAAAGAGUAAAAUCAAAUAUUUCUGCCUGUUACAAAUAUCAAGG | |
| | | AAGACCUGCUACUAUGAAAUAGAUGACAUUAAUCUGUCUUCACUG | |
| | | UUUAUAAUACGGAUGGAUUUUUUUUCAAAUCAGUGUGUGUUUUGA | |
| | | GGUCUUAUGUAAUUGAUGACAUUUGAGAGAAAUGGUGGCUUUUUU | |
| | | UAGCUACCUCUUUGUUCAUUUAAGCACCAGUAAAGAUCAUGUCUU | |
| | | UUUAUAGAAGUGUAGAUUUUCUUUGUGACUUUGCUAUCGUGCCUA | |
| | | AAGCUCUAAAUAUAGGUGAAUGUGUGAUGAAUACUCAGAUUAUUU | |
| | | GUCUCUCUAUAUAAUUAGUUUGGUACUAAGUUUCUCAAAAAAUUA | |
| | | UUAACACAUGAAAGACAAUCUCUAAACCAGAAAAAGAAGUAGUAC | |
| | | AAAUUUUGUUACUGUAAUGCUCGCGUUUAGUGAGUUUAAAACACA | |
| | | CAGUAUCUUUUGGUUUUAUAAUCAGUUUCUAUUUUGCUGUGCCUG | |
| | | AGAUUAAGAUCUGUGUAUGUGUGUGUGUGUGUGUGUGCGUUUGUG | |
| | | UGUUAAAGCAGAAAAGACUUUUUUAAAAGUUUUAAGUGAUAAAUG | |
| | | CAAUUUGUUAAUUGAUCUUAGAUCACUAGUAAACUCAGGGCUGAA | |
| | | UUAUACCAUGUAUAUUCUAUUAGAAGAAAGUAAACACCAUCUUUA | |
| | | UUCCUGCCCUUUUUCUUCUCUCAAAGUAGUUGUAGUUAUAUCUAG | |
| | | AAAGAAGCAAUUUUGAUUUCUUGAAAAGGUAGUUCCUGCACUCAG | |
| | | UUUAAACUAAAAAUAAUCAUACUUGGAUUUUAUUUAUUUUUGUCA | |
| | | UAGUAAAAAUUUUAAUUUAUAUAUAUUUUUAUUUAGUAUUAUCUU | |
| | | AUUCUUUGCUAUUUGCCAAUCCUUUGUCAUCAAUUGUGUUAAAUG | |
| | | AAUUGAAAAUUCAUGCCCUGUUCAUUUUAUUUUACUUUAUUGGUU | |
| | | AGGAUAUUUAAAGGAUUUUUGUAUAUAUAAUUUCUUAAAUUAAUA | |
| | | UUCCAAAAGGUUAGUGGACUUAGAUUAUAAAUUAUGGCAAAAAUC | |
| | | UAAAAACAACAAAAAUGAUUUUUAUACAUUCUAUUUCAUUAUUCC | |
| | | UCUUUUUCCAAUAAGUCAUACAAUUGGUAGAUAUGACUUAUUUUA | |
| | | UUUUUGUAUUAUUCACUAUAUCUUUAUGAUAUUUAAGUAUAAAUA | |
| | | AUUAAAAAAAUUUAUUGUACCUUAUAGUCUGUCACCAAAAAAAAA | |
| | | AAAUUAUCUGUAGGUAGUGAAAUGCUAAUGUUGAUUUGUCUUUAA | |
| | | GGGCUUGUUAACUAUCCUUUAUUUUCUCAUUUGUCUUAAAUUAGG | |
| | | AGUUUGUGUUUAAAUUACUCAUCUAAGCAAAAAAUGUAUAUAAAU | |
| | | CCCAUUACUGGGUAUAUACCCAAAGGAUUAUAAAUCAUGCUGCUA | |
| | | UAAAGACACAUGCACACGUAUGUUUAUUGCAGCACUAUUCACAAU | |
| | | AGCAAAGACUUGGAACCAACCCAAAUGUCCAUCAAUGAUAGACUU | |
| | | GAUUAAGAAAAUGUGCACAUAUACACCAUGGAAUACUAUGCAGCC | |
| | | AUAAAAAAGGAUGAGUUCAUGUCCUUUGUAGGGACAUGGAUAAAG | |
| | | CUGGAAACCAUCAUUCUGAGCAAACUAUUGCAAGGACAGAAAACC | |
| | | AAACACUGCAUGUUCUCACUCAUAGGUGGGAAUUGAACAAUGAGA | |
| | | ACACUUGGACACAAGGUGGGGAACACCACACACCAGGGCCUGUCA | |
| | | UGGGGUGGGGGGAGUGGGGAGGGAUAGCAUUAGGAGAUAUACCUA | |
| | | AUGUAAAUGAUGAGUUAAUGGGUGCAGCACACCAACAUGGCACAU | |
| | | GUAUACAUAUGUAGCAAACCUGCACGUUGUGCACAUGUACCCUAG | |
| | | AACUUAAAGUAUAAUUAAAAAAAAAAAGAAAACAGAAGCUAUUUA | |
| | | UAAAGAAGUUAUUUGCUGAAAUAAAUGUGAUCUUUCCCAUUAAAA | |
| | | AAAUAAAGAAAUUUUGGGGUAAAAAAACACAAUAUAUUGUAUUCU | |
| | | UGAAAAAUUCUAAGAGAGUGGAUGUGAAGUGUUCUCACCACAAAA | |
| | | GUGAUAACUAAUUGAGGUAAUGCACAUAUUAAUUAGAAAGAUUUU | |
| | | GUCAUUCCACAAUGUAUAUAUACUUAAAAAUAUGUUAUACACAAU | |
| | | AAAUACAUACAUUAAAAAAUAAGUAAAUGUA | |
| 3UTR-012 | Col6a1; | CCCACCCUGCACGCCGGCACCAAACCCUGUCCUCCCACCCCUCCC | 1246 |
| | collagen, type | CACUCAUCACUAAACAGAGUAAAAUGUGAUGCGAAUUUUCCCGAC | |
| | VI, alpha 1 | CAACCUGAUUCGCUAGAUUUUUUUUAAGGAAAAGCUUGGAAAGCC | |
| | | AGGACACAACGCUGCUGCCUGCUUUGUGCAGGGUCCUCCGGGGCU | |
| | | CAGCCCUGAGUUGGCAUCACCUGCGCAGGGCCCUCUGGGGCUCAG | |
| | | CCCUGAGCUAGUGUCACCUGCACAGGGCCCUCUGAGGCUCAGCCC | |
| | | UGAGCUGGCGUCACCUGUGCAGGGCCCUCUGGGGCUCAGCCCUGA | |
| | | GCUGGCCUCACCUGGGUUCCCCACCCCGGGCUCUCCUGCCCUGCC | |
| | | CUCCUGCCCGCCCUCCCUCCUGCCUGCGCAGCUCCUUCCCUAGGC | |
| | | ACCUCUGUGCUGCAUCCCACCAGCCUGAGCAAGACGCCCUCUCGG | |
| | | GGCCUGUGCCGCACUAGCCUCCCUCUCCUCUGUCCCCAUAGCUGG | |
| | | UUUUUCCCACCAAUCCUCACCUAACAGUUACUUUACAAUUAAACU | |
| | | CAAAGCAAGCUCUUCUCCUCAGCUUGGGGCAGCCAUUGGCCUCUG | |
| | | UCUCGUUUUGGGAAACCAAGGUCAGGAGGCCGUUGCAGACAUAAA | |
| | | UCUCGGCGACUCGGCCCCGUCUCCUGAGGGUCCUGCUGGUGACCG | |
| | | GCCUGGACCUUGGCCCUACAGCCCUGGAGGCCGCUGCUGACCAGC | |
| | | ACUGACCCCGACCUCAGAGAGUACUCGCAGGGGCGCUGGCUGCAC | |
| | | UCAAGACCCUCGAGAUUAACGGUGCUAACCCCGUCUGCUCCUCCC | |
| | | UCCCGCAGAGACUGGGGCCUGGACUGGACAUGAGAGCCCCUUGGU | |
| | | GCCACAGAGGGCUGUGUCUUACUAGAAACAACGCAAACCUCUCCU | |
| | | UCCUCAGAAUAGUGAUGUGUUCGACGUUUUAUCAAAGGCCCCCUU | |
| | | UCUAUGUUCAUGUUAGUUUUGCUCCUUCUGUGUUUUUUUCUGAAC | |
| | | CAUAUCCAUGUUGCUGACUUUUCCAAAUAAAGGUUUUCACUCCUC | |
| | | UC | |
| 3UTR-013 | Calr; calreticulin | AGAGGCCUGCCUCCAGGGCUGGACUGAGGCCUGAGCGCUCCUGCC | 1247 |
| | | GCAGAGCUGGCCGCGCCAAAUAAUGUCUCUGUGAGACUCGAGAAC | |
| | | UUUCAUUUUUUUCCAGGCUGGUUCGGAUUUGGGGUGGAUUUUGGU | |
| | | UUUGUUCCCCUCCUCCACUCUCCCCCACCCCCUCCCCGCCCUUUU | |
| | | UUUUUUUUUUUUUUAAACUGGUAUUUUAUCUUUGAUUCUCCUUCA | |
| | | GCCCUCACCCCUGGUUCUCAUCUUUCUUGAUCAACAUCUUUUCUU | |
| | | GCCUCUGUCCCCUUCUCUCAUCUCUUAGCUCCCCUCCAACCUGGG | |
| | | GGGCAGUGGUGUGGAGAAGCCACAGGCCUGAGAUUUCAUCUGCUC | |
| | | UCCUUCCUGGAGCCCAGAGGAGGGCAGCAGAAGGGGGUGGUGUCU | |
| | | CCAACCCCCCAGCACUGAGGAAGAACGGGGCUCUUCUCAUUUCAC | |
| | | CCCUCCCUUUCUCCCCUGCCCCCAGGACUGGGCCACUUCUGGGUG | |
| | | GGGCAGUGGGUCCCAGAUUGGCUCACACUGAGAAUGUAAGAACUA | |
| | | CAAACAAAAUUUCUAUUAAAUUAAAUUUUGUGUCUCC | |
| 3UTR-014 | Collal; collagen, | CUCCCUCCAUCCCAACCUGGCUCCCUCCCACCCAACCAACUUUCC | 1248 |
| | type I, alpha 1 | CCCCAACCCGGAAACAGACAAGCAACCCAAACUGAACCCCCUCAA | |
| | | AAGCCAAAAAAUGGGAGACAAUUUCACAUGGACUUUGGAAAAUAU | |
| | | UUUUUUCCUUUGCAUUCAUCUCUCAAACUUAGUUUUUAUCUUUGA | |
| | | CCAACCGAACAUGACCAAAAACCAAAAGUGCAUUCAACCUUACCA | |
| | | AAAAAAAAAAAAAAAAAAGAAUAAAUAAAUAACUUUUUAAAAAAG | |
| | | GAAGCUUGGUCCACUUGCUUGAAGACCCAUGCGGGGGUAAGUCCC | |
| | | UUUCUGCCCGUUGGGCUUAUGAAACCCCAAUGCUGCCCUUUCUGC | |
| | | UCCUUUCUCCACACCCCCCUUGGGGCCUCCCCUCCACUCCUUCCC | |
| | | AAAUCUGUCUCCCCAGAAGACACAGGAAACAAUGUAUUGUCUGCC | |
| | | CAGCAAUCAAAGGCAAUGCUCAAACACCCAAGUGGCCCCCACCCU | |
| | | CAGCCCGCUCCUGCCCGCCCAGCACCCCCAGGCCCUGGGGGACCU | |
| | | GGGGUUCUCAGACUGCCAAAGAAGCCUUGCCAUCUGGCGCUCCCA | |
| | | UGGCUCUUGCAACAUCUCCCCUUCGUUUUUGAGGGGGUCAUGCCG | |
| | | GGGGAGCCACCAGCCCCUCACUGGGUUCGGAGGAGAGUCAGGAAG | |
| | | GGCCACGACAAAGCAGAAACAUCGGAUUUGGGGAACGCGUGUCAA | |
| | | UCCCUUGUGCCGCAGGGCUGGGCGGGAGAGACUGUUCUGUUCCUU | |
| | | GUGUAACUGUGUUGCUGAAAGACUACCUCGUUCUUGUCUUGAUGU | |
| | | GUCACCGGGGCAACUGCCUGGGGGCGGGGAUGGGGGCAGGGUGGA | |
| | | AGCGGCUCCCCAUUUUAUACCAAAGGUGCUACAUCUAUGUGAUGG | |
| | | GUGGGGUGGGGAGGGAAUCACUGGUGCUAUAGAAAUUGAGAUGCC | |
| | | CCCCCAGGCCAGCAAAUGUUCCUUUUUGUUCAAAGUCUAUUUUUA | |
| | | UUCCUUGAUAUUUUUCUUUUUUUUUUUUUUUUUUUGUGGAUGGGG | |
| | | ACUUGUGAAUUUUUCUAAAGGUGCUAUUUAACAUGGGAGGAGAGC | |
| | | GUGUGCGGCUCCAGCCCAGCCCGCUGCUCACUUUCCACCCUCUCU | |
| | | CCACCUGCCUCUGGCUUCUCAGGCCUCUGCUCUCCGACCUCUCUC | |
| | | CUCUGAAACCCUCCUCCACAGCUGCAGCCCAUCCUCCCGGCUCCC | |
| | | UCCUAGUCUGUCCUGCGUCCUCUGUCCCCGGGUUUCAGAGACAAC | |
| | | UUCCCAAAGCACAAAGCAGUUUUUCCCCCUAGGGGUGGGAGGAAG | |
| | | CAAAAGACUCUGUACCUAUUUUGUAUGUGUAUAAUAAUUUGAGAU | |
| | | GUUUUUAAUUAUUUUGAUUGCUGGAAUAAAGCAUGUGGAAAUGAC | |
| | | CCAAACAUAAUCCGCAGUGGCCUCCUAAUUUCCUUCUUUGGAGUU | |
| | | GGGGGAGGGGUAGACAUGGGGAAGGGGCUUUGGGGUGAUGGGCUU | |
| | | GCCUUCCAUUCCUGCCCUUUCCCUCCCCACUAUUCUCUUCUAGAU | |
| | | CCCUCCAUAACCCCACUCCCCUUUCUCUCACCCUUCUUAUACCGC | |
| | | AAACCUUUCUACUUCCUCUUUCAUUUUCUAUUCUUGCAAUUUCCU | |
| | | UGCACCUUUUCCAAAUCCUCUUCUCCCCUGCAAUACCAUACAGGC | |
| | | AAUCCACGUGCACAACACACACACACACUCUUCACAUCUGGGGUU | |
| | | GUCCAAACCUCAUACCCACUCCCCUUCAAGCCCAUCCACUCUCCA | |
| | | CCCCCUGGAUGCCCUGCACUUGGUGGCGGUGGGAUGCUCAUGGAU | |
| | | ACUGGGAGGGUGAGGGGAGUGGAACCCGUGAGGAGGACCUGGGGG | |
| | | CCUCUCCUUGAACUGACAUGAAGGGUCAUCUGGCCUCUGCUCCCU | |
| | | UCUCACCCACGCUGACCUCCUGCCGAAGGAGCAACGCAACAGGAG | |
| | | AGGGGUCUGCUGAGCCUGGCGAGGGUCUGGGAGGGACCAGGAGGA | |
| | | AGGCGUGCUCCCUGCUCGCUGUCCUGGCCCUGGGGGAGUGAGGGA | |
| | | GACAGACACCUGGGAGAGCUGUGGGGAAGGCACUCGCACCGUGCU | |
| | | CUUGGGAAGGAAGGAGACCUGGCCCUGCUCACCACGGACUGGGUG | |
| | | CCUCGACCUCCUGAAUCCCCAGAACACAACCCCCCUGGGCUGGGG | |
| | | UGGUCUGGGGAACCAUCGUGCCCCCGCCUCCCGCCUACUCCUUUU | |
| | | UAAGCUU | |
| 3UTR-015 | Plod1; | UUGGCCAGGCCUGACCCUCUUGGACCUUUCUUCUUUGCCGACAAC | 1249 |
| | procollagen- | CACUGCCCAGCAGCCUCUGGGACCUCGGGGUCCCAGGGAACCCAG | |
| | lysine, 2- | UCCAGCCUCCUGGCUGUUGACUUCCCAUUGCUCUUGGAGCCACCA | |
| | oxoglutarate 5- | AUCAAAGAGAUUCAAAGAGAUUCCUGCAGGCCAGAGGCGGAACAC | |
| | dioxygenase 1 | ACCUUUAUGGCUGGGGCUCUCCGUGGUGUUCUGGACCCAGCCCCU | |
| | | GGAGACACCAUUCACUUUUACUGCUUUGUAGUGACUCGUGCUCUC | |
| | | CAACCUGUCUUCCUGAAAAACCAAGGCCCCCUUCCCCCACCUCUU | |
| | | CCAUGGGGUGAGACUUGAGCAGAACAGGGGCUUCCCCAAGUUGCC | |
| | | CAGAAAGACUGUCUGGGUGAGAAGCCAUGGCCAGAGCUUCUCCCA | |
| | | GGCACAGGUGUUGCACCAGGGACUUCUGCUUCAAGUUUUGGGGUA | |
| | | AAGACACCUGGAUCAGACUCCAAGGGCUGCCCUGAGUCUGGGACU | |
| | | UCUGCCUCCAUGGCUGGUCAUGAGAGCAAACCGUAGUCCCCUGGA | |
| | | GACAGCGACUCCAGAGAACCUCUUGGGAGACAGAAGAGGCAUCUG | |
| | | UGCACAGCUCGAUCUUCUACUUGCCUGUGGGGAGGGGAGUGACAG | |
| | | GUCCACACACCACACUGGGUCACCCUGUCCUGGAUGCCUCUGAAG | |
| | | AGAGGGACAGACCGUCAGAAACUGGAGAGUUUCUAUUAAAGGUCA | |
| | | UUUAAACCA | |
| 3UTR-016 | Nucb1; | UCCUCCGGGACCCCAGCCCUCAGGAUUCCUGAUGCUCCAAGGCGA | 1250 |
| | nucleobindin 1 | CUGAUGGGCGCUGGAUGAAGUGGCACAGUCAGCUUCCCUGGGGGC | |
| | | UGGUGUCAUGUUGGGCUCCUGGGGCGGGGGCACGGCCUGGCAUUU | |
| | | CACGCAUUGCUGCCACCCCAGGUCCACCUGUCUCCACUUUCACAG | |
| | | CCUCCAAGUCUGUGGCUCUUCCCUUCUGUCCUCCGAGGGGCUUGC | |
| | | CUUCUCUCGUGUCCAGUGAGGUGCUCAGUGAUCGGCUUAACUUAG | |
| | | AGAAGCCCGCCCCCUCCCCUUCUCCGUCUGUCCCAAGAGGGUCUG | |
| | | CUCUGAGCCUGCGUUCCUAGGUGGCUCGGCCUCAGCUGCCUGGGU | |
| | | UGUGGCCGCCCUAGCAUCCUGUAUGCCCACAGCUACUGGAAUCCC | |
| | | CGCUGCUGCUCCGGGCCAAGCUUCUGGUUGAUUAAUGAGGGCAUG | |
| | | GGGUGGUCCCUCAAGACCUUCCCCUACCUUUUGUGGAACCAGUGA | |
| | | UGCCUCAAAGACAGUGUCCCCUCCACAGCUGGGUGCCAGGGGCAG | |
| | | GGGAUCCUCAGUAUAGCCGGUGAACCCUGAUACCAGGAGCCUGGG | |
| | | CCUCCCUGAACCCCUGGCUUCCAGCCAUCUCAUCGCCAGCCUCCU | |
| | | CCUGGACCUCUUGGCCCCCAGCCCCUUCCCCACACAGCCCCAGAA | |
| | | GGGUCCCAGAGCUGACCCCACUCCAGGACCUAGGCCCAGCCCCUC | |
| | | AGCCUCAUCUGGAGCCCCUGAAGACCAGUCCCACCCACCUUUCUG | |
| | | GCCUCAUCUGACACUGCUCCGCAUCCUGCUGUGUGUCCUGUUCCA | |
| | | UGUUCCGGUUCCAUCCAAAUACACUUUCUGGAACAAA | |
| 3UTR-017 | α-globin | GCUGGAGCCUCGGUGGCCAUGCUUCUUGCCCCUUGGGCCUCCCCC | 1251 |
| | | CAGCCCCUCCUCCCCUUCCUGCACCCGUACCCCCGUGGUCUUUGA | |
| | | AUAAAGUCUGAGUGGGCGGC | |
| 3UTR-018 | Downstream | UAAUAGGCUGGAGCCUCGGUGGCCAUGCUUCUUGCCCCUUGGGCC | 1252 |
| | UTR | UCCCCCCAGCCCCUCCUCCCCUUCCUGCACCCGUACCCCCGUGGU | |
| | | CUUUGAAUAAAGUCUGAGUGGGCGGC | |
| 3UTR-019 | Downstream | UGAUAAUAGGCUGGAGCCUCGGUGGCCAUGCUUCUUGCCCCUUGG | 1253 |
| | UTR | GCCUCCCCCCAGCCCCUCCUCCCCUUCCUGCACCCGUACCCCCCA | |
| | | AACACCAUUGUCACACUCCAGUGGUCUUUGAAUAAAGUCUGAGUG | |
| | | GGCGGC | |

[2634] In certain embodiments, the 3′ UTR sequence useful for the disclosure comprises a nucleotide sequence at least about 60%, at least about 70%, at least about 80%, at least about 90%, at least about 95%, at least about 96%, at least about 97%, at least about 98%, at least about 99%, or about 100% identical to a sequence selected from the group consisting of SEQ ID NOS: 45-62 and any combination thereof. In a particular embodiment, the 3′ UTR sequence further comprises a miRNA binding site, e.g., miR122 binding site. In other embodiments, a 3′UTR sequence useful for the disclosure comprises 3′ UTR-018 (SEQ ID NO: 1252).

[2635] In certain embodiments, the 3′ UTR sequence comprises one or more miRNA binding sites, e.g., miR-122 binding sites, or any other heterologous nucleotide sequences therein, without disrupting the function of the 3′ UTR. Some examples of 3′ UTR sequences comprising a miRNA binding site are listed in TABLE 22.

TABLE 22
Exemplary 3′ UTR with miRNA Binding Sites

| 3′ UTR | Name/ | | |
|---|---|---|---|
| Identifier/ | Descrip- | | SEQ ID |
| miRNA BS | tion | Sequence | NO. |
| 3UTR-018 + | Downstream | UAAUAGGCUGGAGCCUCGGUGGCCAUGCUUCUUGCC | 1254 |
| miR-122-5p | UTR | CCUUGGGCCUCCCCCCAGCCCCUCCUCCCCUUCCUG | |
| binding site | | [chemical structure] | |
| | | UGGUCUUUGAAUAAAGUCUGAGUGGGCGGC | |
| 3UTR-018 + | Downstream | UAAUAGGCUGGAGCCUCGGUGGCCAUGCUUCUUGCC | 1255 |
| miR-122-3p | UTR | CCUUGGGCCUCCCCCCAGCCCCUCCUCCCCUUCCUG | |
| binding site | | [chemical structure] | |
| | | UGGUCUUUGAAUAAAGUCUGAGUGGGCGGC | |
| 3UTR-019 + | Downstream | UGAUAAUAGGCUGGAGCCUCGGUGGCCAUGCUUCUU | 1256 |
| miR122 | UTR | GCCCCUUGGGCCUCCCCCCAGCCCCUCCUCCCCUUC | |
| binding site | | CUGCACCCGUACCCCCCAAACACCAUUGUCACACUC | |
| | | CAGUGGUCUUUGAAUAAAGUCUGAGUGGGCGGC | |

*miRNA binding site is boxed or underlined.

[2636] In certain embodiments, the 3′ UTR sequence useful for the disclosure comprises a nucleotide sequence at least about 60%, at least about 70%, at least about 80%, at least about t90%, at least about 95%, at least about 96%, at least about 97%, at least about 98%, at least about 99%, or about 100% identical to the sequence set forth as SEQ ID NO: 1254 or SEQ ID NO:1255.

Regions having a 5′ Cap

[2637] The polynucleotide comprising an mRNA encoding an immune response primer, immune response co-stimulatory signal, or checkpoint inhibitor polypeptide of the present disclosure can further comprise a 5′ cap. The 5′ cap useful for the immune response primer, immune response co-stimulatory signal, or checkpoint inhibitor polypeptide-encoding mRNA can bind the mRNA Cap Binding Protein (CBP), thereby increasing mRNA stability. The cap can further assist the removal of 5′ proximal introns removal during mRNA splicing.

[2638] In some embodiments, the polynucleotide comprising an mRNA encoding an immune response primer, immune response co-stimulatory signal, or checkpoint inhibitor polypeptide of the present disclosure comprises a non-hydrolyzable cap structure preventing decapping and thus increasing mRNA half-life. Because cap structure hydrolysis requires cleavage of 5′-ppp-5′ phosphorodiester linkages, modified nucleotides can be used during the capping reaction. For example, a Vaccinia Capping Enzyme from New England Biolabs (Ipswich, MA) can be used with a-thio-guanosine nucleotides according to the manufacturer's instructions to create a phosphorothioate linkage in the 5′-ppp-5′ cap. Additional modified guanosine nucleotides can be used such as a-methyl-phosphonate and seleno-phosphate nucleotides.

[2639] In certain embodiments, the 5′ cap comprises 2′-O-methylation of the ribose sugars of 5′-terminal and/or 5′-anteterminal nucleotides on the 2′-hydroxyl group of the sugar ring. In other embodiments, the caps for the immune response primer, immune response co-stimulatory signal, or checkpoint inhibitor polypeptide-encoding mRNA include cap analogs, which herein are also referred to as synthetic cap analogs, chemical caps, chemical cap analogs, or structural or functional cap analogs, differ from natural (i.e. endogenous, wild-type or physiological) 5′-caps in their chemical structure, while retaining cap function. Cap analogs can be chemically (i.e. non-enzymatically) or enzymatically synthesized and/or linked to the polynucleotides of the disclosure.

[2640] For example, the Anti-Reverse Cap Analog (ARCA) cap contains two guanines linked by a 5′-5′-triphosphate group, wherein one guanine contains an N7 methyl group as well as a 3′-O-methyl group (i.e., N7,3′-O-dimethyl-guanosine-5′-triphosphate-5′-guanosine (m⁷G-3′mppp-G; which can equivalently be designated 3′ O-Me-m7G(5′)ppp(5′)G). The 3′-0 atom of the other, unmodified, guanine becomes linked to the 5′-terminal nucleotide of the capped polynucleotide. The N7—and 3′-O-methlyated guanine provides the terminal moiety of the capped polynucleotide.

[2641] Another exemplary cap is mCAP, which is similar to ARCA but has a 2′-O-methyl group on guanosine (i.e., N7,2′-O-dimethyl-guanosine-5′-triphosphate-5′-guanosine, m⁷Gm-ppp-G).

[2642] In some embodiments, the cap is a dinucleotide cap analog. As a non-limiting example, the dinucleotide cap analog can be modified at different phosphate positions with a boranophosphate group or a phophoroselenoate group such as the dinucleotide cap analogs described in U.S. Pat. No. 8,519,110.

[2643] In another embodiment, the cap is a cap analog is a N7-(4-chlorophenoxyethyl) substituted dinucleotide form of a cap analog known in the art and/or described herein. Non-limiting examples of a N7-(4-chlorophenoxyethyl) substituted dinucleotide form of a cap analog include a N7-(4-chlorophenoxyethyl)-G(5′)ppp(5′)G and a N7-(4-chlorophenoxyethyl)-m^{3′-Ol G(}5′)ppp(5′)G cap analog. See, e.g., the various cap analogs and the methods of synthesizing cap analogs described in Kore et al. (2013) Bioorganic & Medicinal Chemistry 21:4570-4574. In another embodiment, a cap analog of the present disclosure is a 4-chloro/bromophenoxyethyl analog.

[2644] While cap analogs allow for the concomitant capping of a polynucleotide or a region thereof, in an in vitro transcription reaction, up to 20% of transcripts can remain uncapped. This, as well as the structural differences of a cap analog from an endogenous 5′-cap structures of nucleic acids produced by the endogenous, cellular transcription machinery, can lead to reduced translational competency and reduced cellular stability.

[2645] The immune response primer, immune response co-stimulatory signal, or checkpoint inhibitor polypeptide-encoding mRNA of the present disclosure can also be capped post-manufacture (whether IVT or chemical synthesis), using enzymes, in order to generate more authentic 5′-cap structures. As used herein, the phrase “more authentic” refers to a feature that closely mirrors or mimics, either structurally or functionally, an endogenous or wild type feature. That is, a “more authentic” feature is better representative of an endogenous, wild-type, natural or physiological cellular function and/or structure as compared to synthetic features or analogs, etc., of the prior art, or which outperforms the corresponding endogenous, wild-type, natural or physiological feature in one or more respects.

[2646] Non-limiting examples of more authentic 5′ cap structures of the present disclosure are those which, among other things, have enhanced binding of cap binding proteins, increased half-life, reduced susceptibility to 5′ endonucleases and/or reduced 5′decapping, as compared to synthetic 5′cap structures known in the art (or to a wild-type, natural or physiological 5′cap structure). For example, recombinant Vaccinia Virus Capping Enzyme and recombinant 2′-O-methyltransferase enzyme can create a canonical 5′-5′-triphosphate linkage between the 5′-terminal nucleotide of a polynucleotide and a guanine cap nucleotide wherein the cap guanine contains an N7 methylation and the 5′-terminal nucleotide of the mRNA contains a 2′-O-methyl. Such a structure is termed the Cap1 structure. This cap results in a higher translational-competency and cellular stability and a reduced activation of cellular pro-inflammatory cytokines, as compared, e.g., to other 5′cap analog structures known in the art. Cap structures include, but are not limited to, 7mG(5′)ppp(5′)N,pN2p (cap 0), 7mG(5′)ppp(5′)N1mpNp (cap 1), and 7mG(5′)-ppp(5′)N1mpN2mp (cap 2).

[2647] According to the present disclosure, 5′ terminal caps can include endogenous caps or cap analogs. According to the present disclosure, a 5′ terminal cap can comprise a guanine analog. Useful guanine analogs include, but are not limited to, inosine, N1-methyl-guanosine, 2′fluoro-guanosine, 7-deaza-guanosine, 8-oxo-guanosine, 2-amino-guanosine, LNA-guanosine, and 2-azido-guanosine. Poly-A tails

[2648] In some embodiments, a polynucleotide comprising an mRNA encoding an immune response primer, immune response co-stimulatory signal, or checkpoint inhibitor polypeptide of the present disclosure further comprises a poly A tail. In further embodiments, terminal groups on the poly-A tail can be incorporated for stabilization. In other embodiments, a poly-A tail comprises des-3′ hydroxyl tails. The useful poly-A tails can also include structural moieties or 2′-Omethyl modifications as taught by Li et al. (2005) Current Biology 15:1501-1507.

[2649] In one embodiment, the length of a poly-A tail, when present, is greater than 30 nucleotides in length. In another embodiment, the poly-A tail is greater than 35 nucleotides in length (e.g., at least or greater than about 35, 40, 45, 50, 55, 60, 70, 80, 90, 100, 120, 140, 160, 180, 200, 250, 300, 350, 400, 450, 500, 600, 700, 800, 900, 1,000, 1,100, 1,200, 1,300, 1,400, 1,500, 1,600, 1,700, 1,800, 1,900, 2,000, 2,500, and 3,000 nucleotides).

[2650] In some embodiments, the polynucleotide or region thereof includes from about 30 to about 3,000 nucleotides (e.g., from 30 to 50, from 30 to 100, from 30 to 250, from 30 to 500, from 30 to 750, from 30 to 1,000, from 30 to 1,500, from 30 to 2,000, from 30 to 2,500, from 50 to 100, from 50 to 250, from 50 to 500, from 50 to 750, from 50 to 1,000, from 50 to 1,500, from 50 to 2,000, from 50 to 2,500, from 50 to 3,000, from 100 to 500, from 100 to 750, from 100 to 1,000, from 100 to 1,500, from 100 to 2,000, from 100 to 2,500, from 100 to 3,000, from 500 to 750, from 500 to 1,000, from 500 to 1,500, from 500 to 2,000, from 500 to 2,500, from 500 to 3,000, from 1,000 to 1,500, from 1,000 to 2,000, from 1,000 to 2,500, from 1,000 to 3,000, from 1,500 to 2,000, from 1,500 to 2,500, from 1,500 to 3,000, from 2,000 to 3,000, from 2,000 to 2,500, and from 2,500 to 3,000).

[2651] In some embodiments, the poly-A tail is designed relative to the length of the overall polynucleotide or the length of a particular region of the polynucleotide. This design can be based on the length of a coding region, the length of a particular feature or region or based on the length of the ultimate product expressed from the polynucleotides.

[2652] In this context, the poly-A tail can be 10, 20, 30, 40, 50, 60, 70, 80, 90, or 100% greater in length than the polynucleotide or feature thereof. The poly-A tail can also be designed as a fraction of the polynucleotides to which it belongs. In this context, the poly-A tail can be 10, 20, 30, 40, 50, 60, 70, 80, or 90% or more of the total length of the construct, a construct region or the total length of the construct minus the poly-A tail. Further, engineered binding sites and conjugation of polynucleotides for Poly-A binding protein can enhance expression.

[2653] Additionally, multiple distinct polynucleotides can be linked together via the PABP (Poly-A binding protein) through the 3′-end using modified nucleotides at the 3′-terminus of the poly-A tail. Transfection experiments can be conducted in relevant cell lines at and protein production can be assayed by ELISA at 12 hr, 24 hr, 48 hr, 72 hr and day 7 post-transfection.

[2654] In some embodiments, the polynucleotides of the present disclosure are designed to include a polyA-G Quartet region. The G-quartet is a cyclic hydrogen bonded array of four guanine nucleotides that can be formed by G-rich sequences in both DNA and RNA. In this embodiment, the G-quartet is incorporated at the end of the poly-A tail. The resultant polynucleotide is assayed for stability, protein production and other parameters including half-life at various time points. It has been discovered that the polyA-G quartet results in protein production from an mRNA equivalent to at least 75% of that seen using a poly-A tail of 120 nucleotides alone. Start codon region

[2655] In some embodiments, the polynucleotide comprising an mRNA encoding an immune response primer, immune response co-stimulatory signal, or checkpoint inhibitor polypeptide of the present disclosure further comprises regions that are analogous to or function like a start codon region.

[2656] In some embodiments, the translation of a polynucleotide initiates on a codon which is not the start codon AUG. Translation of the polynucleotide can initiate on an alternative start codon such as, but not limited to, ACG, AGG, AAG, CTG/CUG, GTG/GUG, ATA/AUA, ATT/AUU, TTG/UUG. See Touriol et al. (2003) Biology of the Cell 95:169-178 and Matsuda and Mauro (2010) PLoS ONE 5:11. As a non-limiting example, the translation of a polynucleotide begins on the alternative start codon ACG. As another non-limiting example, polynucleotide translation begins on the alternative start codon CTG or CUG. As yet another non-limiting example, the translation of a polynucleotide begins on the alternative start codon GTG or GUG.

[2657] Nucleotides flanking a codon that initiates translation such as, but not limited to, a start codon or an alternative start codon, are known to affect the translation efficiency, the length and/or the structure of the polynucleotide. See, e.g., Matsuda and Mauro (2010) PLoS ONE 5:11. Masking any of the nucleotides flanking a codon that initiates translation can be used to alter the position of translation initiation, translation efficiency, length and/or structure of a polynucleotide.

[2658] In some embodiments, a masking agent is used near the start codon or alternative start codon in order to mask or hide the codon to reduce the probability of translation initiation at the masked start codon or alternative start codon. Non-limiting examples of masking agents include antisense locked nucleic acids (LNA) polynucleotides and exon-junction complexes (EJCs). See, e.g., Matsuda and Mauro (2010) PLoS ONE 5:11, describing masking agents LNA polynucleotides and EJCs.

[2659] In another embodiment, a masking agent is used to mask a start codon of a polynucleotide in order to increase the likelihood that translation will initiate on an alternative start codon. In some embodiments, a masking agent is used to mask a first start codon or alternative start codon in order to increase the chance that translation will initiate on a start codon or alternative start codon downstream to the masked start codon or alternative start codon.

[2660] In some embodiments, a start codon or alternative start codon is located within a perfect complement for a miR binding site. The perfect complement of a miR binding site can help control the translation, length and/or structure of the polynucleotide similar to a masking agent. As a non-limiting example, the start codon or alternative start codon is located in the middle of a perfect complement for a miR-122 binding site. The start codon or alternative start codon can be located after the first nucleotide, second nucleotide, third nucleotide, fourth nucleotide, fifth nucleotide, sixth nucleotide, seventh nucleotide, eighth nucleotide, ninth nucleotide, tenth nucleotide, eleventh nucleotide, twelfth nucleotide, thirteenth nucleotide, fourteenth nucleotide, fifteenth nucleotide, sixteenth nucleotide, seventeenth nucleotide, eighteenth nucleotide, nineteenth nucleotide, twentieth nucleotide or twenty-first nucleotide.

[2661] In another embodiment, the start codon of a polynucleotide is removed from the polynucleotide sequence in order to have the translation of the polynucleotide begin on a codon which is not the start codon. Translation of the polynucleotide can begin on the codon following the removed start codon or on a downstream start codon or an alternative start codon. In a non-limiting example, the start codon ATG or AUG is removed as the first 3 nucleotides of the polynucleotide sequence in order to have translation initiate on a downstream start codon or alternative start codon. The polynucleotide sequence where the start codon was removed can further comprise at least one masking agent for the downstream start codon and/or alternative start codons in order to control or attempt to control the initiation of translation, the length of the polynucleotide and/or the structure of the polynucleotide.

### Stop Codon Region

[2662] In some embodiments, the polynucleotide comprising an mRNA encoding an immune response primer, immune response co-stimulatory signal, or checkpoint inhibitor polypeptide of the present disclosure can further comprise at least one stop codon or at least two stop codons before the 3′ untranslated region (UTR). The stop codon can be selected from UGA, UAA, and UAG. In some embodiments, the polynucleotides of the present disclosure include the stop codon UGA and one additional stop codon. In a further embodiment the addition stop codon can be UAA. In another embodiment, the polynucleotides of the present disclosure include three stop codons, four stop codons, or more.

### IX. Methods of Making Polynucleotides

[2663] The present disclosure also provides methods for making a polynucleotide disclosed herein or a complement thereof. In some aspects, a polynucleotide (e.g., an mRNA) disclosed herein, and encoding an immune response primer, immune response co-stimulatory signal, or checkpoint inhibitor polypeptide of the present disclosure can be constructed using in vitro transcription.

[2664] In other aspects, a polynucleotide (e.g., an mRNA) disclosed herein, and encoding an immune response primer, immune response co-stimulatory signal, or checkpoint inhibitor polypeptide of the present disclosure can be constructed by chemical synthesis using an oligonucleotide synthesizer. In other aspects, a polynucleotide (e.g., an mRNA) disclosed herein, and encoding an immune response primer, immune response co-stimulatory signal, or checkpoint inhibitor polypeptide of the present disclosure is made by using a host cell. In certain aspects, a polynucleotide (e.g., an mRNA) disclosed herein, and encoding an immune response primer, immune response co-stimulatory signal, or checkpoint inhibitor polypeptide of the present disclosure is made by one or more combination of the IVT, chemical synthesis, host cell expression, or any other methods known in the art.

[2665] Naturally occurring nucleosides, non-naturally occurring nucleosides, or combinations thereof, can totally or partially naturally replace occurring nucleosides present in the candidate nucleotide sequence and can be incorporated into a sequence-optimized nucleotide sequence (e.g., an mRNA) encoding an immune response primer, immune response co-stimulatory signal, or checkpoint inhibitor polypeptide of the present disclosure. The resultant mRNAs can then be examined for their ability to produce protein and/or produce a therapeutic outcome.

### In Vitro Transcription-Enzymatic Synthesis

[2666] A polynucleotide disclosed herein can be transcribed using an in vitro transcription (IVT) system. The system typically comprises a transcription buffer, nucleotide triphosphates (NTPs), an RNase inhibitor and a polymerase. The NTPs can be selected from, but are not limited to, those described herein including natural and unnatural (modified) NTPs. The polymerase can be selected from, but is not limited to, T7 RNA polymerase, T3 RNA polymerase and mutant polymerases such as, but not limited to, polymerases able to incorporate modified nucleic acids. See U.S. Publ. No. US2013-0259923.

[2667] The IVT system typically comprises a transcription buffer, nucleotide triphosphates (NTPs), an RNase inhibitor and a polymerase. The NTPs can be selected from, but are not limited to, those described herein including natural and unnatural (modified) NTPs. The polymerase can be selected from, but is not limited to, T7 RNA polymerase, T3 RNA polymerase and mutant polymerases such as, but not limited to, polymerases able to incorporate polynucleotides disclosed herein.

[2668] Any number of RNA polymerases or variants can be used in the synthesis of the polynucleotides of the present disclosure.

[2669] RNA polymerases can be modified by inserting or deleting amino acids of the RNA polymerase sequence. As a non-limiting example, the RNA polymerase is modified to exhibit an increased ability to incorporate a 2′-modified nucleotide triphosphate compared to an unmodified RNA polymerase. See International Publication WO2008078180 and U.S. Pat. No. 8,101,385.

[2670] Variants can be obtained by evolving an RNA polymerase, optimizing the RNA polymerase amino acid and/or nucleic acid sequence and/or by using other methods known in the art. As a non-limiting example, T7 RNA polymerase variants are evolved using the continuous directed evolution system set out by Esvelt et al. (2011) Nature 472:499-503, where clones of T7 RNA polymerase can encode at least one mutation such as, but not limited to, lysine at position 93 substituted for threonine (K93T), 14M, A7T, E63V, V64D, A65E, D66Y, T76N, C125R, S128R, A136T, N165S, G175R, H176L, Y178H, F182L, L196F, G198V, D208Y, E222K, S228A, Q239R, T243N, G259D, M2671, G280C, H300R, D351A, A354S, E356D, L360P, A383V, Y385C, D388Y, S397R, M401T, N410S, K450R, P45IT, G452V, E484A, H523L, H524N, G542V, E565K, K577E, K577M, N601S, S684Y, L699I, K713E, N748D, Q754R, E775K, A827V, D851N or L864F. As another non-limiting example, T7 RNA polymerase variants can encode at least mutation as described in U.S. Pub. Nos. 20100120024 and 20070117112. Variants of RNA polymerase can also include, but are not limited to, substitutional variants, conservative amino acid substitution, insertional variants, deletional variants and/or covalent derivatives.

[2671] In one aspect, the polynucleotide can be designed to be recognized by the wild type or variant RNA polymerases. In doing so, the polynucleotide can be modified to contain sites or regions of sequence changes from the wild type or parent chimeric polynucleotide.

[2672] Polynucleotide or nucleic acid synthesis reactions can be carried out by enzymatic methods utilizing polymerases. Polymerases catalyze the creation of phosphodiester bonds between nucleotides in a polynucleotide or nucleic acid chain. Currently known DNA polymerases can be divided into different families based on amino acid sequence comparison and crystal structure analysis. DNA polymerase I (pol I) or A polymerase family, including the Klenow fragments of E. coli, Bacillus DNA polymerase I, Thermus aquaticus (Taq) DNA polymerases, and the T7 RNA and DNA polymerases, is among the best studied of these families. Another large family is DNA polymerase a (pol u) or B polymerase family, including all eukaryotic replicating DNA polymerases and polymerases from phages T4 and RB69. Although they employ similar catalytic mechanism, these families of polymerases differ in substrate specificity, substrate analog-incorporating efficiency, degree and rate for primer extension, mode of DNA synthesis, exonuclease activity, and sensitivity against inhibitors.

[2673] DNA polymerases are also selected based on the optimum reaction conditions they require, such as reaction temperature, pH, and template and primer concentrations. Sometimes a combination of more than one DNA polymerases is employed to achieve the desired DNA fragment size and synthesis efficiency. For example, Cheng et al. increase pH, add glycerol and dimethyl sulfoxide, decrease denaturation times, increase extension times, and utilize a secondary thermostable DNA polymerase that possesses a 3′ to 5′ exonuclease activity to effectively amplify long targets from cloned inserts and human genomic DNA. Cheng et al. (1994) Proc. Natl. Acad. Sci. USA 91:5695-5699. RNA polymerases from bacteriophage T3, T7, and SP6 have been widely used to prepare RNAs for biochemical and biophysical studies. RNA polymerases, capping enzymes, and poly-A polymerases are disclosed in International Publication No. WO2014028429 (see also US 20150211039).

[2674] In one aspect, the RNA polymerase which can be used in the synthesis of the polynucleotides described herein is a Syn5 RNA polymerase. See Zhu et al. (2013) Nucleic Acids Research 288:3545-3552. The Syn5 RNA polymerase was recently characterized from marine cyanophage Syn5 by Zhu et al. where they also identified the promoter sequence. See Zhu et al. (2013) Nucleic Acids Research 288:3545-3552. Zhu et al. found that Syn5 RNA polymerase catalyzed RNA synthesis over a wider range of temperatures and salinity as compared to T7 RNA polymerase. Additionally, the requirement for the initiating nucleotide at the promoter was found to be less stringent for Syn5 RNA polymerase as compared to the T7 RNA polymerase making Syn5 RNA polymerase promising for RNA synthesis.

[2675] In one aspect, a Syn5 RNA polymerase can be used in the synthesis of the polynucleotides described herein. As a non-limiting example, a Syn5 RNA polymerase can be used in the synthesis of the polynucleotide requiring a precise 3′-termini.

[2676] In one aspect, a Syn5 promoter can be used in the synthesis of the polynucleotides. As a non-limiting example, the Syn5 promoter can be 5′-ATTGGGCACCCGTAAGGG-3′ (SEQ ID NO:1257) as described by Zhu et al. (2013) Nucleic Acids Research 288:3545-3552.

[2677] In one aspect, a Syn5 RNA polymerase can be used in the synthesis of polynucleotides comprising at least one chemical modification described herein and/or known in the art. (see e.g., the incorporation of pseudo-UTP and 5Me-CTP described in Zhu et al. (2013) Nucleic Acids Research 288:3545-3552.

[2678] In one aspect, the polynucleotides described herein can be synthesized using a Syn5 RNA polymerase which has been purified using modified and improved purification procedure described by Zhu et al. (2013) Nucleic Acids Research 288:3545-3552.

[2679] Various tools in genetic engineering are based on the enzymatic amplification of a target gene which acts as a template. For the study of sequences of individual genes or specific regions of interest and other research needs, it is necessary to generate multiple copies of a target gene from a small sample of polynucleotides or nucleic acids. Such methods can be applied in the manufacture of the polynucleotides of the disclosure.

[2680] Polymerase chain reaction (PCR) has wide applications in rapid amplification of a target gene, as well as genome mapping and sequencing. The key components for synthesizing DNA comprise target DNA molecules as a template, primers complementary to the ends of target DNA strands, deoxynucleoside triphosphates (dNTPs) as building blocks, and a DNA polymerase. As PCR progresses through denaturation, annealing and extension steps, the newly produced DNA molecules can act as a template for the next circle of replication, achieving exponentially amplification of the target DNA. PCR requires a cycle of heating and cooling for denaturation and annealing. Variations of the basic PCR include asymmetric PCR (Innis et al. (1988) Proc. Natl. Acad. Sci. USA 85:9436-9440), inverse PCR (Ochman et al. (1988) Genetics 120:621-623), reverse transcription PCR (RT-PCR) (Freeman et al. (1999) BioTechniques 26:112-22, 124-5). In RT-PCR, a single stranded RNA is the desired target and is converted to a double stranded DNA first by reverse transcriptase.

[2681] A variety of isothermal in vitro nucleic acid amplification techniques have been developed as alternatives or complements of PCR. For example, strand displacement amplification (SDA) is based on the ability of a restriction enzyme to form a nick. Walker et al. (1992) Proc. Natl. Acad. Sci. USA 89:392-396, the contents of which are incorporated herein by reference in their entirety.

[2682] A restriction enzyme recognition sequence is inserted into an annealed primer sequence. Primers are extended by a DNA polymerase and dNTPs to form a duplex. Only one strand of the duplex is cleaved by the restriction enzyme. Each single strand chain is then available as a template for subsequent synthesis. SDA does not require the complicated temperature control cycle of PCR.

[2683] Nucleic acid sequence-based amplification (NASBA), also called transcription mediated amplification (TMA), is also an isothermal amplification method that utilizes a combination of DNA polymerase, reverse transcriptase, RNAse H, and T7 RNA polymerase. Compton (1991) Nature 350:91-92. A target RNA is used as a template and a reverse transcriptase synthesizes its complementary DNA strand. RNAse H hydrolyzes the RNA template, making space for a DNA polymerase to synthesize a DNA strand complementary to the first DNA strand which is complementary to the RNA target, forming a DNA duplex. T7 RNA polymerase continuously generates complementary RNA strands of this DNA duplex. These RNA strands act as templates for new cycles of DNA synthesis, resulting in amplification of the target gene.

[2684] Rolling-circle amplification (RCA) amplifies a single stranded circular polynucleotide and involves numerous rounds of isothermal enzymatic synthesis where D29 DNA polymerase extends a primer by continuously progressing around the polynucleotide circle to replicate its sequence over and over again. Therefore, a linear copy of the circular template is achieved. A primer can then be annealed to this linear copy and its complementary chain can be synthesized. See Lizardi et al. (1998) Nature Genetics 19:225-232. A single stranded circular DNA can also serve as a template for RNA synthesis in the presence of an RNA polymerase. Daubendiek et al. (1995) JACS 117:7818-7819. An inverse rapid amplification of cDNA ends (RACE) RCA is described by Polidoros et al. A messenger RNA (mRNA) is reverse transcribed into cDNA, followed by RNAse H treatment to separate the cDNA. The cDNA is then circularized by CircLigase into a circular DNA. The amplification of the resulting circular DNA is achieved with RCA. Polidoros et al. (2006) BioTechniques 41:35-42.

[2685] Any of the foregoing methods can be utilized in the manufacture of one or more regions of the polynucleotides of the present disclosure.

[2686] Assembling polynucleotides or nucleic acids by a ligase is also widely used. DNA or RNA ligases promote intermolecular ligation of the 5′ and 3′ ends of polynucleotide chains through the formation of a phosphodiester bond. Ligase chain reaction (LCR) is a promising diagnosing technique based on the principle that two adjacent polynucleotide probes hybridize to one strand of a target gene and couple to each other by a ligase. If a target gene is not present, or if there is a mismatch at the target gene, such as a single-nucleotide polymorphism (SNP), the probes cannot ligase. Wiedmann et al. (1994) PCR Methods and Application 3(4):s51-s64. LCR can be combined with various amplification techniques to increase sensitivity of detection or to increase the amount of products if it is used in synthesizing polynucleotides and nucleic acids.

[2687] Several library preparation kits for nucleic acids are now commercially available. They include enzymes and buffers to convert a small amount of nucleic acid samples into an indexed library for downstream applications. For example, DNA fragments can be placed in a NEBNEXT® ULTRA™ DNA Library Prep Kit by NEWENGLAND BIOLABS® for end preparation, ligation, size selection, clean-up, PCR amplification and final clean-up.

[2688] Continued development is going on to improvement the amplification techniques. For example, U.S. Pat. No. 8,367,328 to Asada et al., teaches utilizing a reaction enhancer to increase the efficiency of DNA synthesis reactions by DNA polymerases. The reaction enhancer comprises an acidic substance or cationic complexes of an acidic substance. U.S. Pat. 7.384,739 to Kitabayashi et al., teaches a carboxylate ion-supplying substance that promotes enzymatic DNA synthesis, wherein the carboxylate ion-supplying substance is selected from oxalic acid, malonic acid, esters of oxalic acid, esters of malonic acid, salts of malonic acid, and esters of maleic acid. U.S. Pat. No. 7,378,262 to Sobek et al., discloses an enzyme composition to increase fidelity of DNA amplifications. The composition comprises one enzyme with 3′ exonuclease activity but no polymerase activity and another enzyme that is a polymerase. Both of the enzymes are thermostable and are reversibly modified to be inactive at lower temperatures.

[2689] U.S. Pat. No. 7,550,264 to Getts et al. teaches multiple round of synthesis of sense RNA molecules are performed by attaching oligodeoxynucleotides tails onto the 3′ end of cDNA molecules and initiating RNA transcription using RNA polymerase. U.S. Pat. Publication No. 2013/0183718 to Rohayem teaches RNA synthesis by RNA-dependent RNA polymerases (RdRp) displaying an RNA polymerase activity on single-stranded DNA templates. Oligonucleotides with non-standard nucleotides can be synthesized with enzymatic polymerization by contacting a template comprising non-standard nucleotides with a mixture of nucleotides that are complementary to the nucleotides of the template as disclosed in U.S. Pat. No. 6,617,106 to Benner. Chemical synthesis

[2690] Standard methods can be applied to synthesize an isolated polynucleotide sequence encoding an immune response primer, immune response co-stimulatory signal, or checkpoint inhibitor polypeptide of the present disclosure. For example, a single DNA or RNA oligomer containing a codon-optimized nucleotide sequence coding for the particular isolated polypeptide can be synthesized. In other aspects, several small oligonucleotides coding for portions of the desired polypeptide can be synthesized and then ligated. In some aspects, the individual oligonucleotides typically contain 5′ or 3′ overhangs for complementary assembly.

[2691] A polynucleotide disclosed herein (e.g., mRNA) can be chemically synthesized using chemical synthesis methods and potential nucleobase substitutions known in the art. See, for example, International Publication Nos. WO2014093924 (see also US20150307542), WO2013052523 (see also US20130115272); WO2013039857, WO2012135805 (see also US20120251618), WO2013151671 (see also US20150044277); U.S. Publ. No. US20130115272; or U.S. Pat. Nos. U.S. Pat. Nos. 8,999,380; 8,710,200. Purification

[2692] Purification of the polynucleotides (e.g., mRNA) encoding an immune response primer, immune response co-stimulatory signal, or checkpoint inhibitor polypeptide described herein can include, but is not limited to, polynucleotide clean-up, quality assurance and quality control. Clean-up can be performed by methods known in the arts such as, but not limited to, AGENCOURT® beads (Beckman Coulter Genomics, Danvers, MA), poly-T beads, LNA™ oligo-T capture probes (EXIQON® Inc, Vedbaek, Denmark) or HPLC based purification methods such as, but not limited to, strong anion exchange HPLC, weak anion exchange HPLC, reverse phase HPLC (RP-HPLC), and hydrophobic interaction HPLC (HIC-HPLC). The term “purified” when used in relation to a polynucleotide such as a “purified polynucleotide” refers to one that is separated from at least one contaminant. As used herein, a “contaminant” is any substance which makes another unfit, impure or inferior. Thus, a purified polynucleotide (e.g., DNA and RNA) is present in a form or setting different from that in which it is found in nature, or a form or setting different from that which existed prior to subjecting it to a treatment or purification method.

[2693] In some embodiments, purification of a polynucleotide (e.g., mRNA) encoding an immune response primer, immune response co-stimulatory signal, or checkpoint inhibitor polypeptide of the disclosure removes impurities that can reduce or remove an unwanted immune response, e.g., reducing cytokine activity.

[2694] In some embodiments, the polynucleotide (e.g., mRNA) encoding an immune response primer, immune response co-stimulatory signal, or checkpoint inhibitor polypeptide of the disclosure is purified prior to administration using column chromatography (e.g., strong anion exchange HPLC, weak anion exchange HPLC, reverse phase HPLC (RP-HPLC), and hydrophobic interaction HPLC (HIC-HPLC), or (LCMS)). In some embodiments, a column chromatography (e.g., strong anion exchange HPLC, weak anion exchange HPLC, reverse phase HPLC (RP-HPLC), and hydrophobic interaction HPLC (HIC-HPLC), or (LCMS)) purified polynucleotide, which encodes an immune response primer, immune response co-stimulatory signal, or checkpoint inhibitor polypeptide disclosed herein increases expression of the immune response primer, immune response co-stimulatory signal, or checkpoint inhibitor polypeptide compared to polynucleotides encoding the immune response primer, immune response co-stimulatory signal, or checkpoint inhibitor polypeptide purified by a different purification method.

[2695] In some embodiments, a column chromatography (e.g., strong anion exchange HPLC, weak anion exchange HPLC, reverse phase HPLC (RP-HPLC), and hydrophobic interaction HPLC (HIC-HPLC), or (LCMS)) purified polynucleotide encodes an immune response primer, immune response co-stimulatory signal, or checkpoint inhibitor polypeptide. In some embodiments, the purified polynucleotide encodes a mammalian immune response primer, immune response co-stimulatory signal, or checkpoint inhibitor polypeptide. In some embodiments, the purified polynucleotide encodes a human immune response primer, immune response co-stimulatory signal, or checkpoint inhibitor polypeptide.

[2696] In some embodiments, the purified polynucleotide encoding an immune response primer, immune response co-stimulatory signal, or checkpoint inhibitor polypeptide is at least about 80% pure, at least about 85% pure, at least about 90% pure, at least about 95% pure, at least about 96% pure, at least about 97% pure, at least about 98% pure, at least about 99% pure, or about 100% pure.

[2697] A quality assurance and/or quality control check can be conducted using methods such as, but not limited to, gel electrophoresis, UV absorbance, or analytical HPLC.

[2698] In another embodiment, the polynucleotide encoding an immune response primer, immune response co-stimulatory signal, or checkpoint inhibitor polypeptide can be sequenced by methods including, but not limited to reverse-transcriptase-PCR.

### X. Chemical Modifications

[2699] As used herein in polynucleotides comprising an mRNA encoding an immune response primer, immune response co-stimulatory signal, or checkpoint inhibitor polypeptide, or combinations thereof according to the present disclosure, the terms “chemical modification” or, as appropriate, “chemically modified” refer to modification with respect to adenosine (A), guanosine (G), uridine (U), thymidine (T) or cytidine (C) ribo- or deoxyribonucleotides in one or more of their position, pattern, percent or population. Generally, herein, these terms are not intended to refer to the ribonucleotide modifications in naturally occurring 5′-terminal mRNA cap moieties.

[2700] In a polypeptide, the term “modification” refers to a modification as compared to the canonical set of 20 amino acids.

[2701] The modifications can be various distinct modifications. In some embodiments, the regions can contain one, two, or more (optionally different) nucleoside or nucleotide (nucleobase) modifications. In some embodiments, a modified polynucleotide, introduced to a cell can exhibit reduced degradation in the cell, as compared to an unmodified polynucleotide. In other embodiments, the modification is in the nucleobase and/or the sugar structure. In yet other embodiments, the modification is in the backbone structure. Chemical Modifications

[2702] Some embodiments of the present disclosure provide a combination of mRNAs encoding an immune response primer, an immune response co-stimulatory signal, a checkpoint inhibitor polypeptide, or a combination thereof (e.g., a doublet or triplet of mRNAs to be used in a combination therapy) in which at least one of the mRNAs includes at least one chemical modification.

[2703] In some embodiments, the chemical modification is selected from pseudouridine, N1-methylpseudouridine, 2-thiouridine, 4′-thiouridine, 5-methylcytosine, 2-thio-1-methyl-1-deaza-pseudouridine, 2-thio-1-methyl-pseudouridine, 2-thio-5-aza-uridine, 2-thio-dihydropseudouridine, 2-thio-dihydrouridine, 2-thio-pseudouridine, 4-methoxy-2-thio-pseudouridine, 4-methoxy-pseudouridine, 4-thio-1-methyl-pseudouridine, 4-thio-pseudouridine, 5-aza-uridine, dihydropseudouridine, 5-methyluridine,), 5-methoxyuridine, and 2′-O-methyl uridine.

[2704] A “nucleoside” as used herein refers to a compound containing a sugar molecule (e.g., a pentose or ribose) or a derivative thereof in combination with an organic base (e.g., a purine or pyrimidine) or a derivative thereof (also referred to herein as “nucleobase”). A “nucleotide” as used herein refers to a nucleoside, including a phosphate group. Modified nucleotides can be synthesized by any useful method, such as, for example, chemically, enzymatically, or recombinantly, to include one or more modified or non-natural nucleosides. Polynucleotides can comprise a region or regions of linked nucleosides. Such regions can have variable backbone linkages. The linkages can be standard phosphodiester linkages, in which case the polynucleotides would comprise regions of nucleotides.

[2705] Modified nucleotide base pairing encompasses not only the standard adenosine-thymine, adenosine-uracil, or guanosine-cytosine base pairs, but also base pairs formed between nucleotides and/or modified nucleotides comprising non-standard or modified bases, wherein the arrangement of hydrogen bond donors and hydrogen bond acceptors permits hydrogen bonding between a non-standard base and a standard base or between two complementary non-standard base structures. One example of such non-standard base pairing is the base pairing between the modified nucleotide inosine and adenine, cytosine or uracil. Any combination of base/sugar or linker can be incorporated into polynucleotides of the present disclosure.

[2706] The skilled artisan will appreciate that, except where otherwise noted, polynucleotide sequences set forth in the instant application will recite “T”s in a representative DNA sequence but where the sequence represents RNA, the “T”s would be substituted for “U”s.

[2707] Modifications of polynucleotides (e.g., RNA polynucleotides, such as mRNA polynucleotides) that are useful in the polynucleotides, compositions, methods and synthetic processes of the present disclosure include, but are not limited to the following nucleotides, nucleosides, and nucleobases: 2-methylthio-N6-(cis-hydroxyisopentenyl)adenosine; 2-methylthio-N6-methyladenosine; 2-methylthio-N6-threonyl carbamoyladenosine; N6-glycinylcarbamoyladenosine; N6-isopentenyladenosine; N6-methyladenosine; N6-threonylcarbamoyladenosine; 1,2′-O-dimethyladenosine; 1-methyladenosine; 2′-O-methyladenosine; 2′-O-ribosyladenosine (phosphate); 2-methyladenosine; 2-methylthio-N6 isopentenyladenosine; 2-methylthio-N6-hydroxynorvalyl carbamoyladenosine; 2′-O-methyladenosine; 2′-O-ribosyladenosine (phosphate); isopentenyladenosine; N6-(cis-hydroxyisopentenyl)adenosine; N6,2′-O-dimethyladenosine; N6,2′-O-dimethyladenosine; N6,N6,2′-O-trimethyladenosine; N6,N6-dimethyladenosine; N6-acetyladenosine; N6-hydroxynorvalylcarbamoyladenosine; N6-methyl-N6-threonylcarbamoyladenosine; 2-methyladenosine; 2-methylthio-N6-isopentenyladenosine; 7-deaza-adenosine; N1-methyl-adenosine; N6, N6 (dimethyl)adenine; N6-cis-hydroxy-isopentenyl-adenosine; a-thio-adenosine; 2-(amino)adenine; 2-(aminopropyl)adenine; 2-(methylthio) N6 (isopentenyl)adenine; 2-(alkyl)adenine; 2-(aminoalkyl)adenine; 2-(aminopropyl)adenine; 2-(halo)adenine; 2-(halo)adenine; 2-(propyl)adenine; 2′-amino-2′-deoxy-ATP; 2′-azido-2′-deoxy-ATP; 2′-deoxy-2′-a-aminoadenosine TP; 2′-Deoxy-2′-a-azidoadenosine TP; 6-(alkyl)adenine; 6-(methyl)adenine; 6-(alkyl)adenine; 6-(methyl)adenine; 7-(deaza)adenine; 8-(alkenyl)adenine; 8-(alkynyl)adenine; 8-(amino)adenine; 8-(thioalkyl)adenine; 8-(alkenyl)adenine; 8-(alkyl)adenine; 8-(alkynyl)adenine; 8-(amino)adenine; 8-(halo)adenine; 8-(hydroxyl)adenine; 8-(thioalkyl)adenine; 8-(thiol)adenine; 8-azido-adenosine; aza-adenine; deaza-adenine; N6-(methyl)adenine; N6-(isopentyl)adenine; 7-deaza-8-aza-adenosine; 7-methyladenine; 1-deaza-adenosine TP; 2′-fluoro-N6-Bz-deoxyadenosine TP; 2′-OMe-2-amino-ATP; 2′O-methyl-N6-Bz-deoxyadenosine TP; 2′-a-ethynyladenosine TP; 2-aminoadenine; 2-aminoadenosine TP; 2-amino-ATP; 2′-a-trifluoromethyladenosine TP; 2-azidoadenosine TP; 2′-b-ethynyladenosine TP; 2-bromoadenosine TP; 2′-b-trifluoromethyladenosine TP; 2-chloroadenosine TP; 2′-deoxy-2′,2′-difluoroadenosine TP; 2′-deoxy-2′-a-mercaptoadenosine TP; 2′-deoxy-2′-a-thiomethoxyadenosine TP; 2′-deoxy-2′-b-aminoadenosine TP; 2′-deoxy-2′-b-azidoadenosine TP; 2′-deoxy-2′-b-bromoadenosine TP; 2′-deoxy-2′-b-chloroadenosine TP; 2′-deoxy-2′-b-fluoroadenosine TP; 2′-deoxy-2′-b-iodoadenosine TP; 2′-deoxy-2′-b-mercaptoadenosine TP; 2′-deoxy-2′-b-thiomethoxyadenosine TP; 2-fluoroadenosine TP; 2-iodoadenosine TP; 2-mercaptoadenosine TP; 2-methoxy-adenine; 2-methylthio-adenine; 2-trifluoromethyladenosine TP; 3-deaza-3-bromoadenosine TP; 3-deaza-3-chloroadenosine TP; 3-deaza-3-fluoroadenosine TP; 3-deaza-3-iodoadenosine TP; 3-deazaadenosine TP; 4′-azidoadenosine TP; 4′-carbocyclic adenosine TP; 4′-ethynyladenosine TP; 5′-homo-adenosine TP; 8-aza-ATP; 8-bromo-adenosine TP; 8-trifluoromethyladenosine TP; 9-deazaadenosine TP; 2-aminopurine; 7-deaza-2,6-diaminopurine; 7-deaza-8-aza-2,6-diaminopurine; 7-deaza-8-aza-2-aminopurine; 2,6-diaminopurine; 7-deaza-8-aza-adenine, 7-deaza-2-aminopurine; 2-thiocytidine; 3-methylcytidine; 5-formylcytidine; 5-hydroxymethylcytidine; 5-methylcytidine; N4-acetylcytidine; 2′-O-methylcytidine; 2′-O-methylcytidine; 5,2′-O-dimethylcytidine; 5-formyl-2′-O-methylcytidine; lysidine; N4,2′-O-dimethylcytidine; N4-acetyl-2′-O-methylcytidine; N4-methylcytidine; N4,N4-dimethyl-2′-OMe-cytidine TP; 4-methylcytidine; 5-aza-cytidine; pseudo-iso-cytidine; pyrrolo-cytidine; α-thio-cytidine; 2-(thio)cytosine; 2′-amino-2′-deoxy-CTP; 2′-azido-2′-deoxy-CTP; 2′-deoxy-2′-a-aminocytidine TP; 2′-deoxy-2′-a-azidocytidine TP; 3-(deaza)-5-(aza)cytosine; 3-(methyl)cytosine; 3-(alkyl)cytosine; 3-(deaza)-5-(aza)cytosine; 3-(methyl)cytidine; 4,2′-O-dimethylcytidine; 5-(halo)cytosine; 5-(methyl)cytosine; 5-(propynyl)cytosine; 5-(trifluoromethyl)cytosine; 5-(alkyl)cytosine; 5-(alkynyl)cytosine; 5-(halo)cytosine; 5-(propynyl)cytosine; 5-(trifluoromethyl)cytosine; 5-bromo-cytidine; 5-iodo-cytidine; 5-propynyl cytosine; 6-(azo)cytosine; 6-aza-cytidine; aza-cytosine; deaza-cytosine; N4-(acetyl)cytosine; 1-methyl-1-deaza-pseudoisocytidine; 1-methyl-pseudoisocytidine; 2-methoxy-5-methyl-cytidine; 2-methoxy-cytidine; 2-thio-5-methyl-cytidine; 4-methoxy-1-methyl-pseudoisocytidine; 4-methoxy-pseudoisocytidine; 4-thio-1-methyl-1-deaza-pseudoisocytidine; 4-thio-1-methyl-pseudoisocytidine; 4-thio-pseudoisocytidine; 5-aza-zebularine; 5-methyl-zebularine; pyrrolo-pseudoisocytidine; zebularine; (E)-5-(2-bromo-vinyl)cytidine TP; 2,2′-anhydro-cytidine TP hydrochloride; 2′fluor-N4-Bz-cytidine TP; 2′fluoro-N4-acetyl-cytidine TP; 2′-O-methyl-N4-acetyl-cytidine TP; 2′O-methyl-N4-Bz-cytidine TP; 2′-a-ethynylcytidine TP; 2′-a-trifluoromethylcytidine TP; 2′-b-ethynylcytidine TP; 2′-b-trifluoromethylcytidine TP; 2′-deoxy-2′,2′-difluorocytidine TP; 2′-deoxy-2′-a-mercaptocytidine TP; 2′-deoxy-2′-α-thiomethoxycytidine TP; 2′-deoxy-2′-b-aminocytidine TP; 2′-deoxy-2′-b-azidocytidine TP; 2′-deoxy-2′-b-bromocytidine TP; 2′-deoxy-2′-b-chlorocytidine TP; 2′-deoxy-2′-b-fluorocytidine TP; 2′-deoxy-2′-b-iodocytidine TP; 2′-deoxy-2′-b-mercaptocytidine TP; 2′-deoxy-2′-b-thiomethoxycytidine TP; 2′-O-methyl-5-(1-propynyl)cytidine TP; 3′-ethynylcytidine TP; 4′-azidocytidine TP; 4′-carbocyclic cytidine TP; 4′-ethynylcytidine TP; 5-(1-propynyl)ara-cytidine TP; 5-(2-chloro-phenyl)-2-thiocytidine TP; 5-(4-Amino-phenyl)-2-thiocytidine TP; 5-aminoallyl-CTP; 5-cyanocytidine TP; 5-ethynylara-cytidine TP; 5-ethynylcytidine TP; 5′-homo-cytidine TP; 5-methoxycytidine TP; 5-trifluoromethyl-cytidine TP; N4-amino-cytidine TP; N4-benzoyl-cytidine TP; pseudoisocytidine; 7-methylguanosine; N2,2′-O-dimethylguanosine; N2-methylguanosine; wyosine; 1,2′-O-dimethylguanosine; 1-methylguanosine; 2′-O-methylguanosine; 2′-O-ribosylguanosine(phosphate); 2′-O-methylguanosine; 2′-O-ribosylguanosine(phosphate); 7-aminomethyl-7-deazaguanosine; 7-cyano-7-deazaguanosine; archaeosine; methylwyosine; N2,7-dimethylguanosine; N2,N2,2′-O-trimethylguanosine; N2,N2,7-trimethylguanosine; N2,N2-dimethylguanosine; N2,7,2′-O-trimethylguanosine; 6-thio-guanosine; 7-deaza-guanosine; 8-oxo-guanosine; N1-methyl-guanosine; α-thio-guanosine; 2 (propyl)guanine; 2-(alkyl)guanine; 2′-amino-2′-deoxy-GTP; 2′-azido-2′-deoxy-GTP; 2′-deoxy-2′-a-aminoguanosine TP; 2′-deoxy-2′-a-azidoguanosine TP; 6-(methyl)guanine; 6-(alkyl)guanine; 6-(methyl)guanine; 6-methyl-guanosine; 7-(alkyl)guanine; 7-(deaza)guanine; 7-(methyl)guanine; 7-(alkyl)guanine; 7-(deaza)guanine; 7-(methyl)guanine; 8-(alkyl)guanine; 8-(alkynyl)guanine; 8-(halo)guanine; 8-(thioalkyl)guanine; 8-(alkenyl)guanine; 8-(alkyl)guanine; 8-(alkynyl)guanine; 8-(amino)guanine; 8-(halo)guanine; 8-(hydroxyl)guanine; 8-(thioalkyl)guanine; 8-(thiol)guanine; aza-guanine; deaza-guanine; N (methyl)guanine; N-(methyl)guanine; 1-methyl-6-thio-guanosine; 6-methoxy-guanosine; 6-thio-7-deaza-8-aza-guanosine; 6-thio-7-deaza-guanosine; 6-thio-7-methyl-guanosine; 7-deaza-8-aza-guanosine; 7-methyl-8-oxo-guanosine; N2,N2-dimethyl-6-thio-guanosine; N2-methyl-6-thio-guanosine; 1-Me-GTP; 2′fluoro-N2-isobutyl-guanosine TP; 2′O-methyl-N2-isobutyl-guanosine TP; 2′-a-ethynylguanosine TP; 2′-a-trifluoromethylguanosine TP; 2′-b-ethynylguanosine TP; 2′-b-trifluoromethylguanosine TP; 2′-deoxy-2′,2′-difluoroguanosine TP; 2′-deoxy-2′-a-mercaptoguanosine TP; 2′-deoxy-2′-α-thiomethoxyguanosine TP; 2′-deoxy-2′-b-aminoguanosine TP; 2′-deoxy-2′-b-azidoguanosine TP; 2′-deoxy-2′-b-bromoguanosine TP; 2′-deoxy-2′-b-chloroguanosine TP; 2′-deoxy-2′-b-fluoroguanosine TP; 2′-deoxy-2′-b-iodoguanosine TP; 2′-deoxy-2′-b-mercaptoguanosine TP; 2′-deoxy-2′-b-thiomethoxyguanosine TP; 4′-azidoguanosine TP; 4′-carbocyclic guanosine TP; 4′-ethynylguanosine TP; 5′-homo-guanosine TP; 8-bromo-guanosine TP; 9-deazaguanosine TP; N2-isobutyl-guanosine TP; 1-methylinosine; Inosine; 1,2′-O-dimethylinosine; 2′-O-methylinosine; 7-methylinosine; 2′-O-methylinosine; epoxyqueuosine; galactosyl-queuosine; mannosylqueuosine; Queuosine; allyamino-thymidine; aza thymidine; deaza thymidine; deoxy-thymidine; 2′-O-methyluridine; 2-thiouridine; 3-methyluridine; 5-carboxymethyluridine; 5-hydroxyuridine; 5-methyluridine; 5-taurinomethyl-2-thiouridine; 5-taurinomethyluridine; dihydrouridine; pseudouridine; (3-(3-amino-3-carboxypropyl)uridine; 1-methyl-3-(3-amino-5-carboxypropyl)pseudouridine; 1-methylpseduouridine; 1-ethyl-pseudouridine; 2′-O-methyluridine; 2′-O-methylpseudouridine; 2′-O-methyluridine; 2-thio-2′-O-methyluridine; 3-(3-amino-3-carboxypropyl)uridine; 3,2′-O-dimethyluridine; 3-methyl-pseudo-uridine TP; 4-thiouridine; 5-(carboxyhydroxymethyl)uridine; 5-(carboxyhydroxymethyl)uridine methyl ester; 5,2′-O-dimethyluridine; 5,6-dihydro-uridine; 5-aminomethyl-2-thiouridine; 5-carbamoylmethyl-2′-O-methyluridine; 5-carbamoylmethyluridine; 5-carboxyhydroxymethyluridine; 5-carboxyhydroxymethyluridine methyl ester; 5-carboxymethylaminomethyl-2′-O-methyluridine; 5-carboxymethylaminomethyl-2-thiouridine; 5-carboxymethylaminomethyl-2-thiouridine; 5-carboxymethylaminomethyluridine; 5-carboxymethylaminomethyluridine; 5-carbamoylmethyluridine TP; 5-methoxycarbonylmethyl-2′-O-methyluridine; 5-methoxycarbonylmethyl-2-thiouridine; 5-methoxycarbonylmethyluridine; 5-methyluridine,), 5-methoxyuridine; 5-methyl-2-thiouridine; 5-methylaminomethyl-2-selenouridine; 5-methylaminomethyl-2-thiouridine; 5-methylaminomethyluridine; 5-methyldihydrouridine; 5-oxyacetic-acid-uridine TP; 5-oxyacetic acid-methyl ester-Uridine TP; N1-methyl-pseudo-uracil; N1-ethyl-pseudo-uracil; uridine 5-oxyacetic acid; uridine 5-oxyacetic acid methyl ester; 3-(3-amino-3-carboxypropyl)-uridine TP; 5-(iso-pentenylaminomethyl)-2-thiouridine TP; 5-(iso-pentenylaminomethyl)-2′-O-methyluridine TP; 5-(iso-pentenylaminomethyl)uridine TP; 5-propynyl uracil; α-thio-uridine; 1-(aminoalkylamino-carbonylethylenyl)-2(thio)-pseudouracil; 1-(aminoalkylaminocarbonylethylenyl)-2,4-(dithio)pseudouracil; 1-(aminoalkylaminocarbonylethylenyl)-4-(thio)pseudouracil; 1-(aminoalkylaminocarbonylethylenyl)-pseudouracil; 1-(aminocarbonylethylenyl)-2(thio)-pseudouracil; 1-(aminocarbonylethylenyl)-2,4-(dithio)pseudouracil; 1-(aminocarbonylethylenyl)-4 (thio)pseudouracil; 1-(aminocarbonylethylenyl)-pseudouracil; 1 substituted 2(thio)-pseudouracil; 1 substituted 2,4-(dithio)pseudouracil; 1 substituted 4 (thio)pseudouracil; 1 substituted pseudouracil; 1-(aminoalkylamino-carbonylethylenyl)-2-(thio)-pseudouracil; 1-methyl-3-(3-amino-3-carboxypropyl) pseudouridine TP; 1-Methyl-3-(3-amino-3-carboxypropyl)pseudo-UTP; 1-methyl-pseudo-UTP; 1-ethyl-pseudo-UTP; 2 (thio)pseudouracil; 2′ deoxy uridine; 2′ fluorouridine; 2-(thio)uracil; 2,4-(dithio)pseudouracil; 2′ methyl, 2′amino, 2′azido, 2′fluro-guanosine; 2′-amino-2′-deoxy-UTP; 2′-azido-2′-deoxy-UTP; 2′-azido-deoxyuridine TP; 2′-O-methylpseudouridine; 2′ deoxy-uridine; 2′ fluorouridine; 2′-deoxy-2′-a-aminouridine TP; 2′-deoxy-2′-a-azidouridine TP; 2-methylpseudouridine; 3-(3-amino-3-carboxypropyl)uracil; 4-(thio)pseudouracil; 4-(thio)pseudouracil; 4-(thio)uracil; 4-thiouracil; 5 (1,3-diazole-1-alkyl)uracil; 5-(2-aminopropyl)uracil; 5-(aminoalkyl)uracil; 5-(dimethylaminoalkyl)uracil; 5-(guanidiniumalkyl)uracil; 5-(methoxycarbonylmethyl)-2-(thio)uracil; 5-(methoxycarbonyl-methyl)uracil; 5-(methyl)-2-(thio)uracil; 5-(methyl)-2,4-(dithio)uracil; 5-(methyl)-4-(thio)uracil; 5-(methylaminomethyl)-2-(thio)uracil; 5-(methylaminomethyl)-2,4-(dithio)uracil; 5-(methylaminomethyl)-4-(thio)uracil; 5-(propynyl)uracil; 5-(trifluoromethyl)uracil; 5-(2-aminopropyl)uracil; 5-(alkyl)-2-(thio)pseudouracil; 5-(alkyl)-2,4 (dithio)pseudouracil; 5-(alkyl)-4 (thio)pseudouracil; 5-(alkyl)pseudouracil; 5-(alkyl)uracil; 5-(alkynyl)uracil; 5-(allylamino)uracil; 5-(cyanoalkyl)uracil; 5-(dialkylaminoalkyl)uracil; 5-(dimethylaminoalkyl)uracil; 5-(guanidiniumalkyl)uracil; 5-(halo)uracil; 5-(1,3-diazole-1-alkyl)uracil; 5-(methoxy)uracil; 5-(methoxycarbonylmethyl)-2-(thio)uracil; 5-(methoxycarbonyl-methyl)uracil; 5-(methyl) 2(thio)uracil; 5-(methyl)-2,4-(dithio)uracil; 5-(methyl)-4-(thio)uracil; 5-(methyl)-2-(thio)pseudouracil; 5-(methyl)-2,4-(dithio)pseudouracil; 5-(methyl)-4-(thio)pseudouracil; 5-(methyl)pseudouracil; 5-(methylaminomethyl)-2-(thio)uracil; 5-(methylaminomethyl)-2,4(dithio)uracil; 5-(methylaminomethyl)-4-(thio)uracil; 5-(propynyl)uracil; 5-(trifluoromethyl)uracil; 5-aminoallyl-uridine; 5-bromo-uridine; 5-iodo-uridine; 5-uracil; 6 (azo)uracil; 6-(azo)uracil; 6-aza-uridine; allyamino-uracil; aza-uracil; deaza-uracil; N₃ (methyl)uracil; pseudo-UTP-1-2-ethanoic acid; pseudouracil; 4-thio-pseudo-UTP; 1-carboxymethyl-pseudouridine; 1-methyl-1-deaza-pseudouridine; 1-propynyl-uridine; 1-taurinomethyl-1-methyl-uridine; 1-taurinomethyl-4-thio-uridine; 1-taurinomethyl-pseudouridine; 2-methoxy-4-thio-pseudouridine; 2-thio-1-methyl-1-deaza-pseudouridine; 2-thio-1-methyl-pseudouridine; 2-thio-5-aza-uridine; 2-thio-dihydropseudouridine; 2-thio-dihydrouridine; 2-thio-pseudouridine; 4-methoxy-2-thio-pseudouridine; 4-methoxy-pseudouridine; 4-thio-i-methyl-pseudouridine; 4-thio-pseudouridine; 5-aza-uridine; dihydropseudouridine; (+)1-(2-hydroxypropyl)pseudouridine TP; (2R)-1-(2-hydroxypropyl)pseudouridine TP; (2S)-1-(2-hydroxypropyl)pseudouridine TP; (E)-5-(2-bromo-vinyl)ara-uridine TP; (E)-5-(2-bromo-vinyl)uridine TP; (Z)-5-(2-bromo-vinyl)ara-uridine TP; (Z)-5-(2-bromo-vinyl)uridine TP; 1-(2,2,2-trifluoroethyl)-pseudo-UTP; 1-(2,2,3,3,3-pentafluoropropyl)pseudouridine TP; 1-(2,2-diethoxyethyl)pseudouridine TP; 1-(2,4,6-trimethylbenzyl)pseudouridine TP; 1-(2,4,6-trimethyl-benzyl)pseudo-UTP; 1-(2,4,6-trimethyl-phenyl)pseudo-UTP; 1-(2-amino-2-carboxyethyl)pseudo-UTP; 1-(2-amino-ethyl)pseudo-UTP; 1-(2-hydroxyethyl)pseudouridine TP; 1-(2-methoxyethyl)pseudouridine TP; 1-(3,4-bis-trifluoromethoxybenzyl)pseudouridine TP; 1-(3,4-dimethoxybenzyl)pseudouridine TP; 1-(3-amino-3-carboxypropyl)pseudo-UTP; 1-(3-amino-propyl)pseudo-UTP; 1-(3-cyclopropyl-prop-2-ynyl)pseudouridine TP; 1-(4-amino-4-carboxybutyl)pseudo-UTP; 1-(4-amino-benzyl)pseudo-UTP; 1-(4-amino-butyl)pseudo-UTP; 1-(4-amino-phenyl)pseudo-UTP; 1-(4-azidobenzyl)pseudouridine TP; 1-(4-bromobenzyl)pseudouridine TP; 1-(4-chlorobenzyl)pseudouridine TP; 1-(4-fluorobenzyl)pseudouridine TP; 1-(4-iodobenzyl)pseudouridine TP; 1-(4-methanesulfonylbenzyl)pseudouridine TP; 1-(4-methoxybenzyl)pseudouridine TP; 1-(4-methoxy-benzyl)pseudo-UTP; 1-(4-methoxy-phenyl)pseudo-UTP; 1-(4-methylbenzyl)pseudouridine TP; 1-(4-methyl-benzyl)pseudo-UTP; 1-(4-nitrobenzyl)pseudouridine TP; 1-(4-nitro-benzyl)pseudo-UTP; 1(4-nitro-phenyl)pseudo-UTP; 1-(4-thiomethoxybenzyl)pseudouridine TP; 1-(4-trifluoromethoxybenzyl)pseudouridine TP; 1-(4-trifluoromethylbenzyl)pseudouridine TP; 1-(5-amino-pentyl)pseudo-UTP; 1-(6-amino-hexyl)pseudo-UTP; 1,6-dimethyl-pseudo-UTP; 1-[3-(2-{2-[2-(2-aminoethoxy)-ethoxy]-ethoxy}-ethoxy)-propionyl]pseudouridine TP; 1-{3-[2-(2-aminoethoxy)-ethoxy]-propionyl}pseudouridine TP; 1-acetylpseudouridine TP; 1-alkyl-6-(1-propynyl)-pseudo-UTP; 1-alkyl-6-(2-propynyl)-pseudo-UTP; 1-alkyl-6-allyl-pseudo-UTP; 1-alkyl-6-ethynyl-pseudo-UTP; 1-alkyl-6-homoallyl-pseudo-UTP; 1-alkyl-6-vinyl-pseudo-UTP; 1-allylpseudouridine TP; 1-aminomethyl-pseudo-UTP; 1-benzoylpseudouridine TP; 1-benzyloxymethylpseudouridine TP; 1-benzyl-pseudo-UTP; 1-biotinyl-PEG2-pseudouridine TP; 1-biotinylpseudouridine TP; 1-butyl-pseudo-UTP; 1-cyanomethylpseudouridine TP; 1-cyclobutylmethyl-pseudo-UTP; 1-cyclobutyl-pseudo-UTP; 1-cycloheptylmethyl-pseudo-UTP; 1-cycloheptyl-pseudo-UTP; 1-cyclohexylmethyl-pseudo-UTP; 1-cyclohexyl-pseudo-UTP; 1-cyclooctylmethyl-pseudo-UTP; 1-cyclooctyl-pseudo-UTP; 1-cyclopentylmethyl-pseudo-UTP; 1-cyclopentyl-pseudo-UTP; 1-cyclopropylmethyl-pseudo-UTP; 1-cyclopropyl-pseudo-UTP; 1-ethyl-pseudo-UTP; 1-hexyl-pseudo-UTP; 1-homoallylpseudouridine TP; 1-hydroxymethylpseudouridine TP; 1-iso-propyl-pseudo-UTP; 1-methyl-2-thio-pseudo-UTP; 1-methyl-4-thio-pseudo-UTP; 1-methyl-alpha-thio-pseudo-UTP; 1-methanesulfonylmethylpseudouridine TP; 1-methoxymethylpseudouridine TP; 1-methyl-6-(2,2,2-Trifluoroethyl)pseudo-UTP; 1-methyl-6-(4-morpholino)-pseudo-UTP; 1-methyl-6-(4-thiomorpholino)-pseudo-UTP; 1-methyl-6-(substituted phenyl)pseudo-UTP; 1-methyl-6-amino-pseudo-UTP; 1-methyl-6-azido-pseudo-UTP; 1-methyl-6-bromo-pseudo-UTP; 1-methyl-6-butyl-pseudo-UTP; 1-methyl-6-chloro-pseudo-UTP; 1-methyl-6-cyano-pseudo-UTP; 1-methyl-6-dimethylamino-pseudo-UTP; 1-methyl-6-ethoxy-pseudo-UTP; 1-methyl-6-ethylcarboxylate-pseudo-UTP; 1-methyl-6-ethyl-pseudo-UTP; 1-methyl-6-fluoro-pseudo-UTP; 1-methyl-6-formyl-pseudo-UTP; 1-methyl-6-hydroxyamino-pseudo-UTP; 1-methyl-6-hydroxy-pseudo-UTP; 1-methyl-6-iodo-pseudo-UTP; 1-methyl-6-iso-propyl-pseudo-UTP; 1-methyl-6-methoxy-pseudo-UTP; 1-methyl-6-methylamino-pseudo-UTP; 1-methyl-6-phenyl-pseudo-UTP; 1-methyl-6-propyl-pseudo-UTP; 1-methyl-6-tert-butyl-pseudo-UTP; 1-methyl-6-trifluoromethoxy-pseudo-UTP; 1-methyl-6-trifluoromethyl-pseudo-UTP; 1-morpholinomethylpseudouridine TP; 1-pentyl-pseudo-UTP; 1-phenyl-pseudo-UTP; 1-pivaloylpseudouridine TP; 1-propargylpseudouridine TP; 1-propyl-pseudo-UTP; 1-propynyl-pseudouridine; 1-p-tolyl-pseudo-UTP; 1-tert-butyl-pseudo-UTP; 1-thiomethoxymethylpseudouridine TP; 1-thiomorpholinomethylpseudouridine TP; 1-trifluoroacetylpseudouridine TP; 1-trifluoromethyl-pseudo-UTP; 1-vinylpseudouridine TP; 2,2′-anhydro-uridine TP; 2′-bromo-deoxyuridine TP; 2′-F-5-Methyl-2′-deoxy-UTP; 2′-OMe-5-Me-UTP; 2′-OMe-pseudo-UTP; 2′-a-ethynyluridine TP; 2′-a-trifluoromethyluridine TP; 2′-b-ethynyluridine TP; 2′-b-trifluoromethyluridine TP; 2′-deoxy-2′,2′-difluorouridine TP; 2′-deoxy-2′-a-mercaptouridine TP; 2′-deoxy-2′-a-thiomethoxyuridine TP; 2′-deoxy-2′-b-aminouridine TP; 2′-deoxy-2′-b-azidouridine TP; 2′-deoxy-2′-b-bromouridine TP; 2′-deoxy-2′-b-chlorouridine TP; 2′-deoxy-2′-b-fluorouridine TP; 2′-deoxy-2′-b-iodouridine TP; 2′-deoxy-2′-b-mercaptouridine TP; 2′-deoxy-2′-b-thiomethoxyuridine TP; 2-methoxy-4-thio-uridine; 2-methoxyuridine; 2′-O-Methyl-5-(1-propynyl)uridine TP; 3-alkyl-pseudo-UTP; 4′-azidouridine TP; 4′-carbocyclic uridine TP; 4′-ethynyluridine TP; 5-(1-propynyl)ara-uridine TP; 5-(2-furanyl)uridine TP; 5-cyanouridine TP; 5-dimethylaminouridine TP; 5′-homo-uridine TP; 5-iodo-2′-fluoro-deoxyuridine TP; 5-phenylethynyluridine TP; 5-trideuteromethyl-6-deuterouridine TP; 5-trifluoromethyl-uridine TP; 5-vinylarauridine TP; 6-(2,2,2-trifluoroethyl)-pseudo-UTP; 6-(4-morpholino)-pseudo-UTP; 6-(4-thiomorpholino)-pseudo-UTP; 6-(substituted-phenyl)-pseudo-UTP; 6-amino-pseudo-UTP; 6-azido-pseudo-UTP; 6-bromo-pseudo-UTP; 6-butyl-pseudo-UTP; 6-chloro-pseudo-UTP; 6-cyano-pseudo-UTP; 6-dimethylamino-pseudo-UTP; 6-ethoxy-pseudo-UTP; 6-ethylcarboxylate-pseudo-UTP; 6-ethyl-pseudo-UTP; 6-fluoro-pseudo-UTP; 6-formyl-pseudo-UTP; 6-hydroxyamino-pseudo-UTP; 6-hydroxy-pseudo-UTP; 6-iodo-pseudo-UTP; 6-iso-propyl-pseudo-UTP; 6-methoxy-pseudo-UTP; 6-methylamino-pseudo-UTP; 6-methyl-pseudo-UTP; 6-phenyl-pseudo-UTP; 6-phenyl-pseudo-UTP; 6-propyl-pseudo-UTP; 6-tert-butyl-pseudo-UTP; 6-trifluoromethoxy-pseudo-UTP; 6-trifluoromethyl-pseudo-UTP; alpha-thio-pseudo-UTP; pseudouridine-1-(4-methylbenzenesulfonic acid) TP; pseudouridine 1-(4-methylbenzoic acid) TP; pseudouridine TP 1-[3-(2-ethoxy)]propionic acid; pseudouridine TP 1-[3-{2-(2-[2-(2-ethoxy)-ethoxy]-ethoxy)-ethoxy}]propionic acid; pseudouridine TP 1-[3-{2-(2-[2-{2(2-ethoxy)-ethoxy}-ethoxy]-ethoxy)-ethoxy}]propionic acid; pseudouridine TP 1-[3-{2-(2-[2-ethoxy]-ethoxy)-ethoxy}]propionic acid; pseudouridine TP 1-[3-{2-(2-ethoxy)-ethoxy}] propionic acid; pseudouridine TP 1-methylphosphonic acid; pseudouridine TP 1-methylphosphonic acid diethyl ester; pseudo-UTP-N1-3-propionic acid; pseudo-UTP-N1-4-butanoic acid; pseudo-UTP-N1-5-pentanoic acid; pseudo-UTP-N1-6-hexanoic acid; pseudo-UTP-N1-7-heptanoic acid; pseudo-UTP-N1-methyl-p-benzoic acid; pseudo-UTP-N1-p-benzoic acid; wybutosine; hydroxywybutosine; isowyosine; peroxywybutosine; undermodified hydroxywybutosine; 4-demethylwyosine; 2,6-(diamino)purine; 1-(aza)-2-(thio)-3-(aza)-phenoxazin-1-yl:1,3-(diaza)-2-(oxo)-phenthiazin-1-yl;1,3-(diaza)-2-(oxo)-phenoxazin-1-yl;1,3,5-(triaza)-2,6-(dioxa)-naphthalene; 2-(amino)purine; 2,4,5-(trimethyl)phenyl; 2′ methyl, 2′amino, 2′azido, 2′fluro-cytidine; 2′ methyl, 2′amino, 2′azido, 2′fluro-adenine; 2′methyl, 2′amino, 2′azido, 2′fluro-uridine; 2′-amino-2′-deoxyribose; 2-amino-6-Chloro-purine; 2-aza-inosinyl; 2′-azido-2′-deoxyribose; 2′fluoro-2′-deoxyribose; 2′-fluoro-modified bases; 2′-O-methyl-ribose; 2-oxo-7-aminopyridopyrimidin-3-yl; 2-oxo-pyridopyrimidine-3-yl; 2-pyridinone; 3 nitropyrrole; 3-(methyl)-7-(propynyl) isocarbostyrilyl; 3-(methyl) isocarbostyrilyl; 4-(fluoro)-6-(methyl)benzimidazole; 4-(methyl)benzimidazole; 4-(methyl)indolyl; 4,6-(dimethyl)indolyl; 5 nitroindole; 5 substituted pyrimidines; 5-(methyl) isocarbostyrilyl; 5-nitroindole; 6-(aza)pyrimidine; 6-(azo)thymine; 6-(methyl)-7-(aza)indolyl; 6-chloro-purine; 6-phenyl-pyrrolo-pyrimidin-2-on-3-yl; 7-(aminoalkylhydroxy)-1-(aza)-2-(thio)-3-(aza)-phenthiazin-1-yl; 7-(aminoalkylhydroxy)-1-(aza)-2-(thio)-3-(aza)-phenoxazin-1-yl; 7-(aminoalkylhydroxy)-1,3-(diaza)-2-(oxo)-phenoxazin-1-yl; 7-(aminoalkylhydroxy)-1,3-(diaza)-2-(oxo)-phenthiazin-1-yl; 7-(aminoalkylhydroxy)-1,3-(diaza)-2-(oxo)-phenoxazin-1-yl; 7-(aza)indolyl; 7-(guanidiniumalkylhydroxy)-1-(aza)-2-(thio)-3-(aza)-phenoxazinl-yl; 7-(guanidiniumalkylhydroxy)-1-(aza)-2-(thio)-3-(aza)-phenthiazin-1-yl; 7-(guanidiniumalkylhydroxy)-1-(aza)-2-(thio)-3-(aza)-phenoxazin-1-yl; 7-(guanidiniumalkylhydroxy)-1,3-(diaza)-2-(oxo)-phenoxazin-1-yl; 7-(guanidiniumalkyl-hydroxy)-1,3-(diaza)-2-(oxo)-phenthiazin-1-yl; 7-(guanidiniumalkylhydroxy)-1,3-(diaza)-2-(oxo)-phenoxazin-1-yl; 7-(propynyl) isocarbostyrilyl; 7-(propynyl) isocarbostyrilyl, propynyl-7-(aza)indolyl; 7-deaza-inosinyl; 7-substituted 1-(aza)-2-(thio)-3-(aza)-phenoxazin-1-yl; 7-substituted 1,3-(diaza)-2-(oxo)-phenoxazin-1-yl; 9-(methyl)-imidizopyridinyl; aminoindolyl; anthracenyl; bis-ortho-(aminoalkylhydroxy)-6-phenyl-pyrrolo-pyrimidin-2-on-3-yl; bis-ortho-substituted-6-phenyl-pyrrolo-pyrimidin-2-on-3-yl; difluorotolyl; hypoxanthine; imidizopyridinyl; inosinyl; isocarbostyrilyl; isoguanisine; N2-substituted purines; N6-methyl-2-amino-purine; N6-substituted purines; N-alkylated derivative; napthalenyl; nitrobenzimidazolyl; nitroimidazolyl; nitroindazolyl; nitropyrazolyl; nubularine; 06-substituted purines; O-alkylated derivative; ortho-(aminoalkylhydroxy)-6-phenyl-pyrrolo-pyrimidin-2-on-3-yl; ortho-substituted-6-phenyl-pyrrolo-pyrimidin-2-on-3-yl; oxoformycin TP; para-(aminoalkylhydroxy)-6-phenyl-pyrrolo-pyrimidin-2-on-3-yl; para-substituted-6-phenyl-pyrrolo-pyrimidin-2-on-3-yl; pentacenyl; phenanthracenyl; phenyl; propynyl-7-(aza)indolyl; pyrenyl; pyridopyrimidin-3-yl; pyridopyrimidin-3-yl, 2-oxo-7-amino-pyridopyrimidin-3-yl; pyrrolo-pyrimidin-2-on-3-yl; pyrrolopyrimidinyl; pyrrolopyrizinyl; stilbenzyl; substituted 1,2,4-triazoles; tetracenyl; tubercidine; xanthine; xanthosine-5′-TP; 2-thio-zebularine; 5-aza-2-thio-zebularine; 7-deaza-2-amino-purine; pyridin-4-one ribonucleoside; 2-amino-riboside-TP; formycin A TP; formycin B TP; pyrrolosine TP; 2′-OH-ara-adenosine TP; 2′-OH-ara-cytidine TP; 2′-OH-ara-uridine TP; 2′-OH-ara-guanosine TP; 5-(2-carbomethoxyvinyl)uridine TP; and N6-(19-Amino-pentaoxanonadecyl)adenosine TP.

[2708] In some embodiments, the polynucleotides of the combination therapies of the present disclosure include a combination of at least two (e.g., 2, 3, 4 or more) of the aforementioned modified nucleobases. Thus, polynucleotides comprising an mRNA encoding an immune response primer of the present disclosure can include a combination of at least two (e.g., 2, 3, 4 or more) of the aforementioned modified nucleobases; polynucleotides comprising an mRNA encoding an immune response co-stimulatory signal of the present disclosure can include a combination of at least two (e.g., 2, 3, 4 or more) of the aforementioned modified nucleobases; and polynucleotides comprising an mRNA encoding a checkpoint inhibitor of the present disclosure can include a combination of at least two (e.g., 2, 3, 4 or more) of the aforementioned modified nucleobases. In some embodiments, all the mRNAs in a combination therapy disclosed herein include a combination of at least two (e.g., 2, 3, 4 or more) of the aforementioned modified nucleobases. In other embodiments, only some of the mRNA in a combination therapy disclosed herein (i.e., at least two polynucleotides, wherein each polynucleotide comprises an ORF encoding an immune response primer polypeptide, an immune response co-stimulatory signal polypeptide, or an a checkpoint inhibitor polypeptide) include a combination of at least two (e.g., 2, 3, 4 or more) of the aforementioned modified nucleobases.

[2709] In some embodiments, modified nucleobases in a polynucleotide comprising an mRNA encoding an immune response primer of the present disclosure, and/or modified nucleobases in a polynucleotide comprising an mRNA encoding an immune response co-stimulatory signal of the present disclosure, and/or modified nucleobases in a polynucleotide comprising an mRNA encoding a checkpoint inhibitor of the present disclosure, or a combination thereof, are selected from the group consisting of pseudouridine (ψ), 2-thiouridine, 4′-thiouridine, 5-methylcytosine, 2-thio-1-methyl-1-deaza-pseudouridine, 2-thio-1-methyl-pseudouridine, 2-thio-5-aza-uridine, 2-thio-dihydropseudouridine, 2-thio-dihydrouridine, 2-thio-pseudouridine, 4-methoxy-2-thio-pseudouridine, 4-methoxy-pseudouridine, 4-thio-1-methyl-pseudouridine, 4-thio-pseudouridine, 5-aza-uridine, dihydropseudouridine, 5-methyluridine,), 5-methoxyuridine, 2′-O-methyl uridine 1-methyl-pseudouridine (m1ψ), 1-ethyl-pseudouridine (e1ψ), 5-methoxy-uridine (mo5U), 5-methyl-cytidine (m5C), α-thio-guanosine, α-thio-adenosine, 5-cyano uridine, 4′-thio uridine 7-deaza-adenine, 1-methyl-adenosine (m1A), 2-methyl-adenine (m2A), N6-methyl-adenosine (m6A), and 2,6-diaminopurine, (I), 1-methyl-inosine (mlI), wyosine (imG), methylwyosine (mimG), 7-deaza-guanosine, 7-cyano-7-deaza-guanosine (preQO), 7-aminomethyl-7-deaza-guanosine (preQ1), 7-methyl-guanosine (m7G), 1-methyl-guanosine (mlG), 8-oxo-guanosine, 7-methyl-8-oxo-guanosine, 2,8-dimethyladenosine, 2-geranylthiouridine, 2-lysidine, 2-selenouridine, 3-(3-amino-3-carboxypropyl)-5,6-dihydrouridine, 3-(3-amino-3-carboxypropyl)pseudouridine, 3-methylpseudouridine, 5-(carboxyhydroxymethyl)-2′-O-methyluridine methyl ester, 5-aminomethyl-2-geranylthiouridine, 5-aminomethyl-2-selenouridine, 5-aminomethyluridine, 5-carbamoylhydroxymethyluridine, 5-carbamoylmethyl-2-thiouridine, 5-carboxymethyl-2-thiouridine, 5-carboxymethylaminomethyl-2-geranylthiouridine, 5-carboxymethylaminomethyl-2-selenouridine, 5-cyanomethyluridine, 5-hydroxycytidine, 5-methylaminomethyl-2-geranylthiouridine, 7-aminocarboxypropyl-demethylwyosine, 7-aminocarboxypropylwyosine, 7-aminocarboxypropylwyosine methyl ester, 8-methyladenosine, N4,N4-dimethylcytidine, N6-formyladenosine, N6-hydroxymethyladenosine, agmatidine, cyclic N6-threonylcarbamoyladenosine, glutamyl-queuosine, methylated undermodified hydroxywybutosine, N4,N4,2′-O-trimethylcytidine, geranylated 5-methylaminomethyl-2-thiouridine, geranylated 5-carboxymethylaminomethyl-2-thiouridine, Qbase, preQObase, preQ1base, and two or more combinations thereof.

[2710] In some embodiments, the at least one chemically modified nucleoside is selected from the group consisting of pseudouridine, 1-methyl-pseudouridine, 1-ethyl-pseudouridine, 5-methylcytosine, 5-methoxyuridine, and a combination thereof. Base Modifications

[2711] In certain embodiments, the chemical modification is at nucleobases in the polynucleotides (e.g., RNA polynucleotide, such as mRNA polynucleotide). In some embodiments, modified nucleobases in the polynucleotide (e.g., RNA polynucleotide, such as mRNA polynucleotide) are selected from the group consisting of 1-methyl-pseudouridine (m1ψ), 1-ethyl-pseudouridine (e1ψ), 5-methoxy-uridine (mo5U), 5-methyl-cytidine (m5C), pseudouridine (ψ), u-thio-guanosine and α-thio-adenosine.

[2712] In some embodiments, the polynucleotide includes a combination of at least two (e.g., 2, 3, 4 or more) of the aforementioned modified nucleobases.

[2713] In some embodiments, the polynucleotide (e.g., RNA polynucleotide, such as mRNA polynucleotide) comprises pseudouridine (ψ) and 5-methyl-cytidine (m5C). In some embodiments, the polynucleotide (e.g., RNA polynucleotide, such as mRNA polynucleotide) comprises 1-methyl-pseudouridine (m1ψ). In some embodiments, the polynucleotide (e.g., RNA polynucleotide, such as mRNA polynucleotide) comprises 1-ethyl-pseudouridine (e1ψ). In some embodiments, the polynucleotide (e.g., RNA polynucleotide, such as mRNA polynucleotide) comprises 1-methyl-pseudouridine (m1ψ) and 5-methyl-cytidine (m5C). In some embodiments, the polynucleotide (e.g., RNA polynucleotide, such as mRNA polynucleotide) comprises 1-ethyl-pseudouridine (e1ψ) and 5-methyl-cytidine (m5C). In some embodiments, the polynucleotide (e.g., RNA polynucleotide, such as mRNA polynucleotide) comprises 2-thiouridine (s2U). In some embodiments, the polynucleotide (e.g., RNA polynucleotide, such as mRNA polynucleotide) comprises 2-thiouridine and 5-methyl-cytidine (m5C). In some embodiments, the polynucleotide (e.g., RNA polynucleotide, such as mRNA polynucleotide) comprises methoxy-uridine (mo5U). In some embodiments, the polynucleotide (e.g., RNA polynucleotide, such as mRNA polynucleotide) comprises 5-methoxy-uridine (mo5U) and 5-methyl-cytidine (m5C). In some embodiments, the polynucleotide (e.g., RNA polynucleotide, such as mRNA polynucleotide) comprises 2′-O-methyl uridine. In some embodiments, the polynucleotide (e.g., RNA polynucleotide, such as mRNA polynucleotide) comprises 2′-O-methyl uridine and 5-methyl-cytidine (m5C). In some embodiments, the polynucleotide (e.g., RNA polynucleotide, such as mRNA polynucleotide) comprises N6-methyl-adenosine (m6A). In some embodiments, the polynucleotide (e.g., RNA polynucleotide, such as mRNA polynucleotide) comprises N6-methyl-adenosine (m6A) and 5-methyl-cytidine (m5C).

[2714] In some embodiments, the polynucleotide (e.g., RNA polynucleotide, such as mRNA polynucleotide) is uniformly modified (e.g., fully modified, modified throughout the entire sequence) for a particular modification. For example, a polynucleotide can be uniformly modified with 5-methyl-cytidine (m5C), meaning that all cytosine residues in the mRNA sequence are replaced with 5-methyl-cytidine (m5C). Similarly, a polynucleotide can be uniformly modified for any type of nucleoside residue present in the sequence by replacement with a modified residue such as any of those set forth above.

[2715] In some embodiments, the chemically modified nucleosides in the open reading frame are selected from the group consisting of uridine, adenine, cytosine, guanine, and any combination thereof.

[2716] In some embodiments, the modified nucleobase is a modified cytosine. Examples of nucleobases and nucleosides having a modified cytosine include N4-acetyl-cytidine (ac4C), 5-methyl-cytidine (m5C), 5-halo-cytidine (e.g., 5-iodo-cytidine), 5-hydroxymethyl-cytidine (hm5C), 1-methyl-pseudoisocytidine, 2-thio-cytidine (s2C), 2-thio-5-methyl-cytidine.

[2717] In some embodiments, a modified nucleobase is a modified uridine. Example nucleobases and nucleosides having a modified uridine include 5-cyano uridine or 4′-thio uridine.

[2718] In some embodiments, a modified nucleobase is a modified adenine. Example nucleobases and nucleosides having a modified adenine include 7-deaza-adenine, 1-methyl-adenosine (m1A), 2-methyl-adenine (m2A), N6-methyl-adenine (m6A), and 2,6-diaminopurine.

[2719] In some embodiments, a modified nucleobase is a modified guanine. Example nucleobases and nucleosides having a modified guanine include inosine (I), 1-methyl-inosine (mlI), wyosine (imG), methylwyosine (mimG), 7-deaza-guanosine, 7-cyano-7-deaza-guanosine (preQO), 7-aminomethyl-7-deaza-guanosine (preQ1), 7-methyl-guanosine (m7G), 1-methyl-guanosine (mlG), 8-oxo-guanosine, 7-methyl-8-oxo-guanosine.

[2720] In some embodiments, the nucleobase modified nucleotides in the polynucleotide (e.g., RNA polynucleotide, such as mRNA polynucleotide) are 5-methoxyuridine.

[2721] In some embodiments, the polynucleotide (e.g., RNA polynucleotide, such as mRNA polynucleotide) includes a combination of at least two (e.g., 2, 3, 4 or more) of modified nucleobases.

[2722] In some embodiments, at least 95% of a type of nucleobases (e.g., uracil) in a polynucleotide of the disclosure (e.g., an mRNA polynucleotide encoding an immune response primer, an immune response co-stimulatory signal, or a checkpoint inhibitor polypeptide) are modified nucleobases. In some embodiments, at least 95% of uracil in a polynucleotide of the present disclosure (e.g., e.g., an mRNA polynucleotide encoding an immune response primer, an immune response co-stimulatory signal, or a checkpoint inhibitor polypeptide) is 5-methoxyuracil.

[2723] In some embodiments, the polynucleotide (e.g., RNA polynucleotide, such as an mRNA polynucleotide) comprises 5-methoxyuridine (5mo5U) and 5-methyl-cytidine (m5C).

[2724] In some embodiments, the polynucleotide (e.g., an RNA polynucleotide, such as an mRNA polynucleotide) is uniformly modified (e.g., fully modified, modified throughout the entire sequence) for a particular modification. For example, a polynucleotide can be uniformly modified with 5-methoxyuridine, meaning that substantially all uridine residues in the mRNA sequence are replaced with 5-methoxyuridine. Similarly, a polynucleotide can be uniformly modified for any type of nucleoside residue present in the sequence by replacement with a modified residue such as any of those set forth above.

[2725] In some embodiments, the modified nucleobase is a modified cytosine.

[2726] In some embodiments, a modified nucleobase is a modified uracil. Example nucleobases and nucleosides having a modified uracil include 5-methoxyuracil.

[2727] In some embodiments, a modified nucleobase is a modified adenine.

[2728] In some embodiments, a modified nucleobase is a modified guanine.

[2729] In some embodiments, the nucleobases, sugar, backbone, or any combination thereof in an open reading frame encoding an immune response primer, an immune response co-stimulatory signal, or a checkpoint inhibitor polypeptide of the present disclosure, are chemically modified by at least 10%, at least 20%, at least 30%, at least 40%, at least 50%, at least 60%, at least 70%, at least 80%, at least 90%, at least 95%, at least 99%, or 100%. In some embodiments, the nucleobases, sugar, backbone, or any combination thereof in all the polynucleotides encoding an immune response primer and/or an immune response co-stimulatory signal and/or a checkpoint inhibitor polypeptide, and/or any combination thereof, in a combination therapy of the present disclosure, are chemically modified by at least 10%, at least 20%, at least 30%, at least 40%, at least 50%, at least 60%, at least 70%, at least 80%, at least 90%, at least 95%, at least 99%, or 100%.

[2730] In some embodiments, the uridine nucleosides in the open reading frame encoding an immune response primer, an immune response co-stimulatory signal, or a checkpoint inhibitor polypeptide of the present disclosure, are chemically modified by at least 10%, at least 20%, at least 30%, at least 40%, at least 50%, at least 60%, at least 70%, at least 80%, at least 90%, at least 95%, at least 99%, or 100%. In some embodiments, the uridine nucleosides in all the polynucleotides encoding an immune response primer and/or an immune response co-stimulatory signal and/or a checkpoint inhibitor polypeptide, and/or any combination thereof, in a combination therapy of the present disclosure, are chemically modified by at least 10%, at least 20%, at least 30%, at least 40%, at least 50%, at least 60%, at least 70%, at least 80%, at least 90%, at least 95%, at least 99%, or 100%.

[2731] In some embodiments, the adenosine nucleosides in the open reading frame encoding an immune response primer, an immune response co-stimulatory signal, or a checkpoint inhibitor polypeptide of the present disclosure, are chemically modified by at least 10%, at least 20%, at least 30%, at least 40%, at least 50%, at least 60%, at least 70%, at least 80%, at least 90%, at least 95%, at least 99%, or 100%. In some embodiments, the adenosine nucleosides in all the polynucleotides encoding an immune response primer and/or an immune response co-stimulatory signal and/or a checkpoint inhibitor polypeptide, and/or any combination thereof, in a combination therapy of the present disclosure, are chemically modified by at least 10%, at least 20%, at least 30%, at least 40%, at least 50%, at least 60%, at least 70%, at least 80%, at least 90%, at least 95%, at least 99%, or 100%.

[2732] In some embodiments, the cytidine nucleosides in the open reading frame encoding an immune response primer, an immune response co-stimulatory signal, or a checkpoint inhibitor polypeptide of the present disclosure, are chemically modified by at least at least 10%, at least 20%, at least 30%, at least 40%, at least 50%, at least 60%, at least 70%, at least 80%, at least 90%, at least 95%, at least 99%, or 100%. In some embodiments, the cytidine nucleosides in all the polynucleotides encoding an immune response primer and/or an immune response co-stimulatory signal and/or a checkpoint inhibitor polypeptide, and/or any combination thereof, in a combination therapy of the present disclosure, are chemically modified by at least 10%, at least 20%, at least 30%, at least 40%, at least 50%, at least 60%, at least 70%, at least 80%, at least 90%, at least 95%, at least 99%, or 100%.

[2733] In some embodiments, the guanosine nucleosides in the open reading frame encoding an immune response primer, an immune response co-stimulatory signal, or a checkpoint inhibitor polypeptide of the present disclosure, are chemically modified by at least at least 10%, at least 20%, at least 30%, at least 40%, at least 50%, at least 60%, at least 70%, at least 80%, at least 90%, at least 95%, at least 99%, or 100%. In some embodiments, the guanosine nucleosides in all the polynucleotides encoding an immune response primer and/or an immune response co-stimulatory signal and/or a checkpoint inhibitor polypeptide, and/or any combination thereof, in a combination therapy of the present disclosure, are chemically modified by at least 10%, at least 20%, at least 30%, at least 40%, at least 50%, at least 60%, at least 70%, at least 80%, at least 90%, at least 95%, at least 99%, or 100%.

[2734] In some embodiments, the polynucleotides can include any useful linker between the nucleosides. Such linkers, including backbone modifications, that are useful in the composition of the present disclosure include, but are not limited to the following: 3′-alkylene phosphonates, 3′-amino phosphoramidate, alkene containing backbones, aminoalkylphosphoramidates, aminoalkylphosphotriesters, boranophosphates, —CH₂—O—N(CH₃)—CH₂—, —CH₂—N(CH₃)—N(CH₃)—CH₂—, —CH₂—NH—CH₂—, chiral phosphonates, chiral phosphorothioates, formacetyl and thioformacetyl backbones, methylene (methylimino), methylene formacetyl and thioformacetyl backbones, methyleneimino and methylenehydrazino backbones, morpholino linkages, —N(CH₃)—CH₂—CH₂—, oligonucleosides with heteroatom internucleoside linkage, phosphinates, phosphoramidates, phosphorodithioates, phosphorothioate internucleoside linkages, phosphorothioates, phosphotriesters, PNA, siloxane backbones, sulfamate backbones, sulfide sulfoxide and sulfone backbones, sulfonate and sulfonamide backbones, thionoalkylphosphonates, thionoalkylphosphotriesters, and thionophosphoramidates.

[2735] In some embodiments, modified nucleobases in the polynucleotide comprising an mRNA encoding an immune response primer, an immune response co-stimulatory signal, or a checkpoint inhibitor polypeptide of the present disclosure, are selected from the group consisting of 1-methyl-pseudouridine (m1ψ), 5-methoxy-uridine (mo5U), 5-methyl-cytidine (m5C), pseudouridine (ψ), u-thio-guanosine and α-thio-adenosine. In some embodiments, the polynucleotide includes a combination of at least two (e.g., 2, 3, 4 or more) of the aforementioned modified nucleobases.

[2736] In some embodiments, the polynucleotide comprising an mRNA encoding an immune response primer, an immune response co-stimulatory signal, or a checkpoint inhibitor polypeptide of the present disclosure, comprises pseudouridine (ψ) and 5-methyl-cytidine (m5C). In some embodiments, the polynucleotide (e.g., RNA polynucleotide, such as mRNA polynucleotide) comprises 1-methyl-pseudouridine (m1ψ). In some embodiments, the polynucleotide comprising an mRNA encoding an IL23 polypeptide, the polynucleotide comprising an mRNA encoding an IL36-gamma polypeptide, the polynucleotide comprising an mRNA encoding an OX40L polypeptide, or any combination thereof, comprise 1-methyl-pseudouridine (m1ψ) and 5-methyl-cytidine (m5C).

[2737] In some embodiments, the polynucleotide comprising an mRNA encoding an immune response primer, an immune response co-stimulatory signal, or a checkpoint inhibitor polypeptide of the present disclosure, comprises 2-thiouridine (s2U). In some embodiments, the polynucleotide comprising an mRNA encoding an immune response primer, an immune response co-stimulatory signal, or a checkpoint inhibitor polypeptide of the present disclosure, comprises 2-thiouridine and 5-methyl-cytidine (m5C).

[2738] In some embodiments, the polynucleotide comprising an mRNA encoding an immune response primer, an immune response co-stimulatory signal, or a checkpoint inhibitor polypeptide of the present disclosure, comprises methoxy-uridine (mo5U). In some embodiments, the polynucleotide comprising an mRNA encoding an immune response primer, an immune response co-stimulatory signal, or a checkpoint inhibitor polypeptide of the present disclosure, comprises 5-methoxy-uridine (mo5U) and 5-methyl-cytidine (m5C). In some embodiments, the polynucleotide (e.g., RNA polynucleotide, such as mRNA polynucleotide) comprises 2′-O-methyl uridine.

[2739] In some embodiments, the polynucleotide comprising an mRNA encoding an immune response primer, an immune response co-stimulatory signal, or a checkpoint inhibitor polypeptide of the present disclosure, comprises 2′-O-methyl uridine and 5-methyl-cytidine (m5C). In some embodiments, the polynucleotide comprising an mRNA encoding an immune response primer, an immune response co-stimulatory signal, or a checkpoint inhibitor polypeptide of the present disclosure, comprises N6-methyl-adenosine (m6A). In some embodiments, the polynucleotide comprising an immune response primer, an immune response co-stimulatory signal, or a checkpoint inhibitor polypeptide of the present disclosure, comprises N6-methyl-adenosine (m6A) and 5-methyl-cytidine (m5C).

[2740] In some embodiments, the polynucleotide comprising an mRNA encoding an immune response primer, an immune response co-stimulatory signal, or a checkpoint inhibitor polypeptide of the present disclosure, are uniformly modified (e.g., fully modified, modified throughout the entire sequence) for a particular modification. For example, a polynucleotide can be uniformly modified with 5-methyl-cytidine (m5C), meaning that all cytosine residues in the mRNA sequence are replaced with 5-methyl-cytidine (m5C). Similarly, a polynucleotide can be uniformly modified for any type of nucleoside residue present in the sequence by replacement with a modified residue such as any of those set forth above.

[2741] In some embodiments, the modified nucleobase is a modified cytosine. Examples of nucleobases and nucleosides having a modified cytosine include N4-acetyl-cytidine (ac4C), 5-methyl-cytidine (m5C), 5-halo-cytidine (e.g., 5-iodo-cytidine), 5-hydroxymethyl-cytidine (hm5C), 1-methyl-pseudoisocytidine, 2-thio-cytidine (s2C), 2-thio-5-methyl-cytidine.

[2742] In some embodiments, a modified nucleobase is a modified uridine. Example nucleobases and nucleosides having a modified uridine include 5-cyano uridine or 4′-thio uridine.

[2743] In some embodiments, a modified nucleobase is a modified adenine. Example nucleobases and nucleosides having a modified adenine include 7-deaza-adenine, 1-methyl-adenosine (m1A), 2-methyl-adenine (m2A), N6-methyl-adenosine (m6A), and 2,6-diaminopurine.

[2744] In some embodiments, a modified nucleobase is a modified guanine. Example nucleobases and nucleosides having a modified guanine include inosine (I), 1-methyl-inosine (m1I), wyosine (imG), methylwyosine (mimG), 7-deaza-guanosine, 7-cyano-7-deaza-guanosine (preQO), 7-aminomethyl-7-deaza-guanosine (preQ1), 7-methyl-guanosine (m7G), 1-methyl-guanosine (m1G), 8-oxo-guanosine, or 7-methyl-8-oxo-guanosine.

[2745] Other modifications which can be useful in the polynucleotide comprising an mRNA encoding an immune response primer, an immune response co-stimulatory signal, or a checkpoint inhibitor polypeptide of the present disclosure are listed in TABLE 23.

TABLE 23
Additional Modification types

| Name | Type |
|---|---|
| 2,6-(diamino)purine | Other |
| 1-(aza)-2-(thio)-3-(aza)-phenoxazin-1-yl | Other |
| 1,3-(diaza)-2-(oxo)-phenthiazin-1-yl | Other |
| 1,3-(diaza)-2-(oxo)-phenoxazin-1-yl | Other |
| 1,3,5-(triaza)-2,6-(dioxa)-naphthalene | Other |
| 2 (amino)purine | Other |
| 2,4,5-(trimethyl)phenyl | Other |
| 2′ methyl, 2′amino, 2′azido, 2′fluro-cytidine | Other |
| 2′ methyl, 2′amino, 2′azido, 2′fluro-adenine | Other |
| 2′methyl, 2′amino, 2′azido, 2′fluro-uridine | Other |
| 2′-amino-2′-deoxyribose | Other |
| 2-amino-6-Chloro-purine | Other |
| 2-aza-inosinyl | Other |
| 2′-azido-2′-deoxyribose | Other |
| 2′fluoro-2′-deoxyribose | Other |
| 2′-fluoro-modified bases | Other |
| 2′-O-methyl-ribose | Other |
| 2-oxo-7-aminopyridopyrimidin-3-yl | Other |
| 2-oxo-pyridopyrimidine-3-yl | Other |
| 2-pyridinone | Other |
| 3 nitropyrrole | Other |
| 3-(methyl)-7-(propynyl)isocarbostyrilyl | Other |
| 3-(methyl)isocarbostyrilyl | Other |
| 4-(fluoro)-6-(methyl)benzimidazole | Other |
| 4-(methyl)benzimidazole | Other |
| 4-(methyl)indolyl | Other |
| 4,6-(dimethyl)indolyl | Other |
| 5 nitroindole | Other |
| 5 substituted pyrimidines | Other |
| 5-(methyl)isocarbostyrilyl | Other |
| 5-nitroindole | Other |
| 6-(aza)pyrimidine | Other |
| 6-(azo)thymine | Other |
| 6-(methyl)-7-(aza)indolyl | Other |
| 6-chloro-purine | Other |
| 6-phenyl-pyrrolo-pyrimidin-2-on-3-yl | Other |
| 7-(aminoalkylhydroxy)-1-(aza)-2-(thio)-3-(aza)-phenthiazin-1-yl | Other |
| 7-(aminoalkylhydroxy)-1-(aza)-2-(thio)-3-(aza)-phenoxazin-1-yl | Other |
| 7-(aminoalkylhydroxy)-1,3-(diaza)-2-(oxo)-phenoxazin-1-yl | Other |
| 7-(aminoalkylhydroxy)-1,3-(diaza)-2-(oxo)-phenthiazin-1-yl | Other |
| 7-(aminoalkylhydroxy)-1,3-(diaza)-2-(oxo)-phenoxazin-1-yl | Other |
| 7-(aza)indolyl | Other |
| 7-(guanidiniumalkylhydroxy)-1-(aza)-2-(thio)-3-(aza)- | Other |
| phenoxazinl-yl | |
| 7-(guanidiniumalkylhydroxy)-1-(aza)-2-(thio)-3-(aza)- | Other |
| phenthiazin-1-yl | |
| 7-(guanidiniumalkylhydroxy)-1-(aza)-2-(thio)-3-(aza)- | Other |
| phenoxazin-1-yl | |
| 7-(guanidiniumalkylhydroxy)-1,3-(diaza)-2-(oxo)- | Other |
| phenoxazin-1-yl | |
| 7-(guanidiniumalkyl-hydroxy)-1,3-(diaza)-2-(oxo)- | Other |
| phenthiazin-1-yl | |
| 7-(guanidiniumalkylhydroxy)-1,3-(diaza)-2-(oxo)- | Other |
| phenoxazin-1-yl | |
| 7-(propynyl)isocarbostyrilyl | Other |
| 7-(propynyl)isocarbostyrilyl, propynyl-7-(aza)indolyl | Other |
| 7-deaza-inosinyl | Other |
| 7-substituted 1-(aza)-2-(thio)-3-(aza)-phenoxazin-1-yl | Other |
| 7-substituted 1,3-(diaza)-2-(oxo)-phenoxazin-1-yl | Other |
| 9-(methyl)-imidizopyridinyl | Other |
| Aminoindolyl | Other |
| Anthracenyl | Other |
| bis-ortho-(aminoalkylhydroxy)-6-phenyl-pyrrolo-pyrimidin-2-on- | Other |
| 3-yl | |
| bis-ortho-substituted-6-phenyl-pyrrolo-pyrimidin-2-on-3-yl | Other |
| Difluorotolyl | Other |
| Hypoxanthine | Other |
| Imidizopyridinyl | Other |
| Inosinyl | Other |
| Isocarbostyrilyl | Other |
| Isoguanisine | Other |
| N2-substituted purines | Other |
| N6-methyl-2-amino-purine | Other |
| N6-substituted purines | Other |
| N-alkylated derivative | Other |
| Napthalenyl | Other |
| Nitrobenzimidazolyl | Other |
| Nitroimidazolyl | Other |
| Nitroindazolyl | Other |
| Nitropyrazolyl | Other |
| Nubularine | Other |
| O6-substituted purines | Other |
| O-alkylated derivative | Other |
| ortho-(aminoalkylhydroxy)-6-phenyl-pyrrolo-pyrimidin-2-on-3-yl | Other |
| ortho-substituted-6-phenyl-pyrrolo-pyrimidin-2-on-3-yl | Other |
| Oxoformycin TP | Other |
| para-(aminoalkylhydroxy)-6-phenyl-pyrrolo-pyrimidin-2-on-3-yl | Other |
| para-substituted-6-phenyl-pyrrolo-pyrimidin-2-on-3-yl | Other |
| Pentacenyl | Other |
| Phenanthracenyl | Other |
| Phenyl | Other |
| propynyl-7-(aza)indolyl | Other |
| Pyrenyl | Other |
| pyridopyrimidin-3-yl | Other |
| pyridopyrimidin-3-yl, 2-oxo-7-amino-pyridopyrimidin-3-yl | Other |
| pyrrolo-pyrimidin-2-on-3-yl | Other |
| Pyrrolopyrimidinyl | Other |
| Pyrrolopyrizinyl | Other |
| Stilbenzyl | Other |
| substituted 1,2,4-triazoles | Other |
| Tetracenyl | Other |
| Tubercidine | Other |
| Xanthine | Other |
| Xanthosine-5′-TP | Other |
| 2-thio-zebularine | Other |
| 5-aza-2-thio-zebularine | Other |
| 7-deaza-2-amino-purine | Other |
| pyridin-4-one ribonucleoside | Other |
| 2-Amino-riboside-TP | Other |
| Formycin A TP | Other |
| Formycin B TP | Other |
| Pyrrolosine TP | Other |
| 2′-OH-ara-adenosine TP | Other |
| 2′-OH-ara-cytidine TP | Other |
| 2′-OH-ara-uridine TP | Other |
| 2′-OH-ara-guanosine TP | Other |
| 5-(2-carbomethoxyvinyl)uridine TP | Other |
| N6-(19-Amino-pentaoxanonadecyl)adenosine TP | Other |

[2746] The polynucleotide comprising an mRNA encoding an immune response primer, an immune response co-stimulatory signal, or a checkpoint inhibitor polypeptide of the present disclosure can include any useful linker between the nucleosides. Such linkers, including backbone modifications are given in TABLE 24.

TABLE 24
Linker modifications

| Name | TYPE |
|---|---|
| 3′-alkylene phosphonates | Linker |
| 3′-amino phosphoramidate | Linker |
| alkene containing backbones | Linker |
| Aminoalkylphosphoramidates | Linker |
| Aminoalkylphosphotriesters | Linker |
| Boranophosphates | Linker |
| —CH2-0-N(CH3)—CH2— | Linker |
| —CH2—N(CH3)—N(CH3)—CH2— | Linker |
| —CH2—NH—CH2— | Linker |
| chiral phosphonates | Linker |
| chiral phosphorothioates | Linker |
| formacetyl and thioformacetyl backbones | Linker |
| methylene (methylimino) | Linker |
| methylene formacetyl and thioformacetyl backbones | Linker |
| methyleneimino and methylenehydrazino backbones | Linker |
| morpholino linkages | Linker |
| —N(CH3)—CH2—CH2— | Linker |
| oligonucleosides with heteroatom internucleoside linkage | Linker |
| Phosphinates | Linker |
| phosphoramidates | Linker |
| Phosphorodithioates | Linker |
| phosphorothioate internucleoside linkages | Linker |
| Phosphorothioates | Linker |
| Phosphotriesters | Linker |
| PNA | Linker |
| siloxane backbones | Linker |
| sulfamate backbones | Linker |
| sulfide sulfoxide and sulfone backbones | Linker |
| sulfonate and sulfonamide backbones | Linker |
| Thionoalkylphosphonates | Linker |
| Thionoalkylphosphotriesters | Linker |
| Thionophosphoramidates | Linker |

[2747] The polynucleotide comprising an mRNA encoding an immune response primer, an immune response co-stimulatory signal, or a checkpoint inhibitor polypeptide of the present disclosure, can include any useful modification, such as to the sugar, the nucleobase, or the internucleoside linkage (e.g. to a linking phosphate/to a phosphodiester linkage/to the phosphodiester backbone). One or more atoms of a pyrimidine nucleobase can be replaced or substituted with optionally substituted amino, optionally substituted thiol, optionally substituted alkyl (e.g., methyl or ethyl), or halo (e.g., chloro or fluoro). In certain embodiments, modifications (e.g., one or more modifications) are present in each of the sugar and the internucleoside linkage. Modifications according to the present disclosure can be modifications of ribonucleic acids (RNAs) to deoxyribonucleic acids (DNAs), threose nucleic acids (TNAs), glycol nucleic acids (GNAs), peptide nucleic acids (PNAs), locked nucleic acids (LNAs), hexitol nucleic acids (HNAs), or hybrids thereof. Additional modifications are described herein. Modified nucleic acids and their synthesis are disclosed in International Patent Publication No. WO2013052523 (see also US20130115272).

[2748] In some embodiments, the polynucleotide comprising an mRNA encoding an immune response primer, an immune response co-stimulatory signal, or a checkpoint inhibitor polypeptide of the present disclosure, do not substantially induce an innate immune response of a cell into which the mRNA is introduced. Features of an induced innate immune response include 1) increased expression of pro-inflammatory cytokines, 2) activation of intracellular PRRs (RIG-I, MDA5, etc, and/or 3) termination or reduction in protein translation.

[2749] Any of the regions of the polynucleotide comprising an mRNA encoding an immune response primer, an immune response co-stimulatory signal, or a checkpoint inhibitor polypeptide of the present disclosure, can be chemically modified as taught herein or as taught in International Patent Publication No. WO2013052523 (see also US20130115272).

[2750] In some embodiments, a modified polynucleotide, e.g., mRNA comprising at least one modification described herein, of the disclosure encodes an immune response primer, an immune response co-stimulatory signal, or a checkpoint inhibitor polypeptide of the present disclosure. In some embodiments, the modified polynucleotide, e.g., mRNA comprising at least one modification described herein, encodes an immune response primer, an immune response co-stimulatory signal, or a checkpoint inhibitor polypeptide of the present disclosure.

[2751] In some embodiments, the modified polynucleotide, e.g., mRNA comprising at least one modification described herein, of the disclosure encodes a polypeptide comprising the amino acid sequence of an immune response primer, immune response co-stimulatory signal, or checkpoint inhibitor provided in the present disclosure. In some embodiments, the modified polynucleotide, e.g., mRNA comprising at least one modification described herein, of the disclosure encodes a polypeptide comprising the amino acid sequence of an immune response primer, immune response co-stimulatory signal, or checkpoint inhibitor provided in the present disclosure.

[2752] In some embodiments, the modified polynucleotide, e.g., an mRNA comprising at least one modification described herein, encodes at least one immune response primer, immune response co-stimulatory signal, or checkpoint inhibitor polypeptide of the present disclosure, a mutant, a fragment, or variant thereof, or a combination thereof.

[2753] In some embodiments, the modified polynucleotide, e.g., mRNA comprising at least one modification described herein, of the disclosure is selected from the immune response primer, immune response co-stimulatory signal, and checkpoint inhibitor nucleic acid sequences provided in the present disclosure.

[2754] The polynucleotide comprising an mRNA encoding an immune response primer, immune response co-stimulatory signal, or checkpoint inhibitor polypeptide of the present disclosure can also include building blocks, e.g., modified ribonucleosides, and modified ribonucleotides, of polynucleotide molecules. For example, these building blocks can be useful for preparing the polynucleotides of the disclosure. Such building blocks are taught in International Patent Publication No. WO2013052523 (see also US20130115272) and International Application Publication No. WO2014093924 (see also US20150307542). Modifications on the Sugar

[2755] The modified nucleosides and nucleotides (e.g., building block molecules), which can be incorporated into a polynucleotide (e.g., RNA or mRNA, as described herein) comprising an mRNA encoding an immune response primer, immune response co-stimulatory signal, or checkpoint inhibitor polypeptide of the present disclosure, can be modified on the sugar of the ribonucleic acid.

[2756] For example, the 2′ hydroxyl group (OH) can be modified or replaced with a number of different substituents. Exemplary substitutions at the 2′-position include, but are not limited to, H, halo, optionally substituted C₁₋₆ alkyl; optionally substituted C₁₋₆ alkoxy; optionally substituted C₆₋₁₀ aryloxy; optionally substituted C₃₋₈ cycloalkyl; optionally substituted C₃₋₈ cycloalkoxy; optionally substituted C₆₋₁₀ aryloxy; optionally substituted C₆₋₁₀ aryl-C₁₋₆ alkoxy, optionally substituted C₁₋₁₂ (heterocyclyl)oxy; a sugar (e.g., ribose, pentose, or any described herein); a polyethyleneglycol (PEG), —O(CH₂CH₂O)ₙCH₂CH₂OR, where R is H or optionally substituted alkyl, and n is an integer from 0 to 20 (e.g., from 0 to 4, from 0 to 8, from 0 to 10, from 0 to 16, from 1 to 4, from 1 to 8, from 1 to 10, from 1 to 16, from 1 to 20, from 2 to 4, from 2 to 8, from 2 to 10, from 2 to 16, from 2 to 20, from 4 to 8, from 4 to 10, from 4 to 16, and from 4 to 20); “locked” nucleic acids (LNA) in which the 2′-hydroxyl is connected by a C₁₋₆ alkylene or C₁₋₆ heteroalkylene bridge to the 4′-carbon of the same ribose sugar, where exemplary bridges included methylene, propylene, ether, or amino bridges; aminoalkyl, as defined herein; aminoalkoxy, as defined herein; amino as defined herein; and amino acid, as defined herein

[2757] Generally, RNA includes the sugar group ribose, which is a 5-membered ring having an oxygen. Exemplary, non-limiting modified nucleotides include replacement of the oxygen in ribose (e.g., with S, Se, or alkylene, such as methylene or ethylene); addition of a double bond (e.g., to replace ribose with cyclopentenyl or cyclohexenyl); ring contraction of ribose (e.g., to form a 4-membered ring of cyclobutane or oxetane); ring expansion of ribose (e.g., to form a 6—or 7-membered ring having an additional carbon or heteroatom, such as for anhydrohexitol, altritol, mannitol, cyclohexanyl, cyclohexenyl, and morpholino that also has a phosphoramidate backbone); multicyclic forms (e.g., tricyclo; and “unlocked” forms, such as glycol nucleic acid (GNA) (e.g., R-GNA or S-GNA, where ribose is replaced by glycol units attached to phosphodiester bonds), threose nucleic acid (TNA, where ribose is replace with u-L-threofuranosyl-(3′--2′)), and peptide nucleic acid (PNA, where 2-amino-ethyl-glycine linkages replace the ribose and phosphodiester backbone). The sugar group can also contain one or more carbons that possess the opposite stereochemical configuration than that of the corresponding carbon in ribose. Thus, a polynucleotide molecule can include nucleotides containing, e.g., arabinose, as the sugar. Such sugar modifications are taught in International Patent Publication No. WO2013052523 (see also US20130115272) and International Application Publication No. WO2014093924 (see also US20150307542).

### Combinations of Modified Sugars, Nucleobases, and Intemucleoside Linkages

[2758] A polynucleotide comprising an mRNA encoding an immune response primer, immune response co-stimulatory signal, or checkpoint inhibitor of the present disclosure, or any combination thereof, can include a combination of modifications to the sugar, the nucleobase, and/or the internucleoside linkage. These combinations can include any one or more modifications described herein.

[2759] Examples of modified nucleotides and modified nucleotide combinations are provided below in TABLE 25. These combinations of modified nucleotides can be used to form the polynucleotides of the disclosure. Unless otherwise noted, the modified nucleotides can be completely substituted for the natural nucleotides of the polynucleotides of the disclosure. As a non-limiting example, the natural nucleotide uridine can be substituted with a modified nucleoside described herein. In another non-limiting example, the natural nucleotide uridine can be partially substituted (e.g., about 0.1%, 1%, 5%, 10%, 15%, 20%2, 25%, 30%, 35%, 40%, 45%, 50%, 55%, 60%, 65%, 70%, 75%, 80%, 85%, 90%, 95% or 99.9%) with at least one of the modified nucleoside disclosed herein. Any combination of base/sugar or linker can be incorporated into the polynucleotides of the disclosure and such modifications are taught in International Patent Publication No. WO2013052523 (see also US20130115272) and International Application Publication No. WO2014093924 (see also US20150307542).

TABLE 25
Combinations

| Modified | |
|---|---|
| Nucleotide | Modified Nucleotide Combination |
| α-thio- | α-thio-cytidine/5-iodo-uridine |
| cytidine | α-thio-cytidine/N1-methyl-pseudouridine |
| | α-thio-cytidine/α-thio-uridine |
| | α-thio-cytidine/5-methyl-uridine |
| | α-thio-cytidine/pseudo-uridine |
| | about 50% of the cytosines are α-thio-cytidine |
| Pseudo- | pseudoisocytidine/5-iodo-uridine |
| isocytidine | pseudoisocytidine/N1-methyl-pseudouridine |
| | pseudoisocytidine/α-thio-uridine |
| | pseudoisocytidine/5-methyl-uridine |
| | pseudoisocytidine/pseudouridine |
| | about 25% of cytosines are pseudoisocytidine |
| | pseudoisocytidine/about 50% of uridines are N1- |
| | methyl-pseudouridine and about 50% of uridines are |
| | pseudouridine |
| | pseudoisocytidine/about 25% of uridines are N1- |
| | methyl-pseudouridine and about 25% of uridines are |
| | pseudouridine |
| pyrrolo- | pyrrolo-cytidine/5-iodo-uridine |
| cytidine | pyrrolo-cytidine/N1-methyl-pseudouridine |
| | pyrrolo-cytidine/α-thio-uridine |
| | pyrrolo-cytidine/5-methyl-uridine |
| | pyrrolo-cytidine/pseudouridine |
| | about 50% of the cytosines are pyrrolo-cytidine |
| 5-methyl- | 5-methyl-cytidine/5-iodo-uridine |
| cytidine | 5-methyl-cytidine/N1-methyl-pseudouridine |
| | 5-methyl-cytidine/α-thio-uridine |
| | 5-methyl-cytidine/5-methyl-uridine |
| | 5-methyl-cytidine/pseudouridine |
| | about 25% of cytosines are 5-methyl-cytidine |
| | about 50% of cytosines are 5-methyl-cytidine |
| | 5-methyl-cytidine/5-methoxy-uridine |
| | 5-methyl-cytidine/5-bromo-uridine |
| | 5-methyl-cytidine/2-thio-uridine |
| | 5-methyl-cytidine/about 50% of uridines are 2-thio- |
| | uridine |
| | about 50% of uridines are 5-methyl-cytidine/about |
| | 50% of uridines are 2-thio-uridine |
| N4-acetyl- | N4-acetyl-cytidine/5-iodo-uridine |
| cytidine | N4-acetyl-cytidine/N1-methyl-pseudouridine |
| | N4-acetyl-cytidine/α-thio-uridine |
| | N4-acetyl-cytidine/5-methyl-uridine |
| | N4-acetyl-cytidine/pseudouridine |
| | about 50% of cytosines are N4-acetyl-cytidine |
| | about 25% of cytosines are N4-acetyl-cytidine |
| | N4-acetyl-cytidine/5-methoxy-uridine |
| | N4-acetyl-cytidine/5-bromo-uridine |
| | N4-acetyl-cytidine/2-thio-uridine |
| | about 50% of cytosines are N4-acetyl-cytidine/about |
| | 50% of uridines are 2-thio-uridine |

[2760] Additional examples of modified nucleotides and modified nucleotide combinations are provided below in TABLE 26.

TABLE 26
Additional combinations

| Uracil | Cytosine | Adenine | Guanine |
|---|---|---|---|
| 5-methoxy-UTP | CTP | ATP | GTP |
| 5-Methoxy-UTP | N4Ac-CTP | ATP | GTP |
| 5-Methoxy-UTP | 5-Methyl-CTP | ATP | GTP |
| 5-Methoxy-UTP | 5-Trifluoromethyl-CTP | ATP | GTP |
| 5-Methoxy-UTP | 5-Hydroxymethyl-CTP | ATP | GTP |
| 5-Methoxy-UTP | 5-Bromo-CTP | ATP | GTP |
| 5-Methoxy-UTP | N4Ac-CTP | ATP | GTP |
| 5-Methoxy-UTP | CTP | ATP | GTP |
| 5-Methoxy-UTP | 5-Methyl-CTP | ATP | GTP |
| 5-Methoxy-UTP | 5-Trifluoromethyl-CTP | ATP | GTP |
| 5-Methoxy-UTP | 5-Hydroxymethyl-CTP | ATP | GTP |
| 5-Methoxy-UTP | 5-Bromo-CTP | ATP | GTP |
| 5-Methoxy-UTP | N4—Ac-CTP | ATP | GTP |
| 5-Methoxy-UTP | 5-Iodo-CTP | ATP | GTP |
| 5-Methoxy-UTP | 5-Bromo-CTP | ATP | GTP |
| 5-Methoxy-UTP | CTP | ATP | GTP |
| 5-Methoxy-UTP | 5-Methyl-CTP | ATP | GTP |
| 75% 5-Methoxy-UTP + 25% | 5-Methyl-CTP | ATP | GTP |
| UTP | | | |
| 50% 5-Methoxy-UTP + 50% | 5-Methyl-CTP | ATP | GTP |
| UTP | | | |
| 25% 5-Methoxy-UTP + 75% | 5-Methyl-CTP | ATP | GTP |
| UTP | | | |
| 5-Methoxy-UTP | 75% 5-Methyl-CTP + 25% CTP | ATP | GTP |
| 5-Methoxy-UTP | 50% 5-Methyl-CTP + 50% CTP | ATP | GTP |
| 5-Methoxy-UTP | 25% 5-Methyl-CTP + 75% CTP | ATP | GTP |
| 75% 5-Methoxy-UTP + 25% | 75% 5-Methyl-CTP + 25% CTP | ATP | GTP |
| UTP | | | |
| 75% 5-Methoxy-UTP + 25% | 50% 5-Methyl-CTP + 50% CTP | ATP | GTP |
| UTP | | | |
| 75% 5-Methoxy-UTP + 25% | 25% 5-Methyl-CTP + 75% CTP | ATP | GTP |
| UTP | | | |
| 50% 5-Methoxy-UTP + 50% | 75% 5-Methyl-CTP + 25% CTP | ATP | GTP |
| UTP | | | |
| 50% 5-Methoxy-UTP + 50% | 50% 5-Methyl-CTP + 50% CTP | ATP | GTP |
| UTP | | | |
| 50% 5-Methoxy-UTP + 50% | 25% 5-Methyl-CTP + 75% CTP | ATP | GTP |
| UTP | | | |
| 25% 5-Methoxy-UTP + 75% | 75% 5-Methyl-CTP + 25% CTP | ATP | GTP |
| UTP | | | |
| 25% 5-Methoxy-UTP + 75% | 50% 5-Methyl-CTP + 50% CTP | ATP | GTP |
| UTP | | | |
| 25% 5-Methoxy-UTP + 75% | 25% 5-Methyl-CTP + 75% CTP | ATP | GTP |
| UTP | | | |
| 75% 5-Methoxy-UTP + 25% | CTP | ATP | GTP |
| UTP | | | |
| 50% 5-Methoxy-UTP + 50% | CTP | ATP | GTP |
| UTP | | | |
| 25% 5-Methoxy-UTP + 75% | CTP | ATP | GTP |
| UTP | | | |
| 5-Methoxy-UTP | CTP | ATP | GTP |
| 5-Methoxy-UTP | CTP | ATP | GTP |
| 5-Methoxy-UTP | CTP | ATP | GTP |
| 5-Methoxy-UTP | 5-Methyl-CTP | ATP | GTP |
| 5-Methoxy-UTP | 5-Methyl-CTP | ATP | GTP |
| 5-Methoxy-UTP | 5-Methyl-CTP | ATP | GTP |
| 5-Methoxy-UTP | CTP | Alpha-thio- | GTP |
| | | ATP | |
| 5-Methoxy-UTP | 5-Methyl-CTP | Alpha-thio- | GTP |
| | | ATP | |
| 5-Methoxy-UTP | CTP | ATP | Alpha-thio- |
| | | | GTP |
| 5-Methoxy-UTP | 5-Methyl-CTP | ATP | Alpha-thio- |
| | | | GTP |
| 5-Methoxy-UTP | CTP | N6—Me- | GTP |
| | | ATP | |
| 5-Methoxy-UTP | 5-Methyl-CTP | N6—Me- | GTP |
| | | ATP | |
| 5-Methoxy-UTP | CTP | ATP | GTP |
| 5-Methoxy-UTP | 5-Methyl-CTP | ATP | GTP |
| 75% 5-Methoxy-UTP + 25% | 5-Methyl-CTP | ATP | GTP |
| UTP | | | |
| 50% 5-Methoxy-UTP + 50% | 5-Methyl-CTP | ATP | GTP |
| UTP | | | |
| 25% 5-Methoxy-UTP + 75% | 5-Methyl-CTP | ATP | GTP |
| UTP | | | |
| 5-Methoxy-UTP | 75% 5-Methyl-CTP + 25% CTP | ATP | GTP |
| 5-Methoxy-UTP | 50% 5-Methyl-CTP + 50% CTP | ATP | GTP |
| 5-Methoxy-UTP | 25% 5-Methyl-CTP + 75% CTP | ATP | GTP |
| 75% 5-Methoxy-UTP + 25% | 75% 5-Methyl-CTP + 25% CTP | ATP | GTP |
| UTP | | | |
| 75% 5-Methoxy-UTP + 25% | 50% 5-Methyl-CTP + 50% CTP | ATP | GTP |
| UTP | | | |
| 75% 5-Methoxy-UTP + 25% | 25% 5-Methyl-CTP + 75% CTP | ATP | GTP |
| UTP | | | |
| 50% 5-Methoxy-UTP + 50% | 75% 5-Methyl-CTP + 25% CTP | ATP | GTP |
| UTP | | | |
| 50% 5-Methoxy-UTP + 50% | 50% 5-Methyl-CTP + 50% CTP | ATP | GTP |
| UTP | | | |
| 50% 5-Methoxy-UTP + 50% | 25% 5-Methyl-CTP + 75% CTP | ATP | GTP |
| UTP | | | |
| 25% 5-Methoxy-UTP + 75% | 75% 5-Methyl-CTP + 25% CTP | ATP | GTP |
| UTP | | | |
| 25% 5-Methoxy-UTP + 75% | 50% 5-Methyl-CTP + 50% CTP | ATP | GTP |
| UTP | | | |
| 25% 5-Methoxy-UTP + 75% | 25% 5-Methyl-CTP + 75% CTP | ATP | GTP |
| UTP | | | |
| 75% 5-Methoxy-UTP + 25% | CTP | ATP | GTP |
| UTP | | | |
| 50% 5-Methoxy-UTP + 50% | CTP | ATP | GTP |
| UTP | | | |
| 25% 5-Methoxy-UTP + 75% | CTP | ATP | GTP |
| UTP | | | |
| 5-Methoxy-UTP | 5-Ethyl-CTP | ATP | GTP |
| 5-Methoxy-UTP | 5-Methoxy-CTP | ATP | GTP |
| 5-Methoxy-UTP | 5-Ethynyl-CTP | ATP | GTP |
| 5-Methoxy-UTP | CTP | ATP | GTP |
| 5-Methoxy-UTP | 5-Methyl-CTP | ATP | GTP |
| 5-Methoxy-UTP | CTP | ATP | GTP |
| 5-Methoxy-UTP | 5-Methyl-CTP | ATP | GTP |
| 75% 5-Methoxy-UTP + 25% | 5-Methyl-CTP | ATP | GTP |
| 1-Methyl-pseudo-UTP | | | |
| 50% 5-Methoxy-UTP + 50% | 5-Methyl-CTP | ATP | GTP |
| 1-Methyl-pseudo-UTP | | | |
| 25% 5-Methoxy-UTP + 75% | 5-Methyl-CTP | ATP | GTP |
| 1-Methyl-pseudo-UTP | | | |
| 5-Methoxy-UTP | 75% 5-Methyl-CTP + 25% CTP | ATP | GTP |
| 5-Methoxy-UTP | 50% 5-Methyl-CTP + 50% CTP | ATP | GTP |
| 5-Methoxy-UTP | 25% 5-Methyl-CTP + 75% CTP | ATP | GTP |
| 75% 5-Methoxy-UTP + 25% | 75% 5-Methyl-CTP + 25% CTP | ATP | GTP |
| 1-Methyl-pseudo-UTP | | | |
| 75% 5-Methoxy-UTP + 25% | 50% 5-Methyl-CTP + 50% CTP | ATP | GTP |
| 1-Methyl-pseudo-UTP | | | |
| 75% 5-Methoxy-UTP + 25% | 25% 5-Methyl-CTP + 75% CTP | ATP | GTP |
| 1-Methyl-pseudo-UTP | | | |
| 50% 5-Methoxy-UTP + 50% | 75% 5-Methyl-CTP + 25% CTP | ATP | GTP |
| 1-Methyl-pseudo-UTP | | | |
| 50% 5-Methoxy-UTP + 50% | 50% 5-Methyl-CTP + 50% CTP | ATP | GTP |
| 1-Methyl-pseudo-UTP | | | |
| 50% 5-Methoxy-UTP + 50% | 25% 5-Methyl-CTP + 75% CTP | ATP | GTP |
| 1-Methyl-pseudo-UTP | | | |
| 25% 5-Methoxy-UTP + 75% | 75% 5-Methyl-CTP + 25% CTP | ATP | GTP |
| 1-Methyl-pseudo-UTP | | | |
| 25% 5-Methoxy-UTP + 75% | 50% 5-Methyl-CTP + 50% CTP | ATP | GTP |
| 1-Methyl-pseudo-UTP | | | |
| 25% 5-Methoxy-UTP + 75% | 25% 5-Methyl-CTP + 75% CTP | ATP | GTP |
| 1-Methyl-pseudo-UTP | | | |
| 75% 5-Methoxy-UTP + 25% | CTP | ATP | GTP |
| 1-Methyl-pseudo-UTP | | | |
| 50% 5-Methoxy-UTP + 50% | CTP | ATP | GTP |
| 1-Methyl-pseudo-UTP | | | |
| 25% 5-Methoxy-UTP + 75% | CTP | ATP | GTP |
| 1-Methyl-pseudo-UTP | | | |
| 5-methoxy-UTP (In House) | CTP | ATP | GTP |
| 5-methoxy-UTP (Hongene) | CTP | ATP | GTP |
| 5-methoxy-UTP (Hongene) | 5-Methyl-CTP | ATP | GTP |
| 5-Methoxy-UTP | CTP | ATP | GTP |
| 5-Methoxy-UTP | 5-Methyl-CTP | ATP | GTP |
| 75% 5-Methoxy-UTP + 25% | 5-Methyl-CTP | ATP | GTP |
| UTP | | | |
| 50% 5-Methoxy-UTP + 50% | 5-Methyl-CTP | ATP | GTP |
| UTP | | | |
| 25% 5-Methoxy-UTP + 75% | 5-Methyl-CTP | ATP | GTP |
| UTP | | | |
| 5-Methoxy-UTP | 75% 5-Methyl-CTP + 25% CTP | ATP | GTP |
| 5-Methoxy-UTP | 50% 5-Methyl-CTP + 50% CTP | ATP | GTP |
| 5-Methoxy-UTP | 25% 5-Methyl-CTP + 75% CTP | ATP | GTP |
| 75% 5-Methoxy-UTP + 25% | 75% 5-Methyl-CTP + 25% CTP | ATP | GTP |
| UTP | | | |
| 75% 5-Methoxy-UTP + 25% | 50% 5-Methyl-CTP + 50% CTP | ATP | GTP |
| UTP | | | |
| 75% 5-Methoxy-UTP + 25% | 25% 5-Methyl-CTP + 75% CTP | ATP | GTP |
| UTP | | | |
| 50% 5-Methoxy-UTP + 50% | 75% 5-Methyl-CTP + 25% CTP | ATP | GTP |
| UTP | | | |
| 50% 5-Methoxy-UTP + 50% | 50% 5-Methyl-CTP + 50% CTP | ATP | GTP |
| UTP | | | |
| 50% 5-Methoxy-UTP + 50% | 25% 5-Methyl-CTP + 75% CTP | ATP | GTP |
| UTP | | | |
| 25% 5-Methoxy-UTP + 75% | 75% 5-Methyl-CTP + 25% CTP | ATP | GTP |
| UTP | | | |
| 25% 5-Methoxy-UTP + 75% | 50% 5-Methyl-CTP + 50% CTP | ATP | GTP |
| UTP | | | |
| 25% 5-Methoxy-UTP + 75% | 25% 5-Methyl-CTP + 75% CTP | ATP | GTP |
| UTP | | | |
| 75% 5-Methoxy-UTP + 25% | CTP | ATP | GTP |
| UTP | | | |
| 50% 5-Methoxy-UTP + 50% | CTP | ATP | GTP |
| UTP | | | |
| 25% 5-Methoxy-UTP + 75% | CTP | ATP | GTP |
| UTP | | | |
| 5-Methoxy-UTP | CTP | ATP | GTP |
| 5-Methoxy-UTP | 5-Methyl-CTP | ATP | GTP |
| 75% 5-Methoxy-UTP + 25% | 5-Methyl-CTP | ATP | GTP |
| UTP | | | |
| 50% 5-Methoxy-UTP + 50% | 5-Methyl-CTP | ATP | GTP |
| UTP | | | |
| 25% 5-Methoxy-UTP + 75% | 5-Methyl-CTP | ATP | GTP |
| UTP | | | |
| 5-Methoxy-UTP | 75% 5-Methyl-CTP + 25% CTP | ATP | GTP |
| 5-Methoxy-UTP | 50% 5-Methyl-CTP + 50% CTP | ATP | GTP |
| 5-Methoxy-UTP | 25% 5-Methyl-CTP + 75% CTP | ATP | GTP |
| 75% 5-Methoxy-UTP + 25% | 75% 5-Methyl-CTP + 25% CTP | ATP | GTP |
| UTP | | | |
| 75% 5-Methoxy-UTP + 25% | 50% 5-Methyl-CTP + 50% CTP | ATP | GTP |
| UTP | | | |
| 75% 5-Methoxy-UTP + 25% | 25% 5-Methyl-CTP + 75% CTP | ATP | GTP |
| UTP | | | |
| 50% 5-Methoxy-UTP + 50% | 75% 5-Methyl-CTP + 25% CTP | ATP | GTP |
| UTP | | | |
| 50% 5-Methoxy-UTP + 50% | 50% 5-Methyl-CTP + 50% CTP | ATP | GTP |
| UTP | | | |
| 50% 5-Methoxy-UTP + 50% | 25% 5-Methyl-CTP + 75% CTP | ATP | GTP |
| UTP | | | |
| 25% 5-Methoxy-UTP + 75% | 75% 5-Methyl-CTP + 25% CTP | ATP | GTP |
| UTP | | | |
| 25% 5-Methoxy-UTP + 75% | 50% 5-Methyl-CTP + 50% CTP | ATP | GTP |
| UTP | | | |
| 25% 5-Methoxy-UTP + 75% | 25% 5-Methyl-CTP + 75% CTP | ATP | GTP |
| UTP | | | |
| 75% 5-Methoxy-UTP + 25% | CTP | ATP | GTP |
| UTP | | | |
| 50% 5-Methoxy-UTP + 50% | CTP | ATP | GTP |
| UTP | | | |
| 25% 5-Methoxy-UTP + 75% | CTP | ATP | GTP |
| UTP | | | |
| 5-Methoxy-UTP | CTP | ATP | GTP |
| 25% 5-Methoxy-UTP + 75% | 75% 5-Methyl-CTP + 25% CTP | ATP | GTP |
| UTP | | | |
| 25% 5-Methoxy-UTP + 75% | 50% 5-Methyl-CTP + 50% CTP | ATP | GTP |
| UTP | | | |
| 25% 5-Methoxy-UTP + 75% | 25% 5-Methyl-CTP + 75% CTP | ATP | GTP |
| UTP | | | |
| 75% 5-Methoxy-UTP + 25% | 75% 5-Methyl-CTP + 25% CTP | ATP | GTP |
| UTP | | | |
| 5-Methoxy-UTP | CTP | ATP | GTP |
| 25% 5-Methoxy-UTP + 75% | 75% 5-Methyl-CTP + 25% CTP | ATP | GTP |
| UTP | | | |
| 25% 5-Methoxy-UTP + 75% | 50% 5-Methyl-CTP + 50% CTP | ATP | GTP |
| UTP | | | |
| 25% 5-Methoxy-UTP + 75% | 25% 5-Methyl-CTP + 75% CTP | ATP | GTP |
| UTP | | | |
| 75% 5-Methoxy-UTP + 25% | 75% 5-Methyl-CTP + 25% CTP | ATP | GTP |
| UTP | | | |
| 5-Methoxy-UTP | CTP | ATP | GTP |
| 25% 5-Methoxy-UTP + 75% | 75% 5-Methyl-CTP + 25% CTP | ATP | GTP |
| UTP | | | |
| 25% 5-Methoxy-UTP + 75% | 50% 5-Methyl-CTP + 50% CTP | ATP | GTP |
| UTP | | | |
| 25% 5-Methoxy-UTP + 75% | 25% 5-Methyl-CTP + 75% CTP | ATP | GTP |
| UTP | | | |
| 75% 5-Methoxy-UTP + 25% | 75% 5-Methyl-CTP + 25% CTP | ATP | GTP |
| UTP | | | |
| 5-Methoxy-UTP | CTP | ATP | GTP |
| 25% 5-Methoxy-UTP + 75% | 75% 5-Methyl-CTP + 25% CTP | ATP | GTP |
| UTP | | | |
| 25% 5-Methoxy-UTP + 75% | 50% 5-Methyl-CTP + 50% CTP | ATP | GTP |
| UTP | | | |
| 25% 5-Methoxy-UTP + 75% | 25% 5-Methyl-CTP + 75% CTP | ATP | GTP |
| UTP | | | |
| 75% 5-Methoxy-UTP + 25% | 75% 5-Methyl-CTP + 25% CTP | ATP | GTP |
| UTP | | | |
| 5-Methoxy-UTP | CTP | ATP | GTP |
| 25% 5-Methoxy-UTP + 75% | 75% 5-Methyl-CTP + 25% CTP | ATP | GTP |
| UTP | | | |
| 25% 5-Methoxy-UTP + 75% | 50% 5-Methyl-CTP + 50% CTP | ATP | GTP |
| UTP | | | |
| 25% 5-Methoxy-UTP + 75% | 25% 5-Methyl-CTP + 75% CTP | ATP | GTP |
| UTP | | | |
| 75% 5-Methoxy-UTP + 25% | 75% 5-Methyl-CTP + 25% CTP | ATP | GTP |
| UTP | | | |
| 5-Methoxy-UTP | CTP | ATP | GTP |
| 25% 5-Methoxy-UTP + 75% | 75% 5-Methyl-CTP + 25% CTP | ATP | GTP |
| UTP | | | |
| 25% 5-Methoxy-UTP + 75% | 50% 5-Methyl-CTP + 50% CTP | ATP | GTP |
| UTP | | | |
| 25% 5-Methoxy-UTP + 75% | 25% 5-Methyl-CTP + 75% CTP | ATP | GTP |
| UTP | | | |
| 75% 5-Methoxy-UTP + 25% | 75% 5-Methyl-CTP + 25% CTP | ATP | GTP |
| UTP | | | |
| 5-Methoxy-UTP | CTP | ATP | GTP |
| 25% 5-Methoxy-UTP + 75% | 75% 5-Methyl-CTP + 25% CTP | ATP | GTP |
| UTP | | | |
| 25% 5-Methoxy-UTP + 75% | 50% 5-Methyl-CTP + 50% CTP | ATP | GTP |
| UTP | | | |
| 25% 5-Methoxy-UTP + 75% | 25% 5-Methyl-CTP + 75% CTP | ATP | GTP |
| UTP | | | |
| 75% 5-Methoxy-UTP + 25% | 75% 5-Methyl-CTP + 25% CTP | ATP | GTP |
| UTP | | | |
| 5-Methoxy-UTP | 5-Fluoro-CTP | ATP | GTP |
| 5-Methoxy-UTP | 5-Phenyl-CTP | ATP | GTP |
| 5-Methoxy-UTP | N4-Bz-CTP | ATP | GTP |
| 5-Methoxy-UTP | CTP | N6- | GTP |
| | | Isopentenyl- | |
| | | ATP | |
| 5-Methoxy-UTP | N4—Ac-CTP | ATP | GTP |
| 25% 5-Methoxy-UTP + 75% | 25% N4—Ac-CTP + 75% CTP | ATP | GTP |
| UTP | | | |
| 25% 5-Methoxy-UTP + 75% | 75% N4—Ac-CTP + 25% CTP | ATP | GTP |
| UTP | | | |
| 75% 5-Methoxy-UTP + 25% | 25% N4—Ac-CTP + 75% CTP | ATP | GTP |
| UTP | | | |
| 75% 5-Methoxy-UTP + 25% | 75% N4—Ac-CTP + 25% CTP | ATP | GTP |
| UTP | | | |
| 5-Methoxy-UTP | 5-Hydroxymethyl-CTP | ATP | GTP |
| 25% 5-Methoxy-UTP + 75% | 25% 5-Hydroxymethyl-CTP + 75% | ATP | GTP |
| UTP | CTP | | |
| 25% 5-Methoxy-UTP + 75% | 75% 5-Hydroxymethyl-CTP + 25% | ATP | GTP |
| UTP | CTP | | |
| 75% 5-Methoxy-UTP + 25% | 25% 5-Hydroxymethyl-CTP + 75% | ATP | GTP |
| UTP | CTP | | |
| 75% 5-Methoxy-UTP + 25% | 75% 5-Hydroxymethyl-CTP + 25% | ATP | GTP |
| UTP | CTP | | |
| 5-Methoxy-UTP | N4-Methyl CTP | ATP | GTP |
| 25% 5-Methoxy-UTP + 75% | 25% N4-Methyl CTP + 75% CTP | ATP | GTP |
| UTP | | | |
| 25% 5-Methoxy-UTP + 75% | 75% N4-Methyl CTP + 25% CTP | ATP | GTP |
| UTP | | | |
| 75% 5-Methoxy-UTP + 25% | 25% N4-Methyl CTP + 75% CTP | ATP | GTP |
| UTP | | | |
| 75% 5-Methoxy-UTP + 25% | 75% N4-Methyl CTP + 25% CTP | ATP | GTP |
| UTP | | | |
| 5-Methoxy-UTP | 5-Trifluoromethyl-CTP | ATP | GTP |
| 25% 5-Methoxy-UTP + 75% | 25% 5-Trifluoromethyl-CTP + 75% | ATP | GTP |
| UTP | CTP | | |
| 25% 5-Methoxy-UTP + 75% | 75% 5-Trifluoromethyl-CTP + 25% | ATP | GTP |
| UTP | CTP | | |
| 75% 5-Methoxy-UTP + 25% | 25% 5-Trifluoromethyl-CTP + 75% | ATP | GTP |
| UTP | CTP | | |
| 75% 5-Methoxy-UTP + 25% | 75% 5-Trifluoromethyl-CTP + 25% | ATP | GTP |
| UTP | CTP | | |
| 5-Methoxy-UTP | 5-Bromo-CTP | ATP | GTP |
| 25% 5-Methoxy-UTP + 75% | 25% 5-Bromo-CTP + 75% CTP | ATP | GTP |
| UTP | | | |
| 25% 5-Methoxy-UTP + 75% | 75% 5-Bromo-CTP + 25% CTP | ATP | GTP |
| UTP | | | |
| 75% 5-Methoxy-UTP + 25% | 25% 5-Bromo-CTP + 75% CTP | ATP | GTP |
| UTP | | | |
| 75% 5-Methoxy-UTP + 25% | 75% 5-Bromo-CTP + 25% CTP | ATP | GTP |
| UTP | | | |
| 5-Methoxy-UTP | 5-Iodo-CTP | ATP | GTP |
| 25% 5-Methoxy-UTP + 75% | 25% 5-Iodo-CTP + 75% CTP | ATP | GTP |
| UTP | | | |
| 25% 5-Methoxy-UTP + 75% | 75% 5-Iodo-CTP + 25% CTP | ATP | GTP |
| UTP | | | |
| 75% 5-Methoxy-UTP + 25% | 25% 5-Iodo-CTP + 75% CTP | ATP | GTP |
| UTP | | | |
| 75% 5-Methoxy-UTP + 25% | 75% 5-Iodo-CTP + 25% CTP | ATP | GTP |
| UTP | | | |
| 5-Methoxy-UTP | 5-Ethyl-CTP | ATP | GTP |
| 25% 5-Methoxy-UTP + 75% | 25% 5-Ethyl-CTP + 75% CTP | ATP | GTP |
| UTP | | | |
| 25% 5-Methoxy-UTP + 75% | 75% 5-Ethyl-CTP + 25% CTP | ATP | GTP |
| UTP | | | |
| 75% 5-Methoxy-UTP + 25% | 25% 5-Ethyl-CTP + 75% CTP | ATP | GTP |
| UTP | | | |
| 75% 5-Methoxy-UTP + 25% | 75% 5-Ethyl-CTP + 25% CTP | ATP | GTP |
| UTP | | | |
| 5-Methoxy-UTP | 5-Methoxy-CTP | ATP | GTP |
| 25% 5-Methoxy-UTP + 75% | 25% 5-Methoxy-CTP + 75% CTP | ATP | GTP |
| UTP | | | |
| 25% 5-Methoxy-UTP + 75% | 75% 5-Methoxy-CTP + 25% CTP | ATP | GTP |
| UTP | | | |
| 75% 5-Methoxy-UTP + 25% | 25% 5-Methoxy-CTP + 75% CTP | ATP | GTP |
| UTP | | | |
| 75% 5-Methoxy-UTP + 25% | 75% 5-Methoxy-CTP + 25% CTP | ATP | GTP |
| UTP | | | |
| 5-Methoxy-UTP | 5-Ethynyl-CTP | ATP | GTP |
| 25% 5-Methoxy-UTP + 75% | 25% 5-Ethynyl-CTP + 75% CTP | ATP | GTP |
| UTP | | | |
| 25% 5-Methoxy-UTP + 75% | 75% 5-Ethynyl-CTP + 25% CTP | ATP | GTP |
| UTP | | | |
| 75% 5-Methoxy-UTP + 25% | 25% 5-Ethynyl-CTP + 75% CTP | ATP | GTP |
| UTP | | | |
| 75% 5-Methoxy-UTP + 25% | 75% 5-Ethynyl-CTP + 25% CTP | ATP | GTP |
| UTP | | | |
| 5-Methoxy-UTP | 5-Pseudo-iso-CTP | ATP | GTP |
| 25% 5-Methoxy-UTP + 75% | 25% 5-Pseudo-iso-CTP + 75% CTP | ATP | GTP |
| UTP | | | |
| 25% 5-Methoxy-UTP + 75% | 75% 5-Pseudo-iso-CTP + 25% CTP | ATP | GTP |
| UTP | | | |
| 75% 5-Methoxy-UTP + 25% | 25% 5-Pseudo-iso-CTP + 75% CTP | ATP | GTP |
| UTP | | | |
| 75% 5-Methoxy-UTP + 25% | 75% 5-Pseudo-iso-CTP + 25% CTP | ATP | GTP |
| UTP | | | |
| 5-Methoxy-UTP | 5-Formyl-CTP | ATP | GTP |
| 25% 5-Methoxy-UTP + 75% | 25% 5-Formyl-CTP + 75% CTP | ATP | GTP |
| UTP | | | |
| 25% 5-Methoxy-UTP + 75% | 75% 5-Formyl-CTP + 25% CTP | ATP | GTP |
| UTP | | | |
| 75% 5-Methoxy-UTP + 25% | 25% 5-Formyl-CTP + 75% CTP | ATP | GTP |
| UTP | | | |
| 75% 5-Methoxy-UTP + 25% | 75% 5-Formyl-CTP + 25% CTP | ATP | GTP |
| UTP | | | |
| 5-Methoxy-UTP | 5-Aminoallyl-CTP | ATP | GTP |
| 25% 5-Methoxy-UTP + 75% | 25% 5-Aminoallyl-CTP + 75% CTP | ATP | GTP |
| UTP | | | |
| 25% 5-Methoxy-UTP + 75% | 75% 5-Aminoallyl-CTP + 25% CTP | ATP | GTP |
| UTP | | | |
| 75% 5-Methoxy-UTP + 25% | 25% 5-Aminoallyl-CTP + 75% CTP | ATP | GTP |
| UTP | | | |
| 75% 5-Methoxy-UTP + 25% | 75% 5-Aminoallyl-CTP + 25% CTP | ATP | GTP |
| UTP | | | |

### XI. Pharmaceutical Compositions: Formulation, Administration, Delivery and Dosing

[2761] The present disclosure provides pharmaceutical formulations comprising any of the compositions disclosed herein, e.g., combination therapies comprising at least two mRNAs, wherein each mRNAs encodes an immune response primer polypeptide, an immune response co-stimulatory signal polypeptide, a checkpoint inhibitor polypeptide, or a combination thereof (e.g., a first polynucleotide comprising an mRNA encoding a first protein comprising an IL23 polypeptide, a second polynucleotide comprising an mRNA encoding a second protein comprising an IL36-gamma polypeptide, and/or a third polynucleotide comprising an mRNA encoding a third protein, wherein the third protein comprises an OX40L polypeptide) as described elsewhere herein.

[2762] In some embodiments of the disclosure, the polynucleotides are formulated in compositions and complexes in combination with one or more pharmaceutically acceptable excipients. Pharmaceutical compositions can optionally comprise one or more additional active substances, e.g. therapeutically and/or prophylactically active substances. Pharmaceutical compositions of the present disclosure can be sterile and/or pyrogen-free. General considerations in the formulation and/or manufacture of pharmaceutical agents can be found, for example, in Remington: The Science and Practice of Pharmacy 21St ed., Lippincott Williams & Wilkins, 2005.

[2763] In some embodiments, compositions are administered to humans, human patients or subjects. For the purposes of the present disclosure, the phrase “active ingredient” generally refers to polynucleotides to be delivered as described herein.

[2764] Although the descriptions of pharmaceutical compositions provided herein are principally directed to pharmaceutical compositions which are suitable for administration to humans, it will be understood by the skilled artisan that such compositions are generally suitable for administration to any other animal, e.g., to non-human animals, e.g. non-human mammals. Modification of pharmaceutical compositions suitable for administration to humans in order to render the compositions suitable for administration to various animals is well understood, and the ordinarily skilled veterinary pharmacologist can design and/or perform such modification with merely ordinary, if any, experimentation. Subjects to which administration of the pharmaceutical compositions is contemplated include, but are not limited to, humans and/or other primates; mammals.

[2765] In some embodiments, the polynucleotide of the present disclosure is formulated for subcutaneous, intravenous, intraperitoneal, intratumoral, intramuscular, intra-articular, intra-synovial, intrasternal, intrathecal, intrahepatic, intralesional, intracranial, intraventricular, oral, inhalation spray, topical, rectal, nasal, buccal, vaginal, intratumoral, or implanted reservoir intramuscular, subcutaneous, intratumoral, or intradermal delivery. In other embodiments, the polynucleotide is formulated for intratumoral, intraperitoneal, or intravenous delivery. In a particular embodiment, the polynucleotide of the present disclosure is formulated for intratumoral delivery.

[2766] Formulations of the pharmaceutical compositions described herein can be prepared by any method known or hereafter developed in the art of pharmacology. In general, such preparatory methods include the step of bringing the active ingredient into association with an excipient and/or one or more other accessory ingredients, and then, if necessary and/or desirable, dividing, shaping and/or packaging the product into a desired single- or multi-dose unit.

[2767] Relative amounts of the active ingredient, the pharmaceutically acceptable excipient, and/or any additional ingredients in a pharmaceutical composition in accordance with the disclosure will vary, depending upon the identity, size, and/or condition of the subject treated and further depending upon the route by which the composition is to be administered. By way of example, the composition can comprise between 0.10% and 100%, e.g., between 0.5% and 50%, between 1% and 30%, between 5% and 80%, or at least 80% (w/w) active ingredient.

### Formulations

[2768] The polynucleotides of the combination therapies disclosed herein (i.e., at least two polynucleotides, wherein each polynucleotide comprises an ORF encoding an immune response primer polypeptide, an immune response co-stimulatory signal polypeptide, or an a checkpoint inhibitor polypeptide), i.e., compositions comprising at least two mRNAs, wherein each mRNA encodes an immune response primer, an immune response co-stimulatory signal, a checkpoint inhibitor, or a combination thereof (e.g., a first polynucleotide comprising an mRNA encoding a first protein comprising an IL23 polypeptide, a second polynucleotide comprising an mRNA encoding a second protein comprising an IL36-gamma polypeptide, and/or a third polynucleotide comprising an mRNA encoding a third protein, wherein the third protein comprises an OX40L polypeptide), can be formulated using one or more excipients.

[2769] The function of the one or more excipients is, e.g., to: (1) increase stability; (2) increase cell transfection; (3) permit the sustained or delayed release (e.g., from a depot formulation of the polynucleotide); (4) alter the biodistribution (e.g., target the polynucleotide to specific tissues or cell types); (5) increase the translation of encoded protein in vivo; and/or (6) alter the release profile of encoded protein in vivo. In addition to traditional excipients such as any and all solvents, dispersion media, diluents, or other liquid vehicles, dispersion or suspension aids, surface active agents, isotonic agents, thickening or emulsifying agents, preservatives, excipients of the present disclosure can include, without limitation, lipidoids, liposomes, lipid nanoparticles, polymers, lipoplexes, core-shell nanoparticles, peptides, proteins, cells transfected with polynucleotides (e.g., for transplantation into a subject), hyaluronidase, nanoparticle mimics and combinations thereof. Accordingly, the formulations of the disclosure can include one or more excipients, each in an amount that together increases the stability of the polynucleotide, increases cell transfection by the polynucleotide, increases the expression of polynucleotides encoded protein, and/or alters the release profile of polynucleotide encoded proteins. Further, the polynucleotides of the present disclosure can be formulated using self-assembled nucleic acid nanoparticles.

[2770] Formulations of the pharmaceutical compositions described herein can be prepared by any method known or hereafter developed in the art of pharmacology. In general, such preparatory methods include the step of associating the active ingredient with an excipient and/or one or more other accessory ingredients.

[2771] A pharmaceutical composition in accordance with the present disclosure can be prepared, packaged, and/or sold in bulk, as a single unit dose, and/or as a plurality of single unit doses. As used herein, a “unit dose” refers to a discrete amount of the pharmaceutical composition comprising a predetermined amount of the active ingredient. The amount of the active ingredient is generally equal to the dosage of the active ingredient which would be administered to a subject and/or a convenient fraction of such a dosage such as, for example, one-half or one-third of such a dosage.

[2772] Relative amounts of the active ingredient, the pharmaceutically acceptable excipient, and/or any additional ingredients in a pharmaceutical composition in accordance with the present disclosure can vary, depending upon the identity, size, and/or condition of the subject being treated and further depending upon the route by which the composition is to be administered. For example, the composition can comprise between 0.10% and 99% (w/w) of the active ingredient. By way of example, the composition can comprise between 0.1% and 100%, e.g., between 0.5 and 50%, between 1-30%, between 5-80%, at least 80% (w/w) active ingredient.

[2773] In some embodiments, the formulations described herein contain at least one polynucleotide. As a non-limiting example, the formulations contain 1, 2, 3, 4 or 5 polynucleotides. In other embodiments, the polynucleotide of the disclosure is formulated for intratumoral delivery in a tumor of a patient in need thereof.

[2774] Pharmaceutical formulations can additionally comprise a pharmaceutically acceptable excipient, which, as used herein, includes, but is not limited to, any and all solvents, dispersion media, diluents, or other liquid vehicles, dispersion or suspension aids, surface active agents, isotonic agents, thickening or emulsifying agents, preservatives, and the like, as suited to the particular dosage form desired. Various excipients for formulating pharmaceutical compositions and techniques for preparing the composition are known in the art (see Remington: The Science and Practice of Pharmacy, 21 Edition, A. R. Gennaro, Lippincott, Williams & Wilkins, Baltimore, M D, 2006). The use of a conventional excipient medium can be contemplated within the scope of the present disclosure, except insofar as any conventional excipient medium can be incompatible with a substance or its derivatives, such as by producing any undesirable biological effect or otherwise interacting in a deleterious manner with any other component(s) of the pharmaceutical composition.

[2775] In some embodiments, the particle size of the lipid nanoparticle is increased and/or decreased. The change in particle size can be able to help counter biological reaction such as, but not limited to, inflammation or can increase the biological effect of the modified mRNA delivered to mammals.

[2776] Pharmaceutically acceptable excipients used in the manufacture of pharmaceutical compositions include, but are not limited to, inert diluents, surface active agents and/or emulsifiers, preservatives, buffering agents, lubricating agents, and/or oils. Such excipients can optionally be included in the pharmaceutical formulations of the disclosure.

[2777] In some embodiments, the polynucleotides is administered in or with, formulated in or delivered with nanostructures that can sequester molecules such as cholesterol. Non-limiting examples of these nanostructures and methods of making these nanostructures are described in US Patent Publication No. US20130195759. Exemplary structures of these nanostructures are shown in US Patent Publication No. US20130195759, and can include a core and a shell surrounding the core.

### Lipidoids

[2778] A polynucleotide of any of the combination therapies disclosed herein (i.e., at least two polynucleotides, wherein each polynucleotide comprises an ORF encoding an immune response primer polypeptide, an immune response co-stimulatory signal polypeptide, or an a checkpoint inhibitor polypeptide), e.g., an mRNA encoding an immune response primer polypeptide, an mRNA encoding an immune response co-stimulatory signal polypeptide, an mRNA encoding a checkpoint inhibitor polypeptide, or a combination thereof, can be formulated with lipidoids. The synthesis of lipidoids has been extensively described and formulations containing these compounds are particularly suited for delivery of polynucleotides (see Mahon et al., Bioconjug Chem. 2010 21:1448-1454; Schroeder et al., J Intern Med. 2010 267:9-21; Akinc et al., Nat Biotechnol. 2008 26:561-569; Love et al., Proc Natl Acad Sci USA. 2010 107:1864-1869; Siegwart et al., Proc Natl Acad Sci USA. 2011 108:12996-3001).

[2779] While these lipidoids have been used to effectively deliver double stranded small interfering RNA molecules in rodents and non-human primates (see Akinc et al., Nat Biotechnol. 2008 26:561-569; Frank-Kamenetsky et al., Proc Natl Acad Sci USA. 2008 105:11915-11920; Akinc et al., Mol Ther. 2009 17:872-879; Love et al., Proc Natl Acad Sci USA. 2010 107:1864-1869; Leuschner et al., Nat Biotechnol. 2011 29:1005-1010), the present disclosure describes their formulation and use in delivering polynucleotides.

[2780] Complexes, micelles, liposomes or particles can be prepared containing these lipidoids and therefore, can result in an effective delivery of the polynucleotide, as judged by the production of an encoded protein, following the injection of a lipidoid formulation via localized and/or systemic routes of administration. Lipidoid complexes of polynucleotides can be administered by various means including, but not limited to, intravenous, intraperitoneal, intratumoral, intramuscular, or subcutaneous routes.

[2781] In vivo delivery of nucleic acids can be affected by many parameters, including, but not limited to, the formulation composition, nature of particle PEGylation, degree of loading, polynucleotide to lipid ratio, and biophysical parameters such as, but not limited to, particle size (Akinc et al., Mol Ther. 2009 17:872-879). As an example, small changes in the anchor chain length of poly(ethylene glycol) (PEG) lipids can result in significant effects on in vivo efficacy. Formulations with the different lipidoids, including, but not limited to penta[3-(1-laurylaminopropionyl)]-triethylenetetramine hydrochloride (TETA-5LAP; aka 98N12-5, see Murugaiah et al., Analytical Biochemistry, 401:61 (2010)), C12-200 (including derivatives and variants), and MD1, can be tested for in vivo activity.

[2782] The lipidoid referred to herein as “98N12-5” is disclosed by Akinc et al., Mol Ther. (2009) 17:872-879.

[2783] The lipidoid referred to herein as “C12-200” is disclosed by Love et al., Proc. Natl. Acad. Sci. USA (2010) 107:1864-1869 and Liu and Huang (2010) Molecular Therapy. 2010:669-670. The lipidoid formulations can include particles comprising either 3 or 4 or more components in addition to polynucleotides.

[2784] Lipidoids and polynucleotide formulations comprising lipidoids are described in International Application Publication No. WO2014093924 (see also US20150307542). Liposomes, Lipoplexes, and Lipid Nanoparticles

[2785] A polynucleotide of any of the combination therapies disclosed herein (i.e., at least two polynucleotides, wherein each polynucleotide comprises an ORF encoding an immune response primer polypeptide, an immune response co-stimulatory signal polypeptide, or an a checkpoint inhibitor polypeptide), e.g., an mRNA encoding an immune response primer polypeptide, an mRNA encoding an immune response co-stimulatory signal polypeptide, an mRNA encoding a checkpoint inhibitor polypeptide, or a combination thereof, can be formulated using one or more liposomes, lipoplexes, or lipid nanoparticles.

[2786] In one specific embodiment, a pharmaceutical composition comprising a polynucleotide of any of the combination therapies disclosed herein (i.e., at least two polynucleotides, wherein each polynucleotide comprises an ORF encoding an immune response primer polypeptide, an immune response co-stimulatory signal polypeptide, or an a checkpoint inhibitor polypeptide), e.g., an mRNA encoding an immune response primer polypeptide, an mRNA encoding an immune response co-stimulatory signal polypeptide, an mRNA encoding a checkpoint inhibitor polypeptide, or a combination thereof, can be formulated in liposomes. Liposomes are artificially-prepared vesicles which can primarily be composed of a lipid bilayer and can be used as a delivery vehicle for the administration of pharmaceutical formulations. Liposomes can be of different sizes such as, but not limited to, a multilamellar vesicle (MLV) which can be hundreds of nanometers in diameter and can contain a series of concentric bilayers separated by narrow aqueous compartments, a small unicellular vesicle (SUV) which can be smaller than 50 nm in diameter, and a large unilamellar vesicle (LUV) which can be between 50 and 500 nm in diameter. Liposome design can include, but is not limited to, opsonins or ligands in order to improve the attachment of liposomes to unhealthy tissue or to activate events such as, but not limited to, endocytosis. Liposomes can contain a low or a high pH in order to improve the delivery of the pharmaceutical formulations.

[2787] The formation of liposomes can depend on the physicochemical characteristics such as, but not limited to, the pharmaceutical formulation entrapped and the liposomal ingredients, the nature of the medium in which the lipid vesicles are dispersed, the effective concentration of the entrapped substance and its potential toxicity, any additional processes involved during the application and/or delivery of the vesicles, the optimization size, polydispersity and the shelf-life of the vesicles for the intended application, and the batch-to-batch reproducibility and possibility of large-scale production of safe and efficient liposomal products.

[2788] As a non-limiting example, liposomes such as synthetic membrane vesicles are prepared by the methods, apparatus and devices described in US Patent Publication No. US20130177638, US20130177637, US20130177636, US20130177635, US20130177634, US20130177633, US20130183375, US20130183373 and US20130183372.

[2789] In one embodiment, pharmaceutical compositions described herein include, without limitation, liposomes such as those formed from 1,2-dioleyloxy-N,N-dimethylaminopropane (DODMA) liposomes, DiLa2 liposomes from Marina Biotech (Bothell, WA), 1,2-dilinoleyloxy-3-dimethylaminopropane (DLin-DMA), 2,2-dilinoleyl-4-(2-dimethylaminoethyl)-[1,3]-dioxolane (DLin-KC2-DMA), and MC3 (as described in US20100324120) and liposomes which can deliver small molecule drugs such as, but not limited to, DOXIL® from Janssen Biotech, Inc. (Horsham, PA).

[2790] In one embodiment, pharmaceutical compositions described herein can include, without limitation, liposomes such as those formed from the synthesis of stabilized plasmid-lipid particles (SPLP) or stabilized nucleic acid lipid particle (SNALP) that have been previously described and shown to be suitable for oligonucleotide delivery in vitro and in vivo (see Wheeler et al. Gene Therapy. 1999 6:271-281; Zhang et al. Gene Therapy. 1999 6:1438-1447; Jeffs et al. Pharm Res. 2005 22:362-372; Morrissey et al., Nat Biotechnol. 2005 2:1002-1007; Zimmermann et al., Nature. 2006 441:111-114; Heyes et al. J Contr Rel. 2005 107:276-287; Semple et al. Nature Biotech. 2010 28:172-176; Judge et al. J Clin Invest. 2009 119:661-673; deFougerolles Hum Gene Ther. 2008 19:125-132; U.S. Patent Publication No US20130122104). The original manufacture method by Wheeler et al. was a detergent dialysis method, which was later improved by Jeffs et al. and is referred to as the spontaneous vesicle formation method. The liposome formulations are composed of 3 to 4 lipid components in addition to the polynucleotide. As an example a liposome can contain, but is not limited to, 55% cholesterol, 20% disteroylphosphatidyl choline (DSPC), 10% PEG-S-DSG, and 15% 1,2-dioleyloxy-N,N-dimethylaminopropane (DODMA), as described by Jeffs et al. As another example, certain liposome formulations contain, but are not limited to, 48% cholesterol, 20% DSPC, 2% PEG-c-DMA, and 30% cationic lipid, where the cationic lipid can be 1,2-distearloxy-N,N-dimethylaminopropane (DSDMA), DODMA, DLin-DMA, or 1,2-dilinolenyloxy-3-dimethylaminopropane (DLenDMA), as described by Heyes et al.

[2791] In some embodiments, liposome formulations comprise from about 25.0% cholesterol to about 40.0% cholesterol, from about 30.0% cholesterol to about 45.0% cholesterol, from about 35.0% cholesterol to about 50.0% cholesterol and/or from about 48.5% cholesterol to about 60% cholesterol. In other embodiments, formulations comprise a percentage of cholesterol selected from the group consisting of 28.5%, 31.5%, 33.5%, 36.5%, 37.0%, 38.5%, 39.0% and 43.5%. In some embodiments, formulations comprise from about 5.0% to about 10.0% DSPC and/or from about 7.0% to about 15.0% DSPC.

[2792] In one embodiment, pharmaceutical compositions include liposomes which are formed to deliver a polynucleotide of any of the combination therapies disclosed herein (i.e., at least two polynucleotides, wherein each polynucleotide comprises an ORF encoding an immune response primer polypeptide, an immune response co-stimulatory signal polypeptide, or an a checkpoint inhibitor polypeptide), e.g., an mRNA encoding an immune response primer polypeptide, an mRNA encoding an immune response co-stimulatory signal polypeptide, an mRNA encoding a checkpoint inhibitor polypeptide, or a combination thereof. The polynucleotides can be encapsulated by the liposome and/or it can be contained in an aqueous core which can then be encapsulated by the liposome. See International Pub. Nos. WO2012031046 (see also US20130189351), WO2012031043 (see also US20130202684), WO2012030901 (see also US20130195969) and WO2012006378 (see also US20130171241) and US Patent Publication No. US20130189351, US20130195969 and US20130202684).

[2793] In another embodiment, liposomes is formulated for targeted delivery. As a non-limiting example, the liposome is formulated for targeted delivery to the liver. The liposome used for targeted delivery can include, but is not limited to, the liposomes described in and methods of making liposomes described in US Patent Publication No. US20130195967.

[2794] In another embodiment, a polynucleotide of any of the combination therapies disclosed herein, e.g., an mRNA encoding an immune response primer polypeptide, an mRNA encoding an immune response co-stimulatory signal polypeptide, an mRNA encoding a checkpoint inhibitor polypeptide, or a combination thereof, can be formulated in a cationic oil-in-water emulsion where the emulsion particle comprises an oil core and a cationic lipid which can interact with the polynucleotide anchoring the molecule to the emulsion particle. See International Pub. No. WO2012006380 (see also US20160256541).

[2795] In one embodiment, a polynucleotide of any of the combination therapies disclosed herein, e.g., an mRNA encoding an immune response primer polypeptide, an mRNA encoding an immune response co-stimulatory signal polypeptide, an mRNA encoding a checkpoint inhibitor polypeptide, or a combination thereof, can be formulated in a water-in-oil emulsion comprising a continuous hydrophobic phase in which the hydrophilic phase is dispersed. As a non-limiting example, the emulsion can be made by the methods described in International Publication No. WO2013087791 (see also US20140294904).

[2796] In another embodiment, the lipid formulation includes at least cationic lipid, a lipid which can enhance transfection and a least one lipid which contains a hydrophilic head group linked to a lipid moiety. See International Pub. No. WO2011076807 and U.S. Pub. No. 20110200582.

[2797] In another embodiment, a polynucleotide of any of the combination therapies disclosed herein, e.g., an mRNA encoding an immune response primer polypeptide, an mRNA encoding an immune response co-stimulatory signal polypeptide, an mRNA encoding a checkpoint inhibitor polypeptide, or a combination thereof, can be formulated in a lipid vesicle which can have crosslinks between functionalized lipid bilayers (see U.S. Pub. No. 20120177724).

[2798] In one embodiment, the polynucleotides are formulated in a liposome as described in International Patent Publication No. WO2013086526 (see also US20140356416). The polynucleotides can be encapsulated in a liposome using reverse pH gradients and/or optimized internal buffer compositions as described in International Patent Publication No. WO2013086526.

[2799] In one embodiment, the polynucleotide pharmaceutical compositions are formulated in liposomes such as, but not limited to, DiLa2 liposomes (Marina Biotech, Bothell, WA), SMARTICLES® (Marina Biotech, Bothell, WA), neutral DOPC (1,2-dioleoyl-sn-glycero-3-phosphocholine) based liposomes (e.g., siRNA delivery for ovarian cancer (Landen et al. Cancer Biology & Therapy 2006 5(12)1708-1713)) and hyaluronan-coated liposomes (Quiet Therapeutics, Israel).

[2800] In another embodiment, a polynucleotide of any of the combination therapies disclosed herein, e.g., an mRNA encoding an immune response primer polypeptide, an mRNA encoding an immune response co-stimulatory signal polypeptide, an mRNA encoding a checkpoint inhibitor polypeptide, or a combination thereof, can be formulated in a lipid vesicle which can have crosslinks between functionalized lipid bilayers.

[2801] In other embodiments, a polynucleotide of any of the combination therapies disclosed herein, e.g., an mRNA encoding an immune response primer polypeptide, an mRNA encoding an immune response co-stimulatory signal polypeptide, an mRNA encoding a checkpoint inhibitor polypeptide, or a combination thereof, can be formulated in a liposome comprising a cationic lipid. The liposome can have a molar ratio of nitrogen atoms in the cationic lipid to the phosphates in the polynucleotide (N:P ratio) of between 1:1 and 20:1 as described in International Publication No. WO2013006825. In another embodiment, the liposome can have a N:P ratio of greater than 20:1 or less than 1:1. In one embodiment, the cationic lipid is a low molecular weight cationic lipid such as those described in US Patent Application No. 20130090372.

[2802] In one embodiment, a polynucleotide of any of the combination therapies disclosed herein, e.g., an mRNA encoding an immune response primer polypeptide, an mRNA encoding an immune response co-stimulatory signal polypeptide, an mRNA encoding a checkpoint inhibitor polypeptide, or a combination thereof, can be formulated in a lipid-polycation complex. The formation of the lipid-polycation complex can be accomplished by methods known in the art and/or as described in U.S. Pub. No. 20120178702. As a non-limiting example, the polycation includes a cationic peptide or a polypeptide such as, but not limited to, polylysine, polyornithine and/or polyarginine and the cationic peptides described in International Pub. No. WO2012013326 or US Patent Pub. No. US20130142818. In another embodiment, the polynucleotides are formulated in a lipid-polycation complex which can further include a non-cationic lipid such as, but not limited to, cholesterol or dioleoyl phosphatidylethanolamine (DOPE).

[2803] In one embodiment, a polynucleotide of any of the combination therapies disclosed herein, e.g., an mRNA encoding an immune response primer polypeptide, an mRNA encoding an immune response co-stimulatory signal polypeptide, an mRNA encoding a checkpoint inhibitor polypeptide, or a combination thereof, can be formulated in an aminoalcohol lipidoid. Aminoalcohol lipidoids which can be used in the present disclosure can be prepared by the methods described in U.S. Pat. No. 8,450,298.

[2804] The liposome formulation can be influenced by, but not limited to, the selection of the cationic lipid component, the degree of cationic lipid saturation, the nature of the PEGylation, ratio of all components and biophysical parameters such as size. In one example by Semple et al. (Semple et al. Nature Biotech. 2010 28:172-176), the liposome formulation was composed of 57.1% cationic lipid, 7.10% dipalmitoylphosphatidylcholine, 34.3% cholesterol, and 1.4% PEG-c-DMA. As another example, changing the composition of the cationic lipid could more effectively deliver siRNA to various antigen presenting cells (Basha et al. Mol Ther. 2011 19:2186-2200). In some embodiments, liposome formulations comprise from about 35 to about 45% cationic lipid, from about 40% to about 50% cationic lipid, from about 50% to about 60% cationic lipid and/or from about 55% to about 65% cationic lipid. In some embodiments, the ratio of lipid to mRNA in liposomes is from about 5:1 to about 20:1, from about 10:1 to about 25:1, from about 15:1 to about 30:1 and/or at least 30:1.

[2805] In some embodiments, the ratio of PEG in the lipid nanoparticle (LNP) formulations is increased or decreased and/or the carbon chain length of the PEG lipid is modified from C14 to C18 to alter the pharmacokinetics and/or biodistribution of the LNP formulations. As a non-limiting example, LNP formulations contain from about 0.5% to about 3.0%, from about 1.0% to about 3.5%, from about 1.5% to about 4.0%, from about 2.0% to about 4.5%, from about 2.5% to about 5.0% and/or from about 3.0% to about 6.0% of the lipid molar ratio of PEG-c-DOMG (R-3-[(o-methoxy-poly(ethylenegly col)2000)carbamoyl)]-1,2-dimyristyloxypropyl-3-amine) (also referred to herein as PEG-DOMG) as compared to the cationic lipid, DSPC and cholesterol. In another embodiment the PEG-c-DOMG can be replaced with a PEG lipid such as, but not limited to, PEG-DSG (1,2-distearoyl-sn-glycerol, methoxypolyethylene glycol), PEG-DMG (1,2-dimyristoyl-sn-glycerol) and/or PEG-DPG (1,2-dipalmitoyl-sn-glycerol, methoxypolyethylene glycol). The cationic lipid can be selected from any lipid known in the art such as, but not limited to, DLin-MC3-DMA, DLin-DMA, C12-200 and DLin-KC2-DMA.

[2806] In one embodiment, a polynucleotide of any of the combination therapies disclosed herein, e.g., an mRNA encoding an immune response primer polypeptide, an mRNA encoding an immune response co-stimulatory signal polypeptide, an mRNA encoding a checkpoint inhibitor polypeptide, or a combination thereof, can be formulated in a lipid nanoparticle such as those described in International Publication No. WO2012170930 (see also US20140294938).

[2807] In another embodiment, the formulation comprising the polynucleotide(s) is a nanoparticle which can comprise at least one lipid. The lipid can be selected from, but is not limited to, DLin-DMA, DLin-K-DMA, 98N12-5, C12-200, DLin-MC3-DMA, DLin-KC2-DMA, DODMA, PLGA, PEG, PEG-DMG, PEGylated lipids and amino alcohol lipids. In another aspect, the lipid is a cationic lipid such as, but not limited to, DLin-DMA, DLin-D-DMA, DLin-MC3-DMA, DLin-KC2-DMA, DODMA and amino alcohol lipids. The amino alcohol cationic lipid can be the lipids described in and/or made by the methods described in U.S. Patent Application Publication No. US20130150625. As a non-limiting example, the cationic lipid can be 2-amino-3-[(9Z,12Z)-octadeca-9,12-dien-1-yloxy]-2-{[(9Z,2Z)-octadeca-9,12-dien-1-yloxy]methyl}propan-1-ol (Compound 1 in US20130150625); 2-amino-3-[(9Z)-octadec-9-en-1-yloxy]-2-{[(9Z)-octadec-9-en-1-yloxy]methyl}propan-1-ol (Compound 2 in US20130150625); 2-amino-3-[(9Z,12Z)-octadeca-9,12-dien-1-yloxy]-2-[(octyloxy)methyl]propan-1-ol (Compound 3 in US20130150625); and 2-(dimethylamino)-3-[(9Z,12Z)-octadeca-9,12-dien-1-yloxy]-2-{[(9Z,12Z)-octadeca-9,12-dien-1-yloxy]methyl} propan-1-ol (Compound 4 in US20130150625); or any pharmaceutically acceptable salt or stereoisomer thereof.

[2808] The present disclosure provides pharmaceutical compositions with advantageous properties. In particular, the present application provides pharmaceutical compositions comprising: [2130] (a) at least two polynucleotides in combination (combination therapy), wherein the at least two polynucleotides are selected from the group consisting of (i) a polynucleotide encoding an immune response primer; (ii) a polynucleotide encoding an immune response co-stimulatory signal; (iii) a polynucleotide encoding a checkpoint inhibitor or a polypeptide checkpoint inhibitor; and, (iv) a combination thereof; and,
[2809] (b) a lipid composition comprising:
[2810] (i) a compound having the formula (I)

[chemical structure]

wherein

[2811] R₁ is selected from the group consisting of C₅₋₂₀ alkyl, C₅₋₂₀ alkenyl,-R*YR″,-YR″, and -R″M′R′;

[2812] R₂ and R₃ are independently selected from the group consisting of H, C₁₋₁₄ alkyl, C₂₋₁₄ alkenyl,-R*YR″,-YR″, and -R*OR″, or R₂ and R₃, together with the atom to which they are attached, form a heterocycle or carbocycle;

[2813] R₄ is selected from the group consisting of a C₃₋₆ carbocycle, —(CH₂)ₙQ, —(CH₂)ₙCHQR, —CHQR, -CQ(R)₂, and unsubstituted C₁₋₆ alkyl, where Q is selected from a carbocycle, heterocycle, —OR, —O(CH₂)ₙN(R)₂, —C(O)OR, —OC(O)R, —CX₃, —CX₂H, -CXH₂, —CN, —N(R)₂, —C(O)N(R)₂, —N(R)C(O)R, —N(R)S(O)₂R, —N(R)C(O)N(R)₂, —N(R)C(S)N(R)₂, and —C(R)N(R)₂C(O)OR, and each n is independently selected from 1, 2, 3, 4, and 5;

[2814] each R₅ is independently selected from the group consisting of C₁₋₃ alkyl, C₂₋₃ alkenyl, and H;

[2815] each R₆ is independently selected from the group consisting of C₁₋₃ alkyl, C₂₋₃ alkenyl, and H;

[2816] M and M′ are independently selected from —C(O)O—, —OC(O)—, —C(O)N(R′)-, —N(R′)C(O)—, —C(O)—, —C(S)—, —C(S)S—, —SC(S)—, —CH(OH)—, —P(O)(OR′)O—, —S(O)₂—, an aryl group, and a heteroaryl group;

[2817] R₇ is selected from the group consisting of C₁₋₃ alkyl, C₂₋₃ alkenyl, and H;

[2818] each R is independently selected from the group consisting of C₁₋₃ alkyl, C₂₋₃ alkenyl, and H;

[2819] each R′ is independently selected from the group consisting of C₁₋₁₈ alkyl, C₂₋₁₈ alkenyl,-R*YR″,-YR″, and H;

[2820] each R″ is independently selected from the group consisting of C₃₋₁₄ alkyl and C₃₋₁₄ alkenyl;

[2821] each R* is independently selected from the group consisting of C₁₋₁₂ alkyl and C₂₋₁₂ alkenyl;

[2822] each Y is independently a C₃₋₆ carbocycle;

[2823] each X is independently selected from the group consisting of F, Cl, Br, and I; and m is selected from 5, 6, 7, 8, 9, 10, 11, 12, and 13,

[2824] or salts or stereoisomers thereof, wherein alkyl and alkenyl groups may be linear or branched.

[2825] In some embodiments, a subset of compounds of Formula (I) includes those in which when R₄ is —(CH₂)ₙQ, —(CH₂)ₙCHQR, —CHQR, or -CQ(R)₂, then (i) Q is not -N(R)₂ when n is 1, 2, 3, 4 or 5, or (ii) Q is not 5, 6, or 7-membered heterocycloalkyl when n is 1 or 2.

[2826] In another embodiments, another subset of compounds of Formula (I) includes those in which

[2827] R₁ is selected from the group consisting of C₅₋₂₀ alkyl, C₅₋₂₀ alkenyl,-R*YR″,-YR″, and -R″M′R′;

[2828] R₂ and R₃ are independently selected from the group consisting of H, C₁₋₁₄ alkyl, C₂₋₁₄ alkenyl,-R*YR″,-YR″, and -R*OR″, or R₂ and R₃, together with the atom to which they are attached, form a heterocycle or carbocycle;

[2829] R₄ is selected from the group consisting of a C₃₋₆ carbocycle, —(CH₂)ₙQ, —(CH₂)ₙCHQR, —CHQR, -CQ(R)₂, and unsubstituted C₁₋₆ alkyl, where Q is selected from a C₃₋₆ carbocycle, a 5—to 14-membered heteroaryl having one or more heteroatoms selected from N, O, and S, —OR, —O(CH₂)ₙN(R)₂, —C(O)OR, —OC(O)R, —CX₃, —CX₂H, —CXH₂, —CN, —C(O)N(R)₂, —N(R)C(O)R, —N(R)S(O)₂R, —N(R)C(O)N(R)₂, —N(R)C(S)N(R)₂, —CRN(R)₂C(O)OR, and a 5—to 14-membered heterocycloalkyl having one or more heteroatoms selected from N, O, and S which is substituted with one or more substituents selected from oxo (═O), OH, amino, and C₁₋₃ alkyl, and each n is independently selected from 1, 2, 3, 4, and 5;

[2830] each R₅ is independently selected from the group consisting of C₁₋₃ alkyl, C₂₋₃ alkenyl, and H;

[2831] each R₆ is independently selected from the group consisting of C₁₋₃ alkyl, C₂₋₃ alkenyl, and H;

[2832] M and M′ are independently selected from —C(O)O—, —OC(O)—, —C(O)N(R′)-, —N(R′)C(O)—, —C(O)—, —C(S)—, —C(S)S—, —SC(S)—, —CH(OH)—, —P(O)(OR′)O—, —S(O)₂—, an aryl group, and a heteroaryl group;

[2833] R₇ is selected from the group consisting of C₁₋₃ alkyl, C₂₋₃ alkenyl, and H;

[2834] each R is independently selected from the group consisting of C₁₋₃ alkyl, C₂₋₃ alkenyl, and H;

[2835] each R′ is independently selected from the group consisting of C₁₋₁₈ alkyl, C₂₋₁₈ alkenyl,-R*YR″,-YR″, and H;

[2836] each R″ is independently selected from the group consisting of C₃₋₁₄ alkyl and C₃₋₁₄ alkenyl;

[2837] each R* is independently selected from the group consisting of C₁₋₁₂ alkyl and C₂₋₁₂ alkenyl;

[2838] each Y is independently a C₃₋₆ carbocycle;

[2839] each X is independently selected from the group consisting of F, Cl, Br, and I; and

[2840] m is selected from 5, 6, 7, 8, 9, 10, 11, 12, and 13,

[2841] or salts or stereoisomers thereof.

[2842] In yet another embodiments, another subset of compounds of Formula (I) includes those in which

[2843] R₁ is selected from the group consisting of C₅₋₂₀ alkyl, C₅₋₂₀ alkenyl,-R*YR″,-YR″, and -R″M′R′;

[2844] R₂ and R₃ are independently selected from the group consisting of H, C₁₋₁₄ alkyl, C₂₋₁₄ alkenyl,-R*YR″,-YR″, and -R*OR″, or R₂ and R₃, together with the atom to which they are attached, form a heterocycle or carbocycle;

[2845] R₄ is selected from the group consisting of a C₃₋₆ carbocycle, —(CH₂)ₙQ, —(CH₂)ₙCHQR, —CHQR, -CQ(R)₂, and unsubstituted C₁₋₆ alkyl, where Q is selected from a C₃₋₆ carbocycle, a 5—to 14-membered heterocycle having one or more heteroatoms selected from N, O, and S, —OR, —O(CH₂)ₙN(R)₂, —C(O)OR, —OC(O)R, —CX₃, —CX₂H, -CXH₂, —CN, —C(O)N(R)₂, —N(R)C(O)R, —N(R)S(O)₂R, —N(R)C(O)N(R)₂, —N(R)C(S)N(R)₂, —CRN(R)₂C(O)OR, and each n is independently selected from 1, 2, 3, 4, and 5; and when Q is a 5—to 14-membered heterocycle and (i) R₄ is —(CH₂)ₙQ in which n is 1 or 2, or (ii) R₄ is —(CH₂)ₙCHQR in which n is 1, or (iii) R₄ is —CHQR, and -CQ(R)₂, then Q is either a 5—to 14-membered heteroaryl or 8—to 14-membered heterocycloalkyl;

[2846] each R₅ is independently selected from the group consisting of C₁₋₃ alkyl, C₂₋₃ alkenyl, and H;

[2847] each R₆ is independently selected from the group consisting of C₁₋₃ alkyl, C₂₋₃ alkenyl, and H;

[2848] M and M′ are independently selected from —C(O)O—, —OC(O)—, —C(O)N(R′)-, —N(R′)C(O)—, —C(O)—, —C(S)—, —C(S)S—, —SC(S)—, —CH(OH)—, —P(O)(OR′)O—, —S(O)₂—, an aryl group, and a heteroaryl group;

[2849] R₇ is selected from the group consisting of C₁₋₃ alkyl, C₂₋₃ alkenyl, and H;

[2850] each R is independently selected from the group consisting of C₁₋₃ alkyl, C₂₋₃ alkenyl, and H;

[2851] each R′ is independently selected from the group consisting of C₁₋₁₈ alkyl, C₂₋₁₈ alkenyl,-R*YR″,-YR″, and H;

[2852] each R″ is independently selected from the group consisting of C₃₋₁₄ alkyl and C₃₋₁₄ alkenyl;

[2853] each R* is independently selected from the group consisting of C₁₋₁₂ alkyl and C₂₋₁₂ alkenyl;

[2854] each Y is independently a C₃₋₆ carbocycle;

[2855] each X is independently selected from the group consisting of F, Cl, Br, and I; and

[2856] m is selected from 5, 6, 7, 8, 9, 10, 11, 12, and 13,

[2857] or salts or stereoisomers thereof.

[2858] In still another embodiments, another subset of compounds of Formula (I) includes those in which

[2859] R₁ is selected from the group consisting of C₅₋₂₀ alkyl, C₅₋₂₀ alkenyl,-R*YR″,-YR″, and -R″M′R′;

[2860] R₂ and R₃ are independently selected from the group consisting of H, C₁₋₁₄ alkyl, C₂₋₁₄ alkenyl,-R*YR″,-YR″, and -R*OR″, or R₂ and R₃, together with the atom to which they are attached, form a heterocycle or carbocycle;

[2861] R₄ is selected from the group consisting of a C₃₋₆ carbocycle, —(CH₂)ₙQ, —(CH₂)ₙCHQR, —CHQR, -CQ(R)₂, and unsubstituted C₁₋₆ alkyl, where Q is selected from a C₃₋₆ carbocycle, a 5—to 14-membered heteroaryl having one or more heteroatoms selected from N, O, and S, —OR, —O(CH₂)ₙN(R)₂, —C(O)OR, —OC(O)R, —CX₃, —CX₂H, —CXH₂, —CN, —C(O)N(R)₂, —N(R)C(O)R, —N(R)S(O)₂R, —N(R)C(O)N(R)₂, —N(R)C(S)N(R)₂, —CRN(R)₂C(O)OR, and each n is independently selected from 1, 2, 3, 4, and 5;

[2862] each R₅ is independently selected from the group consisting of C₁₋₃ alkyl, C₂₋₃ alkenyl, and H;

[2863] each R₆ is independently selected from the group consisting of C₁₋₃ alkyl, C₂₋₃ alkenyl, and H;

[2864] M and M′ are independently selected from —C(O)O—, —OC(O)—, —C(O)N(R′)-, —N(R′)C(O)—, —C(O)—, —C(S)—, —C(S)S—, —SC(S)—, —CH(OH)—, —P(O)(OR′)O—, —S(O)₂—, an aryl group, and a heteroaryl group;

[2865] R₇ is selected from the group consisting of C₁₋₃ alkyl, C₂₋₃ alkenyl, and H;

[2866] each R is independently selected from the group consisting of C₁₋₃ alkyl, C₂₋₃ alkenyl, and H;

[2867] each R′ is independently selected from the group consisting of C₁₋₁₈ alkyl, C₂₋₁₈ alkenyl,-R*YR″,-YR″, and H;

[2868] each R″ is independently selected from the group consisting of C₃₋₁₄ alkyl and C₃₋₁₄ alkenyl;

[2869] each R* is independently selected from the group consisting of C₁₋₁₂ alkyl and C₂₋₁₂ alkenyl;

[2870] each Y is independently a C₃₋₆ carbocycle;

[2871] each X is independently selected from the group consisting of F, Cl, Br, and I; and

[2872] m is selected from 5, 6, 7, 8, 9, 10, 11, 12, and 13,

[2873] or salts or stereoisomers thereof.

[2874] In yet another embodiments, another subset of compounds of Formula (I) includes those in which

[2875] R₁ is selected from the group consisting of C₅₋₂₀ alkyl, C₅₋₂₀ alkenyl,-R*YR″,-YR″, and -R″M′R′;

[2876] R₂ and R₃ are independently selected from the group consisting of H, C₂₋₁₄ alkyl, C₂₋₁₄ alkenyl,-R*YR″,-YR″, and -R*OR″, or R₂ and R₃, together with the atom to which they are attached, form a heterocycle or carbocycle;

[2877] R₄ is —(CH₂)ₙQ or —(CH₂)ₙCHQR, where Q is —N(R)₂, and n is selected from 3, 4, and 5;

[2878] each R₅ is independently selected from the group consisting of C₁₋₃ alkyl, C₂₋₃ alkenyl, and H;

[2879] each R₆ is independently selected from the group consisting of C₁₋₃ alkyl, C₂₋₃ alkenyl, and H;

[2880] M and M′ are independently selected from —C(O)O—, —OC(O)—, —C(O)N(R′)-, —N(R′)C(O)—, —C(O)—, —C(S)—, —C(S)S—, —SC(S)—, —CH(OH)—, —P(O)(OR′)O—, —S(O)₂—, an aryl group, and a heteroaryl group;

[2881] R₇ is selected from the group consisting of C₁₋₃ alkyl, C₂₋₃ alkenyl, and H;

[2882] each R is independently selected from the group consisting of C₁₋₃ alkyl, C₂₋₃ alkenyl, and H;

[2883] each R′ is independently selected from the group consisting of C₁₋₁₈ alkyl, C₂₋₁₈ alkenyl,-R*YR″,-YR″, and H;

[2884] each R″ is independently selected from the group consisting of C₃₋₁₄ alkyl and C₃₋₁₄ alkenyl;

[2885] each R* is independently selected from the group consisting of C₁₋₁₂ alkyl and C₁₋₁₂ alkenyl;

[2886] each Y is independently a C₃₋₆ carbocycle;

[2887] each X is independently selected from the group consisting of F, Cl, Br, and I; and

[2888] m is selected from 5, 6, 7, 8, 9, 10, 11, 12, and 13,

[2889] or salts or stereoisomers thereof.

[2890] In still another embodiments, another subset of compounds of Formula (I) includes those in which

[2891] R₁ is selected from the group consisting of C₅₋₂₀ alkyl, C₅₋₂₀ alkenyl,-R*YR″,-YR″, and -R″M′R′;

[2892] R₂ and R₃ are independently selected from the group consisting of C₁₋₁₄ alkyl, C₂₋₁₄ alkenyl,-R*YR″,-YR″, and -R*OR″, or R₂ and R₃, together with the atom to which they are attached, form a heterocycle or carbocycle;

[2893] R₄ is selected from the group consisting of —(CH₂)ₙQ, —(CH₂)ₙCHQR, —CHQR, and -CQ(R)₂, where Q is —N(R)₂, and n is selected from 1, 2, 3, 4, and 5;

[2894] each R₅ is independently selected from the group consisting of C₁₋₃ alkyl, C₂₋₃ alkenyl, and H;

[2895] each R₆ is independently selected from the group consisting of C₁₋₃ alkyl, C₂₋₃ alkenyl, and H;

[2896] M and M′ are independently selected from —C(O)O—, —OC(O)—, —C(O)N(R′)-, —N(R′)C(O)—, —C(O)—, —C(S)—, —C(S)S—, —SC(S)—, —CH(OH)—, —P(O)(OR′)O—, —S(O)₂—, an aryl group, and a heteroaryl group;

[2897] R₇ is selected from the group consisting of C₁₋₃ alkyl, C₂₋₃ alkenyl, and H;

[2898] each R is independently selected from the group consisting of C₁₋₃ alkyl, C₂₋₃ alkenyl, and H;

[2899] each R′ is independently selected from the group consisting of C₁₋₁₈ alkyl, C₂₋₁₈ alkenyl,-R*YR″,-YR″, and H;

[2900] each R″ is independently selected from the group consisting of C₃₋₁₄ alkyl and C₃₋₁₄ alkenyl;

[2901] each R* is independently selected from the group consisting of C₁₋₁₂ alkyl and C₁₋₁₂ alkenyl;

[2902] each Y is independently a C₃₋₆ carbocycle;

[2903] each X is independently selected from the group consisting of F, Cl, Br, and I; and

[2904] m is selected from 5, 6, 7, 8, 9, 10, 11, 12, and 13,

[2905] or salts or stereoisomers thereof.

[2906] In certain embodiments, a subset of compounds of Formula (I) includes those of Formula (IA):

[chemical structure]

or a salt or stereoisomer thereof, wherein 1 is selected from 1, 2, 3, 4, and 5; m is selected from 5, 6, 7, 8, and 9; M₁ is a bond or M′; R₄ is unsubstituted C₁₋₃ alkyl, or —(CH₂)ₙQ, in which Q is OH, —NHC(S)N(R)₂, or —NHC(O)N(R)₂; M and M′ are independently selected from —C(O)O—, —OC(O)—, —C(O)N(R′)-, —P(O)(OR′)O—, an aryl group, and a heteroaryl group; and

[2907] R₂ and R₃ are independently selected from the group consisting of H, C₁₋₁₄ alkyl, and C₂₋₁₄ alkenyl.

[2908] In certain embodiments, a subset of compounds of Formula (I) includes those of Formula (II):

[chemical structure]

or a salt or stereoisomer thereof, wherein 1 is selected from 1, 2, 3, 4, and 5; M₁ is a bond or M′; R₄ is unsubstituted C₁₋₃ alkyl, or —(CH₂)ₙQ, in which n is 2, 3, or 4, and Q is OH, —NHC(S)N(R)₂, or —NHC(O)N(R)₂; M and M′ are independently selected from —C(O)O—, —OC(O)—, —C(O)N(R′)-, —P(O)(OR′)O—, an aryl group, and a heteroaryl group; and

[2909] R₂ and R₃ are independently selected from the group consisting of H, C₁₋₁₄ alkyl, and C₂₋₁₄ alkenyl.

[2910] In some embodiments, the compound of formula (I) is of the formula (IIa),

[chemical structure]

or a salt thereof, wherein R₄ is as described above.

[chemical structure]

[2911] In some embodiments, the compound of formula (I) is of the formula (IIb), or a salt thereof, wherein R₄ is as described above.

[2912] In some embodiments, the compound of formula (I) is of the formula (IIc),

[chemical structure]

or a salt thereof, wherein R₄ is as described above.

[2913] In some embodiments, the compound of formula (I) is of the formula (IIe):

[chemical structure]

or a salt thereof, wherein R₄ is as described above.

[2914] In some embodiments, the compound of formula (IIa), (IIb), (IIc), or (IIe) comprises an R₄ which is selected from —(CH₂)ₙQ and —(CH₂)ₙCHQR, wherein Q, R and n are as defined above.

[2915] In some embodiments, Q is selected from the group consisting of —OR, —OH, —O(CH₂)ₙN(R)₂, —OC(O)R, —CX₃, —CN, —N(R)C(O)R, —N(H)C(O)R, —N(R)S(O)₂R, —N(H)S(O)₂R, —N(R)C(O)N(R)₂, —N(H)C(O)N(R)₂, —N(H)C(O)N(H)(R), —N(R)C(S)N(R)₂, —N(H)C(S)N(R)₂, —N(H)C(S)N(H)(R), and a heterocycle, wherein R is as defined above. In some aspects, n is 1 or 2. In some embodiments, Q is OH, —NHC(S)N(R)₂, or —NHC(O)N(R)₂.

[2916] In some embodiments, the compound of formula (I) is of the formula (IId),

[chemical structure]

or a salt thereof, wherein R₂ and R₃ are independently selected from the group consisting of C₅₋₁₄ alkyl and C₅₋₁₄ alkenyl, n is selected from 2, 3, and 4, and R′, R″, R₅, R₆ and m are as defined above.

[2917] In some aspects of the compound of formula (IId), R₂ is C₈ alkyl. In some aspects of the compound of formula (IId), R₃ is C₅-C₉ alkyl. In some aspects of the compound of formula (IId), m is 5, 7, or 9. In some aspects of the compound of formula (IId), each R₅ is H. In some aspects of the compound of formula (IId), each R₆ is H.

[2918] In another aspect, the present application provides a lipid composition (e.g., a lipid nanoparticle (LNP)) comprising: (1) a compound having the formula (I); (2) optionally a helper lipid (e.g. a phospholipid); (3) optionally a structural lipid (e.g. a sterol); (4) optionally a lipid conjugate (e.g. a PEG-lipid); and (5) optionally a quaternary amine compound. In exemplary embodiments, the lipid composition (e.g., LNP) further comprises at least two polynucleotides in combination (combination therapy), wherein the at least two polynucleotides are selected from the group consisting of (i) a polynucleotide encoding an immune response primer; (ii) a polynucleotide encoding an immune response co-stimulatory signal; (iii) a polynucleotide encoding a checkpoint inhibitor or a polypeptide checkpoint inhibitor; and, (iv) a combination thereof, e.g., a polynucleotide or polynucleotides encapsulated therein.

[2919] In particular embodiments, the lipid composition (e.g., LNP) further comprises at least two polynucleotides in combination (combination therapy), wherein the polynucleotides are
[2920] (i) a polynucleotide encoding an immune response primer and a polynucleotide encoding an immune response co-stimulatory signal;
[2921] (ii) a polynucleotide encoding an immune response primer and a polynucleotide encoding a checkpoint inhibitor;
[2922] (iii) a polynucleotide encoding an immune response primer and a polypeptide checkpoint inhibitor;
[2923] (iv) a polynucleotide encoding an immune response co-stimulatory signal and a polynucleotide encoding a checkpoint inhibitor;
[2924] (v) a polynucleotide encoding an immune response co-stimulatory signal and a polypeptide checkpoint inhibitor;
[2925] (vi) a polynucleotide encoding an immune response primer and a second a polynucleotide encoding a second immune response primer;
[2926] (vii) polynucleotide encoding an immune response co-stimulatory signal and a second polynucleotide encoding an immune response co-stimulatory signal;
[2927] (viii) a polynucleotide encoding an immune response primer, a second a polynucleotide encoding a second immune response primer, and a polynucleotide encoding a checkpoint inhibitor;
[2928] (ix) a polynucleotide encoding an immune response co-stimulatory signal, a second polynucleotide encoding an immune response co-stimulatory signal, and a polynucleotide encoding a checkpoint inhibitor;
[2929] (x) a polynucleotide encoding an immune response primer, a second a polynucleotide encoding a second immune response primer, and a polypeptide checkpoint inhibitor;
[2930] (xi) a polynucleotide encoding an immune response co-stimulatory signal, a second polynucleotide encoding an immune response co-stimulatory signal, and a polypeptide checkpoint inhibitor;
[2931] (xii) a polynucleotide encoding an immune response primer, a polynucleotide encoding an immune response co-stimulatory signal, and a polynucleotide encoding a checkpoint inhibitor; or,
[2932] (xiii) a polynucleotide encoding an immune response primer, a polynucleotide encoding an immune response co-stimulatory signal, and a polypeptide checkpoint inhibitor.

[2933] As used herein, the term “alkyl” or “alkyl group” means a linear or branched, saturated hydrocarbon including one or more carbon atoms (e.g., one, two, three, four, five, six, seven, eight, nine, ten, eleven, twelve, thirteen, fourteen, fifteen, sixteen, seventeen, eighteen, nineteen, twenty, or more carbon atoms).

[2934] The notation “C₁₋₁₄ alkyl” means a linear or branched, saturated hydrocarbon including 1-14 carbon atoms. An alkyl group may be optionally substituted.

[2935] As used herein, the term “alkenyl” or “alkenyl group” means a linear or branched hydrocarbon including two or more carbon atoms (e.g., two, three, four, five, six, seven, eight, nine, ten, eleven, twelve, thirteen, fourteen, fifteen, sixteen, seventeen, eighteen, nineteen, twenty, or more carbon atoms) and at least one double bond.

[2936] The notation “C₂₋₁₄ alkenyl” means a linear or branched hydrocarbon including 2-14 carbon atoms and at least one double bond. An alkenyl group may include one, two, three, four, or more double bonds. For example, C₁₈ alkenyl may include one or more double bonds. A C₁₈ alkenyl group including two double bonds may be a linoleyl group. An alkenyl group may be optionally substituted.

[2937] As used herein, the term “carbocycle” or “carbocyclic group” means a mono- or multi-cyclic system including one or more rings of carbon atoms. Rings may be three, four, five, six, seven, eight, nine, ten, eleven, twelve, thirteen, fourteen, or fifteen membered rings.

[2938] The notation “C₃₋₆ carbocycle” means a carbocycle including a single ring having 3-6 carbon atoms. Carbocycles may include one or more double bonds and may be aromatic (e.g., aryl groups). Examples of carbocycles include cyclopropyl, cyclopentyl, cyclohexyl, phenyl, naphthyl, and 1,2-dihydronaphthyl groups. Carbocycles may be optionally substituted.

[2939] As used herein, the term “heterocycle” or “heterocyclic group” means a mono- or multi-cyclic system including one or more rings, where at least one ring includes at least one heteroatom. Heteroatoms may be, for example, nitrogen, oxygen, or sulfur atoms. Rings may be three, four, five, six, seven, eight, nine, ten, eleven, or twelve membered rings. Heterocycles may include one or more double bonds and may be aromatic (e.g., heteroaryl groups). Examples of heterocycles include imidazolyl, imidazolidinyl, oxazolyl, oxazolidinyl, thiazolyl, thiazolidinyl, pyrazolidinyl, pyrazolyl, isoxazolidinyl, isoxazolyl, isothiazolidinyl, isothiazolyl, morpholinyl, pyrrolyl, pyrrolidinyl, furyl, tetrahydrofuryl, thiophenyl, pyridinyl, piperidinyl, quinolyl, and isoquinolyl groups. Heterocycles may be optionally substituted.

[2940] As used herein, a “biodegradable group” is a group that may facilitate faster metabolism of a lipid in a subject. A biodegradable group may be, but is not limited to, —C(O)O—, —OC(O)—, —C(O)N(R′)-, —N(R′)C(O)—, —C(O)—, —C(S)—, —C(S)S—, —SC(S)—, —CH(OH)—, —P(O)(OR′)O—, —S(O)₂—, an aryl group, and a heteroaryl group.

[2941] As used herein, an “aryl group” is a carbocyclic group including one or more aromatic rings. Examples of aryl groups include phenyl and naphthyl groups.

[2942] As used herein, a “heteroaryl group” is a heterocyclic group including one or more aromatic rings. Examples of heteroaryl groups include pyrrolyl, furyl, thiophenyl, imidazolyl, oxazolyl, and thiazolyl. Both aryl and heteroaryl groups may be optionally substituted. For example, M and M′ can be selected from the non-limiting group consisting of optionally substituted phenyl, oxazole, and thiazole. In the formulas herein, M and M′ can be independently selected from the list of biodegradable groups above.

[2943] Alkyl, alkenyl, and cyclyl (e.g., carbocyclyl and heterocyclyl) groups may be optionally substituted unless otherwise specified. Optional substituents may be selected from the group consisting of, but are not limited to, a halogen atom (e.g., a chloride, bromide, fluoride, or iodide group), a carboxylic acid (e.g., —C(O)OH), an alcohol (e.g., a hydroxyl, —OH), an ester (e.g., —C(O)OR or —OC(O)R), an aldehyde (e.g., —C(O)H), a carbonyl (e.g., —C(O)R, alternatively represented by C═O), an acyl halide (e.g., —C(O)X, in which X is a halide selected from bromide, fluoride, chloride, and iodide), a carbonate (e.g., —OC(O)OR), an alkoxy (e.g., —OR), an acetal (e.g., —C(OR)₂R″, in which each OR are alkoxy groups that can be the same or different and R″ is an alkyl or alkenyl group), a phosphate (e.g., P(O)₄³⁻), a thiol (e.g., —SH), a sulfoxide (e.g., —S(O)R), a sulfinic acid (e.g., —S(O)OH), a sulfonic acid (e.g., —S(O)₂OH), a thial (e.g., —C(S)H), a sulfate (e.g., S(O)₄²⁻), a sulfonyl (e.g., —S(O)₂—), an amide (e.g., —C(O)NR₂, or —N(R)C(O)R), an azido (e.g., —N₃), a nitro (e.g., —N02), a cyano (e.g., —CN), an isocyano (e.g., —NC), an acyloxy (e.g., —OC(O)R), an amino (e.g., —NR₂, —NRH, or —NH₂), a carbamoyl (e.g., —OC(O)NR₂, —OC(O)NRH, or —OC(O)NH₂), a sulfonamide (e.g., —S(O)₂NR₂, —S(O)₂NRH, —S(O)₂NH₂, —N(R)S(O)₂R, —N(H)S(O)₂R, —N(R)S(O)₂H, or —N(H)S(O)₂H), an alkyl group, an alkenyl group, and a cyclyl (e.g., carbocyclyl or heterocyclyl) group.

[2944] In any of the preceding, R is an alkyl or alkenyl group, as defined herein. In some embodiments, the substituent groups themselves may be further substituted with, for example, one, two, three, four, five, or six substituents as defined herein. For example, a C₁₋₆ alkyl group may be further substituted with one, two, three, four, five, or six substituents as described herein.

[2945] The compounds of any one of formulae (I), (IA), (II), (IIa), (IIb), (IIc), (IId), and (IIe) include one or more of the following features when applicable.

[2946] In some embodiments, R₄ is selected from the group consisting of a C₃₋₆ carbocycle, —(CH₂)ₙQ, —CH₂)ₙCHQR, —CHQR, and -CQ(R)₂, where Q is selected from a C₃₋₆ carbocycle, 5—to 14—membered aromatic or non-aromatic heterocycle having one or more heteroatoms selected from N, O, S, and P, —OR, —O(CH₂)ₙN(R)₂, —C(O)OR, —OC(O)R, —CX₃, -CX₂H, —CXH₂, —CN, —N(R)₂, —C(O)N(R)₂, —N(R)C(O)R, —N(R)S(O)₂R, —N(R)C(O)N(R)₂, —N(R)C(S)N(R)₂, and —C(R)N(R)₂C(O)OR, and each n is independently selected from 1, 2, 3, 4, and 5.

[2947] In another embodiment, R₄ is selected from the group consisting of a C₃₋₆ carbocycle, —CH₂)ₙQ, —CH₂)ₙCHQR, —CHQR, and -CQ(R)₂, where Q is selected from a C₃₋₆ carbocycle, a 5—to 14-membered heteroaryl having one or more heteroatoms selected from N, O, and S, —OR, —O(CH₂)ₙN(R)₂, —C(O)OR, —OC(O)R, —CX₃, —CX₂H, —CXH₂, —CN, —C(O)N(R)₂, —N(R)C(O)R, —N(R)S(O)₂R, —N(R)C(O)N(R)₂, —N(R)C(S)N(R)₂, —C(R)N(R)₂C(O)OR, and a 5—to 14-membered heterocycloalkyl having one or more heteroatoms selected from N, O, and S which is substituted with one or more substituents selected from oxo (═O), OH, amino, and C₁₋₃ alkyl, and each n is independently selected from 1, 2, 3, 4, and 5.

[2948] In another embodiment, R₄ is selected from the group consisting of a C₃₋₆ carbocycle, —CH₂)ₙQ, —CH₂)ₙCHQR, —CHQR, and -CQ(R)₂, where Q is selected from a C₃₋₆ carbocycle, a 5—to 14-membered heterocycle having one or more heteroatoms selected from N, O, and S, —OR, —O(CH₂)ₙN(R)₂, —C(O)OR, —OC(O)R, —CX₃, —CX₂H, —CXH₂, —CN, —C(O)N(R)₂, —N(R)C(O)R, —N(R)S(O)₂R, —N(R)C(O)N(R)₂, —N(R)C(S)N(R)₂, —C(R)N(R)₂C(O)OR, and each n is independently selected from 1, 2, 3, 4, and 5; and when Q is a 5—to 14-membered heterocycle and (i) R₄ is —(CH₂)ₙQ in which n is 1 or 2, or (ii) R₄ is —CH₂)ₙCHQR in which n is 1, or (iii) R₄ is —CHQR, and -CQ(R)₂, then Q is either a 5—to 14-membered heteroaryl or 8- to 14-membered heterocycloalkyl.

[2949] In another embodiment, R₄ is selected from the group consisting of a C₃₋₆ carbocycle, —(CH₂)ₙQ, —(CH₂)ₙCHQR, —CHQR, and -CQ(R)₂, where Q is selected from a C₃₋₆ carbocycle, a 5- to 14-membered heteroaryl having one or more heteroatoms selected from N, O, and S, —OR, —O(CH₂)ₙN(R)₂, —C(O)OR, —OC(O)R, —CX₃, —CX₂H, —CXH₂, —CN, —C(O)N(R)₂, —N(R)C(O)R, —N(R)S(O)₂R, —N(R)C(O)N(R)₂, —N(R)C(S)N(R)₂, —C(R)N(R)₂C(O)OR, and each n is independently selected from 1, 2, 3, 4, and 5.

[2950] In another embodiment, R₄ is unsubstituted C₁₋₄ alkyl, e.g., unsubstituted methyl.

[2951] In certain embodiments, the disclosure provides a compound having the Formula (I), wherein R₄ is —CH₂)ₙQ or —CH₂)ₙCHQR, where Q is —N(R)₂, and n is selected from 3, 4, and 5.

[2952] In certain embodiments, the disclosure provides a compound having the Formula (I), wherein R₄ is selected from the group consisting of —CH₂)ₙQ, —CH₂)ₙCHQR, —CHQR, and -CQ(R)₂, where Q is —N(R)₂, and n is selected from 1, 2, 3, 4, and 5.

[2953] In certain embodiments, the disclosure provides a compound having the Formula (I), wherein R₂ and R₃ are independently selected from the group consisting of C₂₋₁₄ alkyl, C₂₋₁₄ alkenyl,-R*YR″,-YR″, and -R*OR″, or R₂ and R₃, together with the atom to which they are attached, form a heterocycle or carbocycle, and R₄ is —CH₂)ₙQ or —CH₂)ₙCHQR, where Q is —N(R)₂, and n is selected from 3, 4, and 5.

[2954] In certain embodiments, R₂ and R₃ are independently selected from the group consisting of C₂₋₁₄ alkyl, C₂₋₁₄ alkenyl,-R*YR″,-YR″, and -R*OR″, or R₂ and R₃, together with the atom to which they are attached, form a heterocycle or carbocycle.

[2955] In some embodiments, R₁ is selected from the group consisting of C₅₋₂₀ alkyl and C₅₋₂₀ alkenyl.

[2956] In other embodiments, R₁ is selected from the group consisting of -R*YR″,-YR″, and -R″M′R′.

[2957] In certain embodiments, R₁ is selected from -R*YR″ and -YR″. In some embodiments, Y is a cyclopropyl group. In some embodiments, R* is C₈ alkyl or C₈ alkenyl. In certain embodiments, R″ is C₃₋₁₂ alkyl. For example, R″ may be C₃ alkyl. For example, R″ may be C₄₋₈ alkyl (e.g., C₄, C₅, C₆, C₇, or C₈ alkyl).

[2958] In some embodiments, R₁ is C₅₋₂₀ alkyl. In some embodiments, R₁ is C₆ alkyl. In some embodiments, R₁ is C₈ alkyl. In other embodiments, R₁ is C₉ alkyl. In certain embodiments, R₁ is C₁₄ alkyl. In other embodiments, R₁ is C₁₈ alkyl.

[2959] In some embodiments, R₁ is C₅₋₂₀ alkenyl. In certain embodiments, R₁ is C₁₈ alkenyl. In some embodiments, R₁ is linoleyl.

[2960] In certain embodiments, R₁ is branched (e.g., decan-2-yl, undecan-3-yl, dodecan-4-yl, tridecan-5-yl, tetradecan-6-yl, 2-methylundecan-3-yl, 2-methyldecan-2-yl, 3-methylundecan-3-yl, 4-methyldodecan-4-yl, or heptadeca-9-yl). In certain embodiments, R₁ is.

[chemical structure]

[2961] In certain embodiments, R₁ is unsubstituted C₅₋₂₀ alkyl or C₅₋₂₀ alkenyl. In certain embodiments, R′ is substituted C₅₋₂₀ alkyl or C₅₋₂₀ alkenyl (e.g., substituted with a C₃₋₆ carbocycle such as 1-cyclopropylnonyl).

[2962] In other embodiments, R₁ is -R″M′R′.

[2963] In some embodiments, R′ is selected from -R*YR″ and -YR″. In some embodiments, Y is C₃₋₈ cycloalkyl. In some embodiments, Y is C₆₋₁₀ aryl. In some embodiments, Y is a cyclopropyl group. In some embodiments, Y is a cyclohexyl group. In certain embodiments, R* is C₁ alkyl.

[2964] In some embodiments, R″ is selected from the group consisting of C₃₋₁₂ alkyl and C₃₋₁₂ alkenyl. In some embodiments, R″ adjacent to Y is C₁ alkyl. In some embodiments, R″ adjacent to Y is C₄₋₉ alkyl (e.g., C₄, C₅, C₆, C₇ or C₈ or C₉ alkyl).

[2965] In some embodiments, R′ is selected from C₄ alkyl and C₄ alkenyl. In certain embodiments, R′ is selected from C₅ alkyl and C₅ alkenyl. In some embodiments, R′ is selected from C₆ alkyl and C₆ alkenyl. In some embodiments, R′ is selected from C₇ alkyl and C₇ alkenyl. In some embodiments, R′ is selected from C₉ alkyl and C₉ alkenyl.

[2966] In other embodiments, R′ is selected from C₁₁ alkyl and C₁₁ alkenyl. In other embodiments, R′ is selected from C₁₂ alkyl, C₁₂ alkenyl, C₁₃ alkyl, C₁₃ alkenyl, C₁₄ alkyl, C₁₄ alkenyl, C₁₅ alkyl, C₁₅ alkenyl, C₁₆ alkyl, C₁₆ alkenyl, C₁₇ alkyl, C₁₇ alkenyl, C₁₈ alkyl, and C₁₈ alkenyl. In certain embodiments, R′ is branched (e.g., decan-2-yl, undecan-3-yl, dodecan-4-yl, tridecan-5-yl, tetradecan-6-yl, 2-methylundecan-3-yl, 2-methyldecan-2-yl, 3-methylundecan-3-yl, 4-methyldodecan-4-yl or heptadeca-9-yl). In certain embodiments, R′ is

[chemical structure]

[2967] In certain embodiments, R′ is unsubstituted C₁₋₁₈ alkyl. In certain embodiments, R′ is substituted C₁₋₁₈ alkyl (e.g., C₁₋₁₅ alkyl substituted with a C₃₋₆ carbocycle such as 1-cyclopropylnonyl).

[2968] In some embodiments, R″ is selected from the group consisting of C₃₋₁₄ alkyl and C₃₋₁₄ alkenyl. In some embodiments, R″ is C₃ alkyl, C₄ alkyl, C₅ alkyl, C₆ alkyl, C₇ alkyl, or C₈ alkyl. In some embodiments, R″ is C₉ alkyl, C₁₀ alkyl, C₁₁ alkyl, C₁₂ alkyl, C₁₃ alkyl, or C₁₄ alkyl.

[2969] In some embodiments, M′ is —C(O)O—. In some embodiments, M′ is —OC(O)—.

[2970] In other embodiments, M′ is an aryl group or heteroaryl group. For example, M′ may be selected from the group consisting of phenyl, oxazole, and thiazole.

[2971] In some embodiments, M is —C(O)O— In some embodiments, M is —OC(O)—. In some embodiments, M is —C(O)N(R′)-. In some embodiments, M is —P(O)(OR′)O—.

[2972] In other embodiments, M is an aryl group or heteroaryl group. For example, M may be selected from the group consisting of phenyl, oxazole, and thiazole.

[2973] In some embodiments, M is the same as M′. In other embodiments, M is different from M′.

[2974] In some embodiments, each R₅ is H. In certain such embodiments, each R₆ is also H.

[2975] In some embodiments, R₇ is H. In other embodiments, R₇ is C₁₋₃ alkyl (e.g., methyl, ethyl, propyl, or i-propyl).

[2976] In some embodiments, R₂ and R₃ are independently C₅₋₁₄ alkyl or C₅₋₁₄ alkenyl.

[2977] In some embodiments, R₂ and R₃ are the same. In some embodiments, R₂ and R₃ are C₈ alkyl. In certain embodiments, R₂ and R₃ are C₂ alkyl. In other embodiments, R₂ and R₃ are C₃ alkyl. In some embodiments, R₂ and R₃ are C₄ alkyl. In certain embodiments, R₂ and R₃ are C₅ alkyl. In other embodiments, R₂ and R₃ are C₆ alkyl. In some embodiments, R₂ and R₃ are C₇ alkyl.

[2978] In other embodiments, R₂ and R₃ are different. In certain embodiments, R₂ is C₈ alkyl. In some embodiments, R₃ is C₁₋₇ (e.g., C₁, C₂, C₃, C₄, C₅, C₆, or C₇ alkyl) or C₉ alkyl.

[2979] In some embodiments, R₇ and R₃ are H.

[2980] In certain embodiments, R₂ is H.

[2981] In some embodiments, m is 5, 7, or 9.

[2982] In some embodiments, R₄ is selected from —(CH₂)ₙQ and —(CH₂)ₙCHQR.

[2983] In some embodiments, Q is selected from the group consisting of —OR, —OH, —O(CH₂)ₙN(R)₂, —OC(O)R, —CX₃, —CN, —N(R)C(O)R, —N(H)C(O)R, —N(R)S(O)₂R, —N(H)S(O)₂R, —N(R)C(O)N(R)₂, —N(H)C(O)N(R)₂, —N(H)C(O)N(H)(R), —N(R)C(S)N(R)₂, —N(H)C(S)N(R)₂, —N(H)C(S)N(H)(R), —C(R)N(R)₂C(O)OR, a carbocycle, and a heterocycle.

[2984] In certain embodiments, Q is -OH.

[2985] In certain embodiments, Q is a substituted or unsubstituted 5- to 10-membered heteroaryl, e.g., Q is an imidazole, a pyrimidine, a purine, 2-amino-1,9-dihydro-6H-purin-6-one-9-yl (or guanin-9-yl), adenin-9-yl, cytosin-1-yl, or uracil-1-yl. In certain embodiments, Q is a substituted 5- to 14-membered heterocycloalkyl, e.g., substituted with one or more substituents selected from oxo (═O), OH, amino, and C₁₋₃ alkyl. For example, Q is 4-methylpiperazinyl, 4-(4-methoxybenzyl)piperazinyl, or isoindolin-2-yl-1,3-dione.

[2986] In certain embodiments, Q is an unsubstituted or substituted C₆₋₁₀ aryl (such as phenyl) or C₃₋₆ cycloalkyl.

[2987] In some embodiments, n is 1. In other embodiments, n is 2. In further embodiments, n is 3. In certain other embodiments, n is 4. For example, R₄ may be —(CH₂)₂OH. For example, R₄ may be —(CH₂)₃OH. For example, R₄ may be —(CH₂)₄OH. For example, R₄ may be benzyl. For example, R₄ may be 4-methoxybenzyl.

[2988] In some embodiments, R₄ is a C₃₋₆ carbocycle. In some embodiments, R₄ is a C₃₋₆ cycloalkyl. For example, R₄ may be cyclohexyl optionally substituted with e.g., OH, halo, C₁₋₆ alkyl, etc. For example, R₄ may be 2-hydroxycyclohexyl.

[2989] In some embodiments, R is H.

[2990] In some embodiments, R is unsubstituted C₁₋₃ alkyl or unsubstituted C₂₋₃ alkenyl. For example, R₄ may be —CH₂CH(OH)CH₃ or —CH₂CH(OH)CH₂CH₃.

[2991] In some embodiments, R is substituted C₁₋₃ alkyl, e.g., CH₂OH. For example, R₄ may be —CH₂CH(OH)CH₂OH.

[2992] In some embodiments, R₂ and R₃, together with the atom to which they are attached, form a heterocycle or carbocycle. In some embodiments, R₂ and R₃, together with the atom to which they are attached, form a 5- to 14-membered aromatic or non-aromatic heterocycle having one or more heteroatoms selected from N, O, S, and P. In some embodiments, R₂ and R₃, together with the atom to which they are attached, form an optionally substituted C₃₋₂₀ carbocycle (e.g., C₃—is carbocycle, C₃₋₁₅ carbocycle, C₃₋₁₂ carbocycle, or C₃₋₁₀ carbocycle), either aromatic or non-aromatic. In some embodiments, R₂ and R₃, together with the atom to which they are attached, form a C₃₋₆ carbocycle. In other embodiments, R₂ and R₃, together with the atom to which they are attached, form a C₆ carbocycle, such as a cyclohexyl or phenyl group. In certain embodiments, the heterocycle or C₃₋₆ carbocycle is substituted with one or more alkyl groups (e.g., at the same ring atom or at adjacent or non-adjacent ring atoms). For example, R₂ and R₃, together with the atom to which they are attached, may form a cyclohexyl or phenyl group bearing one or more C₈ alkyl substitutions. In certain embodiments, the heterocycle or C₃₋₆ carbocycle formed by R₂ and R₃, is substituted with a carbocycle groups. For example, R₂ and R₃, together with the atom to which they are attached, may form a cyclohexyl or phenyl group that is substituted with cyclohexyl. In some embodiments, R₂ and R₃, together with the atom to which they are attached, form a C₇₋₁₅ carbocycle, such as a cycloheptyl, cyclopentadecanyl, or naphthyl group.

[2993] In some embodiments, R₄ is selected from —(CH₂)ₙQ and —(CH₂)ₙCHQR. In some embodiments, Q is selected from the group consisting of —OR, —OH, —O(CH₂)ₙN(R)₂, —OC(O)R, —CX₃, —CN, —N(R)C(O)R, —N(H)C(O)R, —N(R)S(O)₂R, —N(H)S(O)₂R, —N(R)C(O)N(R)₂, —N(H)C(O)N(R)₂, —N(H)C(O)N(H)(R), —N(R)C(S)N(R)₂, —N(H)C(S)N(R)₂, —N(H)C(S)N(H)(R), and a heterocycle. In other embodiments, Q is selected from the group consisting of an imidazole, a pyrimidine, and a purine.

[2994] In some embodiments, R₂ and R₃, together with the atom to which they are attached, form a heterocycle or carbocycle. In some embodiments, R₂ and R₃, together with the atom to which they are attached, form a C₃₋₆ carbocycle, such as a phenyl group. In certain embodiments, the heterocycle or C₃₋₆ carbocycle is substituted with one or more alkyl groups (e.g., at the same ring atom or at adjacent or non-adjacent ring atoms). For example, R₂ and R₃, together with the atom to which they are attached, may form a phenyl group bearing one or more C₈ alkyl substitutions.

[2995] In some embodiments, the pharmaceutical compositions of the present disclosure, the compound of formula (I) is selected from the group consisting of:

[chemical structure]

[chemical structure]

[chemical structure]

[chemical structure]

[chemical structure]

[chemical structure]

[chemical structure]

[chemical structure]

[chemical structure]

[chemical structure]

[chemical structure]

[chemical structure]

[chemical structure]

[chemical structure]

[chemical structure]

[chemical structure]

[chemical structure]

[chemical structure]

[chemical structure]

[chemical structure]

[chemical structure]

[chemical structure]

and salts or stereoisomers thereof.

[2996] The central amine moiety of a lipid according to formula (I) is typically protonated (i.e., positively charged) at a pH below the pKa of the amino moiety and is substantially not charged at a pH above the pKa. Such lipids may be referred to ionizable amino lipids.

[2997] In one specific embodiment, the compound of formula (I) is Compound 18.

[2998] In some embodiments, the amount the compound of formula (I) ranges from about 1 mol % to 99 mol % in the lipid composition.

[2999] In one embodiment, the amount of compound of formula (I) is at least about 1, 2, 3, 4, 5, 6, 7, 8, 9, 10, 11, 12, 13, 14, 15, 16, 17, 18, 19, 20, 21, 22, 23, 24, 25, 26, 27, 28, 29, 30, 31, 32, 33, 34, 35, 36, 37, 38, 39, 40, 41, 42, 43, 44, 45, 46, 47, 48, 49, 50, 51, 52, 53, 54, 55, 56, 57, 58, 59, 60, 61, 62, 63, 64, 65, 66, 67, 68, 69, 70, 71, 72, 73, 74, 75, 76, 77, 78, 79, 80, 81, 82, 83, 84, 85, 86, 87, 88, 89, 90, 91, 92, 93, 94, 95, 96, 97, 98, or 99 mol % in the lipid composition.

[3000] In one embodiment, the amount of the compound of formula (I) ranges from about 30 mol % to about 70 mol %, from about 35 mol % to about 65 mol %, from about 40 mol % to about 60 mol %, and from about 45 mol % to about 55 mol % in the lipid composition.

[3001] In one specific embodiment, the amount of the compound of formula (I) is about 50 mol % in the lipid composition.

[3002] In addition to the compound of formula I, the lipid composition of the pharmaceutical compositions disclosed herein can comprise additional components such as phospholipids, structural lipids, quaternary amine compounds, PEG-lipids, and any combination thereof.

### Additional Components in the Lipid Composition

### A. Phospholipids

[3003] The lipid composition of the pharmaceutical composition disclosed herein can comprise one or more phospholipids, for example, one or more saturated or (poly)unsaturated phospholipids or a combination thereof. In general, phospholipids comprise a phospholipid moiety and one or more fatty acid moieties. For example, a phospholipid can be a lipid according to formula (III):

[chemical structure]

in which Rₚ represents a phospholipid moiety and R₁ and R₂ represent fatty acid moieties with or without unsaturation that may be the same or different.

[3004] A phospholipid moiety may be selected, for example, from the non-limiting group consisting of phosphatidyl choline, phosphatidyl ethanolamine, phosphatidyl glycerol, phosphatidyl serine, phosphatidic acid, 2-lysophosphatidyl choline, and a sphingomyelin.

[3005] A fatty acid moiety may be selected, for example, from the non-limiting group consisting of lauric acid, myristic acid, myristoleic acid, palmitic acid, palmitoleic acid, stearic acid, oleic acid, linoleic acid, alpha-linolenic acid, erucic acid, phytanoic acid, arachidic acid, arachidonic acid, eicosapentaenoic acid, behenic acid, docosapentaenoic acid, and docosahexaenoic acid.

[3006] Particular phospholipids may facilitate fusion to a membrane. For example, a cationic phospholipid may interact with one or more negatively charged phospholipids of a membrane (e.g., a cellular or intracellular membrane). Fusion of a phospholipid to a membrane may allow one or more elements (e.g., a therapeutic agent) of a lipid-containing composition (e.g., LNPs) to pass through the membrane permitting, e.g., delivery of the one or more elements to a target tissue (e.g., tumoral tissue).

[3007] Non-natural phospholipid species including natural species with modifications and substitutions including branching, oxidation, cyclization, and alkynes are also contemplated. For example, a phospholipid may be functionalized with or cross-linked to one or more alkynes (e.g., an alkenyl group in which one or more double bonds is replaced with a triple bond). Under appropriate reaction conditions, an alkyne group may undergo a copper-catalyzed cycloaddition upon exposure to an azide. Such reactions may be useful in functionalizing a lipid bilayer of a nanoparticle composition to facilitate membrane permeation or cellular recognition or in conjugating a nanoparticle composition to a useful component such as a targeting or imaging moiety (e.g., a dye).

[3008] Phospholipids include, but are not limited to, glycerophospholipids such as phosphatidylcholines, phosphatidylethanolamines, phosphatidylserines, phosphatidylinositols, phosphatidyl glycerols, and phosphatidic acids. Phospholipids also include phosphosphingolipid, such as sphingomyelin. In some embodiments, a pharmaceutical composition for intratumoral delivery disclosed herein can comprise more than one phospholipid. When more than one phospholipid is used, such phospholipids can belong to the same phospholipid class (e.g., MSPC and DSPC) or different classes (e.g., MSPC and MSPE).

[3009] Phospholipids may be of a symmetric or an asymmetric type. As used herein, the term “symmetric phospholipid” includes glycerophospholipids having matching fatty acid moieties and sphingolipids in which the variable fatty acid moiety and the hydrocarbon chain of the sphingosine backbone include a comparable number of carbon atoms. As used herein, the term “asymmetric phospholipid” includes lysolipids, glycerophospholipids having different fatty acid moieties (e.g., fatty acid moieties with different numbers of carbon atoms and/or unsaturations (e.g., double bonds)), and sphingolipids in which the variable fatty acid moiety and the hydrocarbon chain of the sphingosine backbone include a dissimilar number of carbon atoms (e.g., the variable fatty acid moiety include at least two more carbon atoms than the hydrocarbon chain or at least two fewer carbon atoms than the hydrocarbon chain).

[3010] In some embodiments, the lipid composition of a pharmaceutical composition disclosed herein comprises at least one symmetric phospholipid. Symmetric phospholipids may be selected from the non-limiting group consisting of
[3011] 1,2-dipropionyl-sn-glycero-3-phosphocholine (03:0 PC),
[3012] 1,2-dibutyryl-sn-glycero-3-phosphocholine (04:0 PC),
[3013] 1,2-dipentanoyl-sn-glycero-3-phosphocholine (05:0 PC),
[3014] 1,2-dihexanoyl-sn-glycero-3-phosphocholine (06:0 PC),
[3015] 1,2-diheptanoyl-sn-glycero-3-phosphocholine (07:0 PC),
[3016] 1,2-dioctanoyl-sn-glycero-3-phosphocholine (08:0 PC),
[3017] 1,2-dinonanoyl-sn-glycero-3-phosphocholine (09:0 PC),
[3018] 1,2-didecanoyl-sn-glycero-3-phosphocholine (10:0 PC),
[3019] 1,2-diundecanoyl-sn-glycero-3-phosphocholine (11:0 PC, DUPC),
[3020] 1,2-dilauroyl-sn-glycero-3-phosphocholine (12:0 PC),
[3021] 1,2-ditridecanoyl-sn-glycero-3-phosphocholine (13:0 PC),
[3022] 1,2-dimyristoyl-sn-glycero-3-phosphocholine (14:0 PC, DMPC),
[3023] 1,2-dipentadecanoyl-sn-glycero-3-phosphocholine (15:0 PC),
[3024] 1,2-dipalmitoyl-sn-glycero-3-phosphocholine (16:0 PC, DPPC),
[3025] 1,2-diphytanoyl-sn-glycero-3-phosphocholine (4ME 16:0 PC),
[3026] 1,2-diheptadecanoyl-sn-glycero-3-phosphocholine (17:0 PC),
[3027] 1,2-distearoyl-sn-glycero-3-phosphocholine (18:0 PC, DSPC),
[3028] 1,2-dinonadecanoyl-sn-glycero-3-phosphocholine (19:0 PC),
[3029] 1,2-diarachidoyl-sn-glycero-3-phosphocholine (20:0 PC),
[3030] 1,2-dihenarachidoyl-sn-glycero-3-phosphocholine (21:0 PC),
[3031] 1,2-dibehenoyl-sn-glycero-3-phosphocholine (22:0 PC),
[3032] 1,2-ditricosanoyl-sn-glycero-3-phosphocholine (23:0 PC),
[3033] 1,2-dilignoceroyl-sn-glycero-3-phosphocholine (24:0 PC),
[3034] 1,2-dimyristoleoyl-sn-glycero-3-phosphocholine (14:1 (A9-Cis) PC),
[3035] 1,2-dimyristelaidoyl-sn-glycero-3-phosphocholine (14:1 (A9-Trans) PC),
[3036] 1,2-dipalmitoleoyl-sn-glycero-3-phosphocholine (16:1 (A9-Cis) PC),
[3037] 1,2-dipalmitelaidoyl-sn-glycero-3-phosphocholine (16:1 (A9-Trans) PC),
[3038] 1,2-dipetroselenoyl-sn-glycero-3-phosphocholine (18:1 (A6-Cis) PC),
[3039] 1,2-dioleoyl-sn-glycero-3-phosphocholine (18:1 (A9-Cis) PC, DOPC),
[3040] 1,2-dielaidoyl-sn-glycero-3-phosphocholine (18:1 (A9-Trans) PC),
[3041] 1,2-dilinoleoyl-sn-glycero-3-phosphocholine (18:2 (Cis) PC, DLPC),
[3042] 1,2-dilinolenoyl-sn-glycero-3-phosphocholine (18:3 (Cis) PC, DLnPC),
[3043] 1,2-dieicosenoyl-sn-glycero-3-phosphocholine (20:1 (Cis) PC),
[3044] 1,2-diarachidonoyl-sn-glycero-3-phosphocholine (20:4 (Cis) PC, DAPC),
[3045] 1,2-dierucoyl-sn-glycero-3-phosphocholine (22:1 (Cis) PC),
[3046] 1,2-didocosahexaenoyl-sn-glycero-3-phosphocholine (22:6 (Cis) PC, DHAPC),
[3047] 1,2-dinervonoyl-sn-glycero-3-phosphocholine (24:1 (Cis) PC),
[3048] 1,2-dihexanoyl-sn-glycero-3-phosphoethanolamine (06:0 PE),
[3049] 1,2-dioctanoyl-sn-glycero-3-phosphoethanolamine (08:0 PE),
[3050] 1,2-didecanoyl-sn-glycero-3-phosphoethanolamine (10:0 PE),
[3051] 1,2-dilauroyl-sn-glycero-3-phosphoethanolamine (12:0 PE),
[3052] 1,2-dimyristoyl-sn-glycero-3-phosphoethanolamine (14:0 PE),
[3053] 1,2-dipentadecanoyl-sn-glycero-3-phosphoethanolamine (15:0 PE),
[3054] 1,2-dipalmitoyl-sn-glycero-3-phosphoethanolamine (16:0 PE),
[3055] 1,2-diphytanoyl-sn-glycero-3-phosphoethanolamine (4ME 16:0 PE),
[3056] 1,2-diheptadecanoyl-sn-glycero-3-phosphoethanolamine (17:0 PE),
[3057] 1,2-distearoyl-sn-glycero-3-phosphoethanolamine (18:0 PE, DSPE),
[3058] 1,2-dipalmitoleoyl-sn-glycero-3-phosphoethanolamine (16:1 PE),
[3059] 1,2-dioleoyl-sn-glycero-3-phosphoethanolamine (18:1 (A9-Cis) PE, DOPE),
[3060] 1,2-dielaidoyl-sn-glycero-3-phosphoethanolamine (18:1 (A9-Trans) PE),
[3061] 1,2-dilinoleoyl-sn-glycero-3-phosphoethanolamine (18:2 PE, DLPE),
[3062] 1,2-dilinolenoyl-sn-glycero-3-phosphoethanolamine (18:3 PE, DLnPE),
[3063] 1,2-diarachidonoyl-sn-glycero-3-phosphoethanolamine (20:4 PE, DAPE),
[3064] 1,2-didocosahexaenoyl-sn-glycero-3-phosphoethanolamine (22:6 PE, DHAPE),
[3065] 1,2-di-O-octadecenyl-sn-glycero-3-phosphocholine (18:0 Diether PC),
[3066] 1,2-dioleoyl-sn-glycero-3-phospho-rac-(1-glycerol) sodium salt (DOPG), and
[3067] any combination thereof.

[3068] In some embodiments, the lipid composition of a pharmaceutical composition disclosed herein comprises at least one symmetric phospholipid selected from the non-limiting group consisting of DLPC, DMPC, DOPC, DPPC, DSPC, DUPC, 18:0 Diether PC, DLnPC, DAPC, DHAPC, DOPE, 4ME 16:0 PE, DSPE, DLPE,DLnPE, DAPE, DHAPE, DOPG, and any combination thereof.

[3069] In some embodiments, the lipid composition of a pharmaceutical composition disclosed herein comprises at least one asymmetric phospholipid. Asymmetric phospholipids may be selected from the non-limiting group consisting of
[3070] 1-myristoyl-2-palmitoyl-sn-glycero-3-phosphocholine (14:0-16:0 PC, MPPC),
[3071] 1-myristoyl-2-stearoyl-sn-glycero-3-phosphocholine (14:0-18:0 PC, MSPC),
[3072] 1-palmitoyl-2-acetyl-sn-glycero-3-phosphocholine (16:0-02:0 PC),
[3073] 1-palmitoyl-2-myristoyl-sn-glycero-3-phosphocholine (16:0-14:0 PC, PMPC),
[3074] 1-palmitoyl-2-stearoyl-sn-glycero-3-phosphocholine (16:0-18:0 PC, PSPC),
[3075] 1-palmitoyl-2-oleoyl-sn-glycero-3-phosphocholine (16:0-18:1 PC, POPC),
[3076] 1-palmitoyl-2-linoleoyl-sn-glycero-3-phosphocholine (16:0-18:2 PC, PLPC),
[3077] 1-palmitoyl-2-arachidonoyl-sn-glycero-3-phosphocholine (16:0-20:4 PC),
[3078] 1-palmitoyl-2-docosahexaenoyl-sn-glycero-3-phosphocholine (14:0-22:6 PC),
[3079] 1-stearoyl-2-myristoyl-sn-glycero-3-phosphocholine (18:0-14:0 PC, SMPC),
[3080] 1-stearoyl-2-palmitoyl-sn-glycero-3-phosphocholine (18:0-16:0 PC, SPPC),
[3081] 1-stearoyl-2-oleoyl-sn-glycero-3-phosphocholine (18:0-18:1 PC, SOPC),
[3082] 1-stearoyl-2-linoleoyl-sn-glycero-3-phosphocholine (18:0-18:2 PC),
[3083] 1-stearoyl-2-arachidonoyl-sn-glycero-3-phosphocholine (18:0-20:4 PC),
[3084] 1-stearoyl-2-docosahexaenoyl-sn-glycero-3-phosphocholine (18:0-22:6 PC),
[3085] 1-oleoyl-2-myristoyl-sn-glycero-3-phosphocholine (18:1-14:0 PC, OMPC),
[3086] 1-oleoyl-2-palmitoyl-sn-glycero-3-phosphocholine (18:1-16:0 PC, OPPC),
[3087] 1-oleoyl-2-stearoyl-sn-glycero-3-phosphocholine (18:1-18:0 PC, OSPC),
[3088] 1-palmitoyl-2-oleoyl-sn-glycero-3-phosphoethanolamine (16:0-18:1 PE, POPE),
[3089] 1-palmitoyl-2-linoleoyl-sn-glycero-3-phosphoethanolamine (16:0-18:2 PE),
[3090] 1-palmitoyl-2-arachidonoyl-sn-glycero-3-phosphoethanolamine (16:0-20:4 PE),
[3091] 1-palmitoyl-2-docosahexaenoyl-sn-glycero-3-phosphoethanolamine (16:0-22:6 PE),
[3092] 1-stearoyl-2-oleoyl-sn-glycero-3-phosphoethanolamine (18:0-18:1 PE),
[3093] 1-stearoyl-2-linoleoyl-sn-glycero-3-phosphoethanolamine (18:0-18:2 PE),
[3094] 1-stearoyl-2-arachidonoyl-sn-glycero-3-phosphoethanolamine (18:0-20:4 PE),
[3095] 1-stearoyl-2-docosahexaenoyl-sn-glycero-3-phosphoethanolamine (18:0-22:6 PE),
[3096] 1-oleoyl-2-cholesterylhemisuccinoyl-sn-glycero-3-phosphocholine (OChemsPC), and any combination thereof.

[3097] Asymmetric lipids useful in the lipid composition may also be lysolipids. Lysolipids may be selected from the non-limiting group consisting of
[3098] 1-hexanoyl-2-hydroxy-sn-glycero-3-phosphocholine (06:0 Lyso PC),
[3099] 1-heptanoyl-2-hydroxy-sn-glycero-3-phosphocholine (07:0 Lyso PC),
[3100] 1-octanoyl-2-hydroxy-sn-glycero-3-phosphocholine (08:0 Lyso PC),
[3101] 1-nonanoyl-2-hydroxy-sn-glycero-3-phosphocholine (09:0 Lyso PC),
[3102] 1-decanoyl-2-hydroxy-sn-glycero-3-phosphocholine (10:0 Lyso PC),
[3103] 1-undecanoyl-2-hydroxy-sn-glycero-3-phosphocholine (11:0 Lyso PC),
[3104] 1-lauroyl-2-hydroxy-sn-glycero-3-phosphocholine (12:0 Lyso PC),
[3105] 1-tridecanoyl-2-hydroxy-sn-glycero-3-phosphocholine (13:0 Lyso PC),
[3106] 1-myristoyl-2-hydroxy-sn-glycero-3-phosphocholine (14:0 Lyso PC),
[3107] 1-pentadecanoyl-2-hydroxy-sn-glycero-3-phosphocholine (15:0 Lyso PC),
[3108] 1-palmitoyl-2-hydroxy-sn-glycero-3-phosphocholine (16:0 Lyso PC),
[3109] 1-heptadecanoyl-2-hydroxy-sn-glycero-3-phosphocholine (17:0 Lyso PC),
[3110] 1-stearoyl-2-hydroxy-sn-glycero-3-phosphocholine (18:0 Lyso PC),
[3111] 1-oleoyl-2-hydroxy-sn-glycero-3-phosphocholine (18:1 Lyso PC),
[3112] 1-nonadecanoyl-2-hydroxy-sn-glycero-3-phosphocholine (19:0 Lyso PC),
[3113] 1-arachidoyl-2-hydroxy-sn-glycero-3-phosphocholine (20:0 Lyso PC),
[3114] 1-behenoyl-2-hydroxy-sn-glycero-3-phosphocholine (22:0 Lyso PC),
[3115] 1-lignoceroyl-2-hydroxy-sn-glycero-3-phosphocholine (24:0 Lyso PC),
[3116] 1-hexacosanoyl-2-hydroxy-sn-glycero-3-phosphocholine (26:0 Lyso PC),
[3117] 1-myristoyl-2-hydroxy-sn-glycero-3-phosphoethanolamine (14:0 Lyso PE),
[3118] 1-palmitoyl-2-hydroxy-sn-glycero-3-phosphoethanolamine (16:0 Lyso PE),
[3119] 1-stearoyl-2-hydroxy-sn-glycero-3-phosphoethanolamine (18:0 Lyso PE),
[3120] 1-oleoyl-2-hydroxy-sn-glycero-3-phosphoethanolamine (18:1 Lyso PE),
[3121] 1-hexadecyl-sn-glycero-3-phosphocholine (C16 Lyso PC), and
[3122] any combination thereof.

[3123] In some embodiment, the lipid composition of a pharmaceutical composition disclosed herein comprises at least one asymmetric phospholipid selected from the group consisting of MPPC, MSPC, PMPC, PSPC, SMPC, SPPC, and any combination thereof. In some embodiments, the asymmetric phospholipid is 1-myristoyl-2-stearoyl-sn-glycero-3-phosphocholine (MSPC).

[3124] In some embodiments, the lipid compositions disclosed herein may contain one or more symmetric phospholipids, one or more asymmetric phospholipids, or a combination thereof. When multiple phospholipids are present, they can be present in equimolar ratios, or non-equimolar ratios.

[3125] In one embodiment, the lipid composition of a pharmaceutical composition disclosed herein comprises a total amount of phospholipid (e.g., MSPC) which ranges from about 1 mol % to about 20 mol %, from about 5 mol % to about 20 mol %, from about 10 mol % to about 20 mol %, from about 15 mol % to about 20 mol %, from about 1 mol % to about 15 mol %, from about 5 mol % to about 15 mol %, from about 10 mol % to about 15 mol %, from about 5 mol % to about 10 mol % in the lipid composition. In one embodiment, the amount of the phospholipid is from about 8 mol % to about 15 mol % in the lipid composition. In one embodiment, the amount of the phospholipid (e.g., MSPC) is about 10 mol % in the lipid composition.

[3126] In some aspects, the amount of a specific phospholipid (e.g., MSPC) is at least about 1, 2, 3, 4, 5, 6, 7, 8, 9, 10, 11, 12, 13, 14, 15, 16, 17, 18, 19 or 20 mol % in the lipid composition.

### B. Quaternary Amine Compounds

[3127] The lipid composition of a pharmaceutical composition disclosed herein can comprise one or more quaternary amine compounds (e.g., DOTAP). The term “quaternary amine compound” is used to include those compounds having one or more quaternary amine groups (e.g., trialkylamino groups) and permanently carrying a positive charge and existing in a form of a salt. For example, the one or more quaternary amine groups can be present in a lipid or a polymer (e.g., PEG). In some embodiments, the quaternary amine compound comprises (1) a quaternary amine group and (2) at least one hydrophobic tail group comprising (i) a hydrocarbon chain, linear or branched, and saturated or unsaturated, and (ii) optionally an ether, ester, carbonyl, or ketal linkage between the quaternary amine group and the hydrocarbon chain. In some embodiments, the quaternary amine group can be a trimethylammonium group. In some embodiments, the quatemary amine compound comprises two identical hydrocarbon chains. In some embodiments, the quaternary amine compound comprises two different hydrocarbon chains.

[3128] In some embodiments, the lipid composition of a pharmaceutical composition disclosed herein comprises at least one quaternary amine compound. Quaternary amine compound may be selected from the non-limiting group consisting of
[3129] 1,2-dioleoyl-3-trimethylammonium-propane (DOTAP),
[3130] N-[1-(2,3-dioleoyloxy)propyl]-N,N,N-trimethylammonium chloride (DOTMA),
[3131] 1-[2-(oleoyloxy)ethyl]-2-oleyl-3-(2-hydroxyethyl)imidazolinium chloride (DOTIM),
[3132] 2,3-dioleyloxy-N-[2(sperminecarboxamido)ethyl]-N,N-dimethyl-1-propanaminium trifluoroacetate (DOSPA),
[3133] N,N-distearyl-N,N-dimethylammonium bromide (DDAB),
[3134] N-(1,2-dimyristyloxyprop-3-yl)-N,N-dimethyl-N-hy droxyethyl ammonium bromide (DMRIE),
[3135] N-(1,2-dioleoyloxyprop-3-yl)-N,N-dimethyl-N-hy droxyethyl ammonium bromide (DORIE),
[3136] N,N-dioleyl-N,N-dimethylammonium chloride (DODAC),
[3137] 1,2-dilauroyl-sn-glycero-3-ethylphosphocholine (DLePC),
[3138] 1,2-distearoyl-3-trimethylammonium-propane (DSTAP),
[3139] 1,2-dipalmitoyl-3-trimethylammonium-propane (DPTAP),
[3140] 1,2-dilinoleoyl-3-trimethylammonium-propane (DLTAP),
[3141] 1,2-dimyristoyl-3-trimethylammonium-propane (DMTAP) 1,2-distearoyl -sn-glycero-3-ethylphosphocholine (DSePC)
[3142] 1,2-dipalmitoyl-sn-glycero-3-ethylphosphocholine (DPePC),
[3143] 1,2-dimyristoyl -sn-glycero-3-ethylphosphocholine (DMePC),
[3144] 1,2-dioleoyl-sn-glycero-3-ethylphosphocholine (DOePC),
[3145] 1,2-di-(9Z-tetradecenoyl)-sn-glycero-3-ethylphosphocholine (14:1 EPC),
[3146] 1-palmitoyl-2-oleoyl-sn-glycero-3-ethylphosphocholine (16:0-18:1 EPC),
[3147] and any combination thereof.

[3148] In one embodiment, the quaternary amine compound is 1,2-dioleoyl-3-trimethylammonium-propane (DOTAP).

[3149] Quaternary amine compounds are known in the art, such as those described in U.S. Patent Appl. Publ. Nos. US2013/0245107 and US2014/0363493, U.S. Pat. No. 8,158,601, and Int'l. Publ. Nos. WO2015/123264 and WO2015/148247, which are incorporated herein by reference in their entireties.

[3150] In one embodiment, the amount of the quaternary amine compound (e.g., DOTAP) in the lipid composition disclosed herein ranges from about 0.01 mol % to about 20 mol %.

[3151] In one embodiment, the amount of the quaternary amine compound (e.g., DOTAP) in the lipid composition disclosed herein ranges from about 0.5 mol % to about 20 mol %, from about 0.5 mol % to about 15 mol %, from about 0.5 mol % to about 10 mol %, from about 1 mol % to about 20 mol %, from about 1 mol % to about 15 mol %, from about 1 mol % to about 10 mol %, from about 2 mol % to about 20 mol %, from about 2 mol % to about 15 mol %, from about 2 mol % to about 10 mol %, from about 3 mol % to about 20 mol %, from about 3 mol % to about 15 mol %, from about 3 mol % to about 10 mol %, from about 4 mol % to about 20 mol %, from about 4 mol % to about 15 mol %, from about 4 mol % to about 10 mol %, from about 5 mol % to about 20 mol %, from about 5 mol % to about 15 mol %, from about 5 mol % to about 10 mol %, from about 6 mol % to about 20 mol %, from about 6 mol % to about 15 mol %, from about 6 mol % to about 10 mol %, from about 7 mol % to about 20 mol %, from about 7 mol % to about 15 mol %, from about 7 mol % to about 10 mol %, from about 8 mol % to about 20 mol %, from about 8 mol % to about 15 mol %, from about 8 mol % to about 10 mol %, from about 9 mol % to about 20 mol %, from about 9 mol % to about 15 mol %, from about 9 mol % to about 10 mol %.

[3152] In one embodiment, the amount of the quaternary amine compound (e.g., DOTAP) in the lipid composition disclosed herein ranges from about 5 mol % to about 10 mol %.

[3153] In one embodiment, the amount of the quaternary amine compound (e.g., DOTAP) in the lipid composition disclosed herein is about 5 mol %. In one embodiment, the amount of the quaternary amine compound (e.g., DOTAP) in the lipid composition disclosed herein is about 10 mol %.

[3154] In some embodiments, the amount of the quatemary amine compound (e.g., DOTAP) is at least about 0.01, 0.02, 0.03, 0.04, 0.05, 0.06, 0.07, 0.08, 0.09, 0.1, 0.2, 0.3, 0.4, 0.5, 0.6, 0.7, 0.8, 0.9, 1, 1.5, 2, 2.5, 3, 3.5, 4, 4.5, 5, 5.5, 6, 6.5, 7, 7.5, 8, 8.5, 9, 9.5, 10, 10.5, 11, 11.5, 12, 12.5, 13, 13.5, 14, 14.5, 15, 15.5, 16, 16.5, 17, 17.5, 18, 18.5, 19, 19.5 or 20 mol % in the lipid composition disclosed herein.

[3155] In one embodiment, the mole ratio of the compound of formula (I) (e.g., Compounds 18, 25, 26 or 48) to the quatemary amine compound (e.g., DOTA) is about 100:1 to about 2.5:1. In one embodiment, the mole ratio of the compound of formula (I) (e.g., Compounds 18, 25, 26 or 48) to the quaternary amine compound (e.g., DOTAP) is about 90:1, about 80:1, about 70:1, about 60:1, about 50:1, about 40:1, about 30:1, about 20:1, about 15:1, about 10:1, about 9:1, about 8:1, about 7:1, about 6:1, about 5:1, or about 2.5:1. In one embodiment, the mole ratio of the compound of formula (I) (e.g., Compounds 18, 25, 26 or 48) to the quaternary amine compound (e.g., DOTAP) in the lipid composition disclosed herein is about 10:1.

[3156] In some aspects, the lipid composition the pharmaceutical compositions disclosed herein does not comprise a quaternary amine compound. In some aspects, the lipid composition of the pharmaceutical compositions disclosed does not comprise DOTAP. C. Structural Lipids

[3157] The lipid composition of a pharmaceutical composition disclosed herein can comprise one or more structural lipids. As used herein, the term “structural lipid” refers to sterols and also to lipids containing sterol moieties. In some embodiments, the structural lipid is selected from the group consisting of cholesterol, fecosterol, sitosterol, ergosterol, campesterol, stigmasterol, brassicasterol, tomatidine, tomatine, ursolic acid, alpha-tocopherol, and mixtures thereof. In some embodiments, the structural lipid is cholesterol.

[3158] In one embodiment, the amount of the structural lipid (e.g., an sterol such as cholesterol) in the lipid composition of a pharmaceutical composition disclosed herein ranges from about 20 mol % to about 60 mol %, from about 25 mol % to about 55 mol %, from about 30 mol % to about 50 mol %, or from about 35 mol % to about 45 mol %.

[3159] In one embodiment, the amount of the structural lipid (e.g., an sterol such as cholesterol) in the lipid composition disclosed herein ranges from about 25 mol % to about 30 mol %, from about 30 mol % to about 35 mol %, or from about 35 mol % to about 40 mol %.

[3160] In one embodiment, the amount of the structural lipid (e.g., a sterol such as cholesterol) in the lipid composition disclosed herein is about 23.5 mol %, about 28.5 mol %, about 33.5 mol %, or about 38.5 mol %.

[3161] In some embodiments, the amount of the structural lipid (e.g., an sterol such as cholesterol) in the lipid composition disclosed herein is at least about 20, 21, 22, 23, 24, 25, 26, 27, 28, 29, 30, 31, 32, 33, 34, 35, 36, 37, 38, 39, 40, 41, 42, 43, 44, 45, 46, 47, 48, 49, 50, 51, 52, 53, 54, 55, 56, 57, 58, 59, or 60 mol %.

[3162] In some aspects, the lipid composition component of the pharmaceutical compositions for intratumoral delivery disclosed does not comprise cholesterol. D. Polyethylene Glycol (PEG)-Lipids

[3163] The lipid composition of a pharmaceutical composition disclosed herein can comprise one or more a polyethylene glycol (PEG) lipid.

[3164] As used herein, the term “PEG-lipid” refers to polyethylene glycol (PEG)-modified lipids. Non-limiting examples of PEG-lipids include PEG-modified phosphatidylethanolamine and phosphatidic acid, PEG-ceramide conjugates (e.g., PEG-CerC14 or PEG-CerC20), PEG-modified dialkylamines and PEG-modified 1,2-diacyloxypropan-3-amines. Such lipids are also referred to as PEGylated lipids. For example, a PEG lipid may be PEG-c-DOMG, PEG-DMG, PEG-DLPE, PEG-DMPE, PEG-DPPC, or a PEG-DSPE lipid.

[3165] In some embodiments, the PEG-lipid includes, but not limited to 1,2-dimyristoyl-sn-glycerol methoxypolyethylene glycol (PEG-DMG), 1,2-distearoyl-sn-glycero-3-phosphoethanolamine-N-[amino(polyethylene glycol)] (PEG-DSPE), PEG-disteryl glycerol (PEG-DSG), PEG-dipalmetoleyl, PEG-dioleyl, PEG-distearyl, PEG-diacylglycamide (PEG-DAG), PEG-dipalmitoyl phosphatidylethanolamine (PEG-DPPE), or PEG-1,2-dimyristyloxlpropyl-3-amine (PEG-c-DMA).

[3166] In one embodiment, the PEG-lipid is selected from the group consisting of a PEG-modified phosphatidylethanolamine, a PEG-modified phosphatidic acid, a PEG-modified ceramide, a PEG-modified dialkylamine, a PEG-modified diacylglycerol, a PEG-modified dialkylglycerol, and mixtures thereof.

[3167] In some embodiments, the lipid moiety of the PEG-lipids includes those having lengths of from about C₁₄ to about C₂₂, preferably from about C₁₄ to about C₁₆. In some embodiments, a PEG moiety, for example an mPEG-NH₂, has a size of about 1000, 2000, 5000, 10,000, 15,000 or 20,000 daltons. In one embodiment, the PEG-lipid is PEG2k-DMG.

[3168] In one embodiment, the lipid nanoparticles described herein may comprise a PEG lipid which is a non-diffusible PEG. Non-limiting examples of non-diffusible PEGs include PEG-DSG and PEG-DSPE.

[3169] PEG-lipids are known in the art, such as those described in U.S. Pat. No. 8,158,601 and International Publ. No. WO2015/130584, which are incorporated herein by reference in their entirety.

[3170] In one embodiment, the amount of PEG-lipid in the lipid composition of a pharmaceutical composition disclosed herein ranges from about 0.1 mol % to about 5 mol %, from about 0.5 mol % to about 5 mol %, from about 1 mol % to about 5 mol %, from about 1.5 mol % to about 5 mol %, from about 2 mol % to about 5 mol % mol %, from about 0.1 mol % to about 4 mol %, from about 0.5 mol % to about 4 mol %, from about 1 mol % to about 4 mol %, from about 1.5 mol % to about 4 mol %, from about 2 mol % to about 4 mol %, from about 0.1 mol % to about 3 mol %, from about 0.5 mol % to about 3 mol %, from about 1 mol % to about 3 mol %, from about 1.5 mol % to about 3 mol %, from about 2 mol % to about 3 mol %, from about 0.1 mol % to about 2 mol %, from about 0.5 mol % to about 2 mol %, from about 1 mol % to about 2 mol %, from about 1.5 mol % to about 2 mol %, from about 0.1 mol % to about 1.5 mol %, from about 0.5 mol % to about 1.5 mol %, or from about 1 mol % to about 1.5 mol %.

[3171] In one embodiment, the amount of PEG-lipid in the lipid composition disclosed herein is about 1.5 mol %.

[3172] In one embodiment, the amount of PEG-lipid in the lipid composition disclosed herein is at least about 0.1, 0.2, 0.3, 0.4, 0.5, 0.6, 0.7, 0.8, 0.9, 1, 1.1, 1.2, 1.3, 1.4, 1.5, 1.6, 1.7, 1.8, 1.9, 2, 2.1, 2.2, 2.3, 2.4, 2.5, 2.6, 2.7, 2.8, 2.9, 3, 3.1, 3.2, 3.3, 3.4, 3.5, 3.6, 3.7, 3.8, 3.9, 4, 4.1, 4.2, 4.3, 4.4, 4.5, 4.6, 4.7, 4.8, 4.9, or 5 mol %.

[3173] In some aspects, the lipid composition of the pharmaceutical compositions disclosed herein does not comprise a PEG-lipid.

[3174] In some embodiments, the lipid composition disclosed herein comprises a compound of formula (I) and an asymmetric phospholipid. In some embodiments, the lipid composition comprises compound 18 and MSPC.

[3175] In some embodiments, the lipid composition disclosed herein comprises a compound of formula (I) and a quaternary amine compound. In some embodiments, the lipid composition comprises compound 18 and DOTAP.

[3176] In some embodiments, the lipid composition disclosed herein comprises a compound of formula (I), an asymmetric phospholipid, and a quaternary amine compound. In some embodiments, the lipid composition comprises compound 18, MSPC and DOTAP.

[3177] In one embodiment, the lipid composition comprises about 50 mol % of a compound of formula (I) (e.g. Compounds 18, 25, 26 or 48), about 10 mol % of DSPC or MSPC, about 33.5 mol % of cholesterol, about 1.5 mol % of PEG-DMG, and about 5 mol % of DOTAP. In one embodiment, the lipid composition comprises about 50 mol % of a compound of formula (I) (e.g. Compounds 18, 25, 26 or 48), about 10 mol % of DSPC or MSPC, about 28.5 mol % of cholesterol, about 1.5 mol % of PEG-DMG, and about 10 mol % of DOTAP.

[3178] The components of the lipid nanoparticle may be tailored for optimal delivery of the polynucleotides based on the desired outcome. As a non-limiting example, the lipid nanoparticle may comprise 40-60 mol % a compound of formula (I), 8-16 mol % phospholipid, 30-45 mol % cholesterol, 1-5 mol % PEG lipid, and optionally 1-15 mol % quaternary amine compound.

[3179] In some embodiments, the lipid nanoparticle may comprise 45-65 mol % of a compound of formula (I), 5-10 mol % phospholipid, 25-40 mol % cholesterol, 0.5-5 mol % PEG lipid, and optionally 1-15 mol % quaternary amine compound.

[3180] Non-limiting examples of nucleic acid lipid particles are disclosed in U.S. Patent Publication No. 20140121263, herein incorporated by reference in its entirety. E. Other Ionizable Amino Lipids

[3181] The lipid composition of the pharmaceutical composition disclosed herein can comprise one or more ionizable amino lipids in addition to a lipid according to formula (I).

[3182] Ionizable lipids may be selected from the non-limiting group consisting of
[3183] 3-(didodecylamino)-N1,N1,4-tridodecyl-1-piperazineethanamine (KL10),
[3184] N1-[2-(didodecylamino)ethyl]-N1,N4,N4-tridodecyl-1,4-piperazinediethanamine (KL22),
[3185] 14,25-ditridecyl-15,18,21,24-tetraaza-octatriacontane (KL25),
[3186] 1,2-dilinoleyloxy-N,N-dimethylaminopropane (DLin-DMA),
[3187] 2,2-dilinoleyl-4-dimethylaminomethyl-[1,3]-dioxolane (DLin-K-DMA),
[3188] heptatriaconta-6,9,28,31-tetraen-19-yl 4-(dimethylamino)butanoate (DLin-MC3-DMA),
[3189] 2,2-dilinoleyl-4-(2-dimethylaminoethyl)-[1,3]-dioxolane (DLin-KC2-DMA),
[3190] 1,2-dioleyloxy-N,N-dimethylaminopropane (DODMA), (13Z, 165Z)-N,N-dimethyl-3-nonydocosa-13-16-dien-1-amine (L608),
[3191] 2-({8-[(3β)-cholest-5-en-3-yloxy]octyl}oxy)-N,N-dimethyl-3-[(9Z,12Z)-octadeca-9,12-die n-1-yloxy]propan-1-amine (Octyl-CLinDMA),
[3192] (2R)-2-({8-[(3β)-cholest-5-en-3-yloxy]octyl}oxy)-N,N-dimethyl-3-[(9Z,12Z)-octadeca-9,1 2-dien-1-yloxy]propan-1-amine (Octyl-CLinDMA (2R)), and
[3193] (2S)-2-({8-[(3β)-cholest-5-en-3-yloxy]octyl}oxy)-N,N-dimethyl-3-[(9Z,12Z)-octadeca-9,1 2-dien-1-yloxy]propan-1-amine (Octyl-CLinDMA (2S)). In addition to these, an ionizable amino lipid may also be a lipid including a cyclic amine group.

[3194] Ionizable lipids can also be the compounds disclosed in International Publication No. WO2015/199952 (see also US20150376115), hereby incorporated by reference in their entirety. For example, the ionizable amino lipids include, but not limited to:

[chemical structure]

[chemical structure]

and any combination thereof.

### F. Other Lipid Composition Components

[3195] The lipid composition of a pharmaceutical composition disclosed herein may include one or more components in addition to those described above. For example, the lipid composition may include one or more permeability enhancer molecules, carbohydrates, polymers, surface altering agents (e.g., surfactants), or other components. For example, a permeability enhancer molecule may be a molecule described by U.S. Patent Application Publication No. 2005/0222064. Carbohydrates may include simple sugars (e.g., glucose) and polysaccharides (e.g., glycogen and derivatives and analogs thereof). The lipid composition may include a buffer such as, but not limited to, citrate or phosphate at a pH of 7, salt and/or sugar. Salt and/or sugar may be included in the formulations described herein for isotonicity.

[3196] A polymer may be included in and/or used to encapsulate or partially encapsulate a pharmaceutical composition disclosed herein (e.g., a pharmaceutical composition in lipid nanoparticle form). A polymer may be biodegradable and/or biocompatible. A polymer may be selected from, but is not limited to, polyamines, polyethers, polyamides, polyesters, polycarbamates, polyureas, polycarbonates, polystyrenes, polyimides, polysulfones, polyurethanes, polyacetylenes, polyethylenes, polyethyleneimines, polyisocyanates, polyacrylates, polymethacrylates, polyacrylonitriles, and polyarylates.

[3197] The ratio between the lipid composition and the polynucleotide range from about 10:1 to about 60:1 (wt/wt).

[3198] In some embodiments, the ratio between the lipid composition and the polynucleotide can be about 10:1, 11:1, 12:1, 13:1, 14:1, 15:1, 16:1, 17:1, 18:1, 19:1, 20:1, 21:1, 22:1, 23:1, 24:1, 25:1, 26:1, 27:1, 28:1, 29:1, 30:1, 31:1, 32:1, 33:1, 34:1, 35:1, 36:1, 37:1, 38:1, 39:1, 40:1, 41:1, 42:1, 43:1, 44:1, 45:1, 46:1, 47:1, 48:1, 49:1, 50:1, 51:1, 52:1, 53:1, 54:1, 55:1, 56:1, 57:1, 58:1, 59:1 or 60:1 (wt/wt). In some embodiments, the wt/wt ratio of the lipid composition to the polynucleotide comprising an mRNA encoding an IL23 polypeptide, the polynucleotide comprising an mRNA encoding an IL36-gamma polypeptide, or the polynucleotide comprising an mRNA encoding an OX40L polypeptide, is about 20:1 or about 15:1.

[3199] In some embodiments, the pharmaceutical composition disclosed herein can contain more than one polypeptides, e.g., two, three or more polypeptides. For example, a pharmaceutical composition disclosed herein can contain two, three, or more polynucleotides (e.g., mRNA).

[3200] In one embodiment, the lipid nanoparticles described herein may comprise polynucleotides (e.g., mRNA) in a lipid:polynucleotide weight ratio of 5:1, 10:1, 15:1, 20:1, 25:1, 30:1, 35:1, 40:1, 45:1, 50:1, 55:1, 60:1 or 70:1, or a range or any of these ratios such as, but not limited to, 5:1 to about 10:1, from about 5:1 to about 15:1, from about 5:1 to about 20:1, from about 5:1 to about 25:1, from about 5:1 to about 30:1, from about 5:1 to about 35:1, from about 5:1 to about 40:1, from about 5:1 to about 45:1, from about 5:1 to about 50:1, from about 5:1 to about 55:1, from about 5:1 to about 60:1, from about 5:1 to about 70:1, from about 10:1 to about 15:1, from about 10:1 to about 20:1, from about 10:1 to about 25:1, from about 10:1 to about 30:1, from about 10:1 to about 35:1, from about 10:1 to about 40:1, from about 10:1 to about 45:1, from about 10:1 to about 50:1, from about 10:1 to about 55:1, from about 10:1 to about 60:1, from about 10:1 to about 70:1, from about 15:1 to about 20:1, from about 15:1 to about 25:1,from about 15:1 to about 30:1, from about 15:1 to about 35:1, from about 15:1 to about 40:1, from about 15:1 to about 45:1, from about 15:1 to about 50:1, from about 15:1 to about 55:1, from about 15:1 to about 60:1 or from about 15:1 to about 70:1.

[3201] In one embodiment, the lipid nanoparticles described herein may comprise the polynucleotide in a concentration from approximately 0.1 mg/ml to 2 mg/ml such as, but not limited to, 0.1 mg/ml, 0.2 mg/ml, 0.3 mg/ml, 0.4 mg/ml, 0.5 mg/ml, 0.6 mg/ml, 0.7 mg/ml, 0.8 mg/ml, 0.9 mg/ml, 1.0 mg/ml, 1.1 mg/ml, 1.2 mg/ml, 1.3 mg/ml, 1.4 mg/ml, 1.5 mg/ml, 1.6 mg/ml, 1.7 mg/ml, 1.8 mg/ml, 1.9 mg/ml, 2.0 mg/ml or greater than 2.0 mg/ml.

[3202] In one embodiment, formulations comprising the polynucleotides and lipid nanoparticles described herein may comprise 0.15 mg/ml to 2 mg/ml of the polynucleotide described herein (e.g., mRNA). In some embodiments, the formulation may further comprise 10 mM of citrate buffer and the formulation may additionally comprise up to 10% w/w of sucrose (e.g., at least 1% w/w, at least 2% w/w/, at least 3% w/w, at least 4% w/w, at least 5% w/w, at least 6% w/w, at least 7% w/w, at least 8% w/w, at least 9% w/w or 10% w/w).

### Nanoparticle Compositions

[3203] In some embodiments, the pharmaceutical compositions disclosed herein are formulated as lipid nanoparticles (LNP). Accordingly, the present disclosure also provides nanoparticle compositions comprising
[3204] (i) a lipid composition comprising a compound of formula (I) as described herein; and,
[3205] (ii) at least two polynucleotides in combination (combination therapy), wherein the at least two polynucleotides are selected from the group consisting of (i) a polynucleotide encoding an immune response primer; (ii) a polynucleotide encoding an immune response co-stimulatory signal; (iii) a polynucleotide encoding a checkpoint inhibitor or a polypeptide checkpoint inhibitor; and, (iv) a combination thereof.

[3206] In the nanoparticle compositions disclosed herein, the lipid composition herein can encapsulate (i) a polynucleotide encoding an immune response primer; (ii) a polynucleotide encoding an immune response co-stimulatory signal; (iii) a polynucleotide encoding a checkpoint inhibitor or a polypeptide checkpoint inhibitor; and, (iv) a combination thereof.

[3207] In one particular embodiment, the different components of the combination therapy (i.e., at least two polynucleotides, wherein the at least two polynucleotides are selected from the group consisting of (i) a polynucleotide encoding an immune response primer; (ii) a polynucleotide encoding an immune response co-stimulatory signal; (iii) a polynucleotide encoding a checkpoint inhibitor or a polypeptide checkpoint inhibitor; and, (iv) a combination thereof) are encapsulated separately (i.e., each type of mRNA encapsulated in a population of nanoparticles). For example, in an embodiment, the polynucleotide comprising an mRNA encoding an immune response primer (e.g., an IL23 polypeptide), the polynucleotide comprising an mRNA encoding an immune response co-stimulatory signal (e.g., an OX40L polypeptide), and the polynucleotide comprising an mRNA encoding a checkpoint inhibitor (e.g., an anti-CTLA-4 antibody) are encapsulated separately (i.e., in three populations of nanoparticles).

[3208] In one particular embodiment, the different components of the combination therapy (i.e., at least two polynucleotides, wherein the at least two polynucleotides are selected from the group consisting of (i) a polynucleotide encoding an immune response primer; (ii) a polynucleotide encoding an immune response co-stimulatory signal; (iii) a polynucleotide encoding a checkpoint inhibitor or a polypeptide checkpoint inhibitor; and, (iv) a combination thereof) are encapsulated together (i.e., in a single population of nanoparticles). For example, in an embodiment, the polynucleotide comprising an mRNA encoding an immune response primer, the polynucleotide comprising an mRNA encoding an immune response co-stimulatory signal, and the polynucleotide comprising an mRNA encoding a checkpoint inhibitor are encapsulated together (i.e., in a single population of nanoparticles).

[3209] Nanoparticle compositions are typically sized on the order of micrometers or smaller and may include a lipid bilayer. Nanoparticle compositions encompass lipid nanoparticles (LNPs), liposomes (e.g., lipid vesicles), and lipoplexes. For example, a nanoparticle composition may be a liposome having a lipid bilayer with a diameter of 500 nm or less.

[3210] Nanoparticle compositions include, for example, lipid nanoparticles (LNPs), liposomes, and lipoplexes. In some embodiments, nanoparticle compositions are vesicles including one or more lipid bilayers. In certain embodiments, a nanoparticle composition includes two or more concentric bilayers separated by aqueous compartments. Lipid bilayers may be functionalized and/or crosslinked to one another. Lipid bilayers may include one or more ligands, proteins, or channels.

[3211] In some embodiments, a lipid nanoparticle (LNP) may comprise an ionizable lipid. As used herein, the term “ionizable lipid” has its ordinary meaning in the art and may refer to a lipid comprising one or more charged moieties. In some embodiments, an ionizable lipid may be positively charged or negatively charged. An ionizable lipid may be positively charged, in which case it can be referred to as “cationic lipid”. For example, an ionizable molecule may comprise an amine group, referred to as ionizable amino lipids. As used herein, a “charged moiety” is a chemical moiety that carries a formal electronic charge, e.g., monovalent (+1, or -1), divalent (+2, or -2), trivalent (+3, or -3), etc. The charged moiety may be anionic (i.e., negatively charged) or cationic (i.e., positively charged). Examples of positively-charged moieties include amine groups (e.g., primary, secondary, and/or tertiary amines), ammonium groups, pyridinium group, guanidine groups, and imidizolium groups. In a particular embodiment, the charged moieties comprise amine groups. Examples of negatively-charged groups or precursors thereof, include carboxylate groups, sulfonate groups, sulfate groups, phosphonate groups, phosphate groups, hydroxyl groups, and the like. The charge of the charged moiety may vary, in some cases, with the environmental conditions, for example, changes in pH may alter the charge of the moiety, and/or cause the moiety to become charged or uncharged. In general, the charge density of the molecule may be selected as desired.

[3212] It should be understood that the terms “charged” or “charged moiety” does not refer to a “partial negative charge” or “partial positive charge” on a molecule. The terms “partial negative charge” and “partial positive charge” are given its ordinary meaning in the art. A “partial negative charge” may result when a functional group comprises a bond that becomes polarized such that electron density is pulled toward one atom of the bond, creating a partial negative charge on the atom. Those of ordinary skill in the art will, in general, recognize bonds that can become polarized in this way.

[3213] In some embodiments, the ionizable lipid is an ionizable amino lipid, sometimes referred to in the art as an “ionizable cationic lipid”. In one embodiment, the ionizable amino lipid may have a positively charged hydrophilic head and a hydrophobic tail that are connected via a linker structure.

[3214] Nanoparticle compositions of the present disclosure comprise at least one compound according to formula (I). For example, the nanoparticle composition can include one or more of Compounds 1-147. Nanoparticle compositions can also include a variety of other components. For example, the nanoparticle composition may include one or more other lipids in addition to a lipid according to formula (I) or (II), for example (i) at least one phospholipid, (ii) at least one quaternary amine compound, (iii) at least one structural lipid, (iv) at least one PEG-lipid, or (v) any combination thereof.

[3215] In some embodiments, the nanoparticle composition comprises a compound of formula (I), (e.g., Compounds 18, 25, 26 or 48). In some embodiments, the nanoparticle composition comprises a compound of formula (I) (e.g., Compounds 18, 25, 26 or 48) and a phospholipid (e.g., DSPC or MSPC). In some embodiments, the nanoparticle composition comprises a compound of formula (I) (e.g., Compounds 18, 25, 26 or 48), a phospholipid (e.g., DSPC or MSPC), and a quaternary amine compound (e.g., DOTAP). In some embodiments, the nanoparticle composition comprises a compound of formula (I) (e.g., Compounds 18, 25, 26 or 48), and a quaternary amine compound (e.g., DOTAP).

[3216] In some embodiments, the nanoparticle composition comprises a lipid composition consisting or consisting essentially of compound of formula (I) (e.g., Compounds 18, 25, 26 or 48). In some embodiments, the nanoparticle composition comprises a lipid composition consisting or consisting essentially of a compound of formula (I) (e.g., Compounds 18, 25, 26 or 48) and a phospholipid (e.g., DSPC or MSPC). In some embodiments, the nanoparticle composition comprises a lipid composition consisting or consisting essentially of a compound of formula (I) (e.g., Compounds 18, 25, 26 or 48), a phospholipid (e.g., DSPC or MSPC), and a quaternary amine compound (e.g., DOTAP). In some embodiments, the nanoparticle composition comprises a lipid composition consisting or consisting essentially of a compound of formula (I) (e.g., Compounds 18, 25, 26 or 48), and a quaternary amine compound (e.g., DOTAP).

[3217] In one embodiment, the nanoparticle composition comprises (1) a lipid composition comprising about 50 mole % of a compound of formula (I) (e.g., Compounds 18, 25, 26 or 48); about 10 mole % of DSPC or MSPC; about 33.5 mole % of cholesterol; about 1.5 mole % of PEG-DMG (e.g., PEG2k-DMG); about 5 mole % of DOTAP; and (2) at least one polynucleotide.

[3218] In one embodiment, the nanoparticle composition comprises (1) a lipid composition comprising about 50 mole % of a compound of formula (I) (e.g., Compounds 18, 25, 26 or 48); about 10 mole % of DSPC or MSPC; about 28.5 mole % of cholesterol; about 1.5 mole % of PEG-DMG (e.g., PEG2k-DMG); about 10 mole % of DOTAP; and (2) at least one polynucleotide.

[3219] In one embodiment, the nanoparticle composition comprises (1) a lipid composition comprising about 50 mole % of a compound of formula (I) (e.g., Compounds 18, 25, 26 or 48); about 10 mole % of DSPC or MSPC; about 23.5 mole % of cholesterol; about 1.5 mole % of PEG-DMG (e.g., PEG2k-DMG); about 15 mole % of DOTAP; and (2) at least one polynucleotide.

[3220] Nanoparticle compositions may be characterized by a variety of methods. For example, microscopy (e.g., transmission electron microscopy or scanning electron microscopy) may be used to examine the morphology and size distribution of a nanoparticle composition. Dynamic light scattering or potentiometry (e.g., potentiometric titrations) may be used to measure zeta potentials. Dynamic light scattering may also be utilized to determine particle sizes. Instruments such as the Zetasizer Nano ZS (Malvern Instruments Ltd, Malvern, Worcestershire, UK) may also be used to measure multiple characteristics of a nanoparticle composition, such as particle size, polydispersity index, and zeta potential.

[3221] The size of the nanoparticles can help counter biological reactions such as, but not limited to, inflammation, or can increase the biological effect of the polynucleotide or polynucleotides.

[3222] As used herein, “size” or “mean size” in the context of nanoparticle compositions refers to the mean diameter of a nanoparticle composition.

[3223] In one embodiment, the polynucleotides of any of the combination therapies disclosed herein, e.g., an mRNA encoding an immune response primer polypeptide, an mRNA encoding an immune response co-stimulatory signal polypeptide, an mRNA encoding a checkpoint inhibitor polypeptide, or a combination thereof, are formulated in lipid nanoparticles. In some aspects, the lipid nanoparticles have a diameter from about 10 to about 100 nm such as, but not limited to, about 10 to about 20 nm, about 10 to about 30 nm, about 10 to about 40 nm, about 10 to about 50 nm, about 10 to about 60 nm, about 10 to about 70 nm, about 10 to about 80 nm, about 10 to about 90 nm, about 20 to about 30 nm, about 20 to about 40 nm, about 20 to about 50 nm, about 20 to about 60 nm, about 20 to about 70 nm, about 20 to about 80 nm, about 20 to about 90 nm, about 20 to about 100 nm, about 30 to about 40 nm, about 30 to about 50 nm, about 30 to about 60 nm, about 30 to about 70 nm, about 30 to about 80 nm, about 30 to about 90 nm, about 30 to about 100 nm, about 40 to about 50 nm, about 40 to about 60 nm, about 40 to about 70 nm, about 40 to about 80 nm, about 40 to about 90 nm, about 40 to about 100 nm, about 50 to about 60 nm, about 50 to about 70 nm, about 50 to about 80 nm, about 50 to about 90 nm, about 50 to about 100 nm, about 60 to about 70 nm, about 60 to about 80 nm, about 60 to about 90 nm, about 60 to about 100 nm, about 70 to about 80 nm, about 70 to about 90 nm, about 70 to about 100 nm, about 80 to about 90 nm, about 80 to about 100 nm and/or about 90 to about 100 nm.

[3224] In one embodiment, the nanoparticles have a diameter from about 10 to 500 nm. In one embodiment, the nanoparticle has a diameter greater than 100 nm, greater than 150 nm, greater than 200 nm, greater than 250 nm, greater than 300 nm, greater than 350 nm, greater than 400 nm, greater than 450 nm, greater than 500 nm, greater than 550 nm, greater than 600 nm, greater than 650 nm, greater than 700 nm, greater than 750 nm, greater than 800 nm, greater than 850 nm, greater than 900 nm, greater than 950 nm or greater than 1000 nm.

[3225] In some embodiments, the largest dimension of a nanoparticle composition is 1 μm or shorter (e.g., 1 μm, 900 nm, 800 nm, 700 nm, 600 nm, 500 nm, 400 nm, 300 nm, 200 nm, 175 nm, 150 nm, 125 nm, 100 nm, 75 nm, 50 nm, or shorter).

[3226] A nanoparticle composition may be relatively homogenous. A polydispersity index may be used to indicate the homogeneity of a nanoparticle composition, e.g., the particle size distribution of the nanoparticle composition. A small (e.g., less than 0.3) polydispersity index generally indicates a narrow particle size distribution. A nanoparticle composition may have a polydispersity index from about 0 to about 0.25, such as 0.01, 0.02, 0.03, 0.04, 0.05, 0.06, 0.07, 0.08, 0.09, 0.10, 0.11, 0.12, 0.13, 0.14, 0.15, 0.16, 0.17, 0.18, 0.19, 0.20, 0.21, 0.22, 0.23, 0.24, or 0.25. In some embodiments, the polydispersity index of a nanoparticle composition disclosed herein may be from about 0.10 to about 0.20.

[3227] The zeta potential of a nanoparticle composition may be used to indicate the electrokinetic potential of the composition. For example, the zeta potential may describe the surface charge of a nanoparticle composition. Nanoparticle compositions with relatively low charges, positive or negative, are generally desirable, as more highly charged species may interact undesirably with cells, tissues, and other elements in the body. In some embodiments, the zeta potential of a nanoparticle composition disclosed herein may be from about −10 mV to about +20 mV, from about −10 mV to about +15 mV, from about 10 mV to about +10 mV, from about −10 mV to about +5 mV, from about −10 mV to about 0 mV, from about −10 mV to about −5 mV, from about −5 mV to about +20 mV, from about −5 mV to about +15 mV, from about −5 mV to about +10 mV, from about −5 mV to about +5 mV, from about −5 mV to about 0 mV, from about 0 mV to about +20 mV, from about 0 mV to about +15 mV, from about 0 mV to about +10 mV, from about 0 mV to about +5 mV, from about +5 mV to about +20 mV, from about +5 mV to about +15 mV, or from about +5 mV to about +10 mV.

[3228] In some embodiments, the zeta potential of the lipid nanoparticles may be from about 0 mV to about 100 mV, from about 0 mV to about 90 mV, from about 0 mV to about 80 mV, from about 0 mV to about 70 mV, from about 0 mV to about 60 mV, from about 0 mV to about 50 mV, from about 0 mV to about 40 mV, from about 0 mV to about 30 mV, from about 0 mV to about 20 mV, from about 0 mV to about 10 mV, from about 10 mV to about 100 mV, from about 10 mV to about 90 mV, from about 10 mV to about 80 mV, from about 10 mV to about 70 mV, from about 10 mV to about 60 mV, from about 10 mV to about 50 mV, from about 10 mV to about 40 mV, from about 10 mV to about 30 mV, from about 10 mV to about 20 mV, from about 20 mV to about 100 mV, from about 20 mV to about 90 mV, from about 20 mV to about 80 mV, from about 20 mV to about 70 mV, from about 20 mV to about 60 mV, from about 20 mV to about 50 mV, from about 20 mV to about 40 mV, from about 20 mV to about 30 mV, from about 30 mV to about 100 mV, from about 30 mV to about 90 mV, from about 30 mV to about 80 mV, from about 30 mV to about 70 mV, from about 30 mV to about 60 mV, from about 30 mV to about 50 mV, from about 30 mV to about 40 mV, from about 40 mV to about 100 mV, from about 40 mV to about 90 mV, from about 40 mV to about 80 mV, from about 40 mV to about 70 mV, from about 40 mV to about 60 mV, and from about 40 mV to about 50 mV. In some embodiments, the zeta potential of the lipid nanoparticles may be from about 10 mV to about 50 mV, from about 15 mV to about 45 mV, from about 20 mV to about 40 mV, and from about 25 mV to about 35 mV. In some embodiments, the zeta potential of the lipid nanoparticles may be about 10 mV, about 20 mV, about 30 mV, about 40 mV, about 50 mV, about 60 mV, about 70 mV, about 80 mV, about 90 mV, and about 100 mV.

[3229] The term “encapsulation efficiency” of a polynucleotide describes the amount of the polynucleotide that is encapsulated by or otherwise associated with a nanoparticle composition after preparation, relative to the initial amount provided. As used herein, “encapsulation” may refer to complete, substantial, or partial enclosure, confinement, surrounding, or encasement.

[3230] Encapsulation efficiency is desirably high (e.g., close to 100%). The encapsulation efficiency may be measured, for example, by comparing the amount of the polynucleotide in a solution containing the nanoparticle composition before and after breaking up the nanoparticle composition with one or more organic solvents or detergents.

[3231] Fluorescence may be used to measure the amount of free polynucleotide in a solution. For the nanoparticle compositions described herein, the encapsulation efficiency of a polynucleotide may be at least 50%, for example 50%, 55%, 60%, 65%, 70%, 75%, 80%, 85%, 90%, 91%, 92%, 93%, 94%, 95%, 96%, 97%, 98%, 99%, or 100%. In some embodiments, the encapsulation efficiency may be at least 80%. In certain embodiments, the encapsulation efficiency may be at least 90%.

[3232] The amount of a polynucleotide present in a pharmaceutical composition disclosed herein can depend on multiple factors such as the size of the polynucleotide, desired target and/or application, or other properties of the nanoparticle composition as well as on the properties of the polynucleotide.

[3233] For example, the amount of an mRNA useful in a nanoparticle composition may depend on the size (expressed as length, or molecular mass), sequence, and other characteristics of the mRNA. The relative amounts of a polynucleotide in a nanoparticle composition may also vary.

[3234] The relative amounts of the lipid composition and the polynucleotide present in a lipid nanoparticle composition of the present disclosure can be optimized according to considerations of efficacy and tolerability. For compositions including an mRNA as a polynucleotide, the N:P ratio can serve as a useful metric.

[3235] As the N:P ratio of a nanoparticle composition controls both expression and tolerability, nanoparticle compositions with low N:P ratios and strong expression are desirable. N:P ratios vary according to the ratio of lipids to RNA in a nanoparticle composition.

[3236] In general, a lower N:P ratio is preferred. The one or more RNA, lipids, and amounts thereof may be selected to provide an N:P ratio from about 2:1 to about 30:1, such as 2:1, 3:1,4:1, 5:1, 6:1,7:1, 8:1, 9:1, 10:1, 12:1, 14:1, 16:1, 18:1, 20:1, 22:1, 24:1, 26:1, 28:1, or 30:1. In certain embodiments, the N:P ratio may be from about 2:1 to about 8:1. In other embodiments, the N:P ratio is from about 5:1 to about 8:1. In certain embodiments, the N:P ratio is between 5:1 and 6:1. In one specific aspect, the N:P ratio is about is about 5.67:1.

[3237] In addition to providing nanoparticle compositions, the present disclosure also provides methods of producing lipid nanoparticles comprising encapsulating a polynucleotide. Such method comprises using any of the pharmaceutical compositions disclosed herein and producing lipid nanoparticles in accordance with methods of production of lipid nanoparticles known in the art. See, e.g., Wang (et al. 2015) Adv. Drug Deliv. Rev. 87:68-80; Silva et al. (2015) Curr. Pharm. Technol. 16: 940-954; Naseri et al. (2015) Adv. Pharm. Bull. 5:305-13; Silva et al. (2015) Curr. Pharm. Biotechnol. 16:291-302, and references cited therein.

[3238] In some embodiments, the polynucleotide of the disclosure is formulated in a lipid nanoparticle, wherein the polynucleotide comprises a polynucleotide sequence encoding an immune response primer, immune response co-stimulatory signal, or checkpoint inhibitor provided in the present disclosure. In some embodiments, the polynucleotide of the disclosure is formulated in a lipid nanoparticle, wherein the polynucleotide comprises a polynucleotide sequence encoding an immune response primer, immune response co-stimulatory signal, or checkpoint inhibitor provided in the present disclosure.

[3239] Lipid nanoparticle formulations typically comprise a lipid, in particular, an ionizable cationic lipid, for example, 2,2-dilinoleyl-4-dimethylaminoethyl-[1,3]-dioxolane (DLin-KC2-DMA), dilinoleyl-methyl-4-dimethylaminobutyrate (DLin-MC3-DMA), or di((Z)-non-2-en-1-yl) 9-((4-(dimethylamino)butanoyl)oxy)heptadecanedioate (L319), and further comprise a neutral lipid, a sterol and a molecule capable of reducing particle aggregation, for example a PEG or PEG-modified lipid.

[3240] In one embodiment, the lipid nanoparticle formulation consists essentially of (i) at least one lipid selected from the group consisting of 2,2-dilinoleyl-4-dimethylaminoethyl-[1,3]-dioxolane (DLin-KC2-DMA), dilinoleyl-methyl-4-dimethylaminobutyrate (DLin-MC3-DMA), and di((Z)-non-2-en-1-yl) 9-((4-(dimethylamino)butanoyl)oxy)heptadecanedioate (L319); (ii) a neutral lipid selected from DSPC, DPPC, POPC, DOPE and SM; (iii) a sterol, e.g., cholesterol; and (iv) a PEG-lipid, e.g., PEG-DMG or PEG-cDMA, in a molar ratio of about 20-60% cationic lipid: 5-25% neutral lipid: 25-55% sterol; 0.5-15% PEG-lipid.

[3241] In one embodiment, the formulation includes from about 25% to about 75% on a molar basis of a cationic lipid selected from 2,2-dilinoleyl-4-dimethylaminoethyl-[1,3]-dioxolane (DLin-KC2-DMA), dilinoleyl-methyl-4-dimethylaminobutyrate (DLin-MC3-DMA), and di((Z)-non-2-en-1-yl) 9-((4-(dimethylamino)butanoyl)oxy)heptadecanedioate (L319), e.g., from about 35 to about 65%, from about 45 to about 65%, about 60%, about 57.5%, about 50% or about 40% on a molar basis.

[3242] In one embodiment, the formulation includes from about 0.5% to about 15% on a molar basis of the neutral lipid, e.g., from about 3 to about 12%, from about 5 to about 10% or about 15%, about 10%, or about 7.5% on a molar basis. Exemplary neutral lipids include, but are not limited to, DSPC, POPC, DPPC, DOPE and SM. In one embodiment, the formulation includes from about 5% to about 50% on a molar basis of the sterol (e.g., about 15 to about 45%, about 20 to about 40%, about 40%, about 38.5%, about 35%, or about 31% on a molar basis. An exemplary sterol is cholesterol. In one embodiment, the formulation includes from about 0.5% to about 20% on a molar basis of the PEG or PEG-modified lipid (e.g., about 0.5 to about 10%, about 0.5 to about 5%, about 1.5%, about 0.5%, about 1.5%, about 3.5%, or about 5% on a molar basis. In one embodiment, the PEG or PEG modified lipid comprises a PEG molecule of an average molecular weight of 2,000 Da. In other embodiments, the PEG or PEG modified lipid comprises a PEG molecule of an average molecular weight of less than 2,000, for example around 1,500 Da, around 1,000 Da, or around 500 Da. Exemplary PEG-modified lipids include, but are not limited to, PEG-distearoyl glycerol (PEG-DMG) (also referred herein as PEG-C14 or C14-PEG), PEG-cDMA (further discussed in Reyes et al. (2005) J. Controlled Release 107:276-287).

[3243] In one embodiment, the formulations of the disclosure include 25-75% of a cationic lipid selected from 2,2-dilinoleyl-4-dimethylaminoethyl-[1,3]-dioxolane (DLin-KC2-DMA), dilinoleyl-methyl-4-dimethylaminobutyrate (DLin-MC3-DMA), and di((Z)-non-2-en-1-yl) 9-((4-(dimethylamino)butanoyl)oxy)heptadecanedioate (L319), 0.5-15% of the neutral lipid, 5-50% of the sterol, and 0.5-20% of the PEG or PEG-modified lipid on a molar basis.

[3244] In one embodiment, the formulations of the disclosure include 35-65% of a cationic lipid selected from 2,2-dilinoleyl-4-dimethylaminoethyl-[1,3]-dioxolane (DLin-KC2-DMA), dilinoleyl-methyl-4-dimethylaminobutyrate (DLin-MC3-DMA), and di((Z)-non-2-en-1-yl) 9-((4-(dimethylamino)butanoyl)oxy)heptadecanedioate (L319), 3-12% of the neutral lipid, 15-45% of the sterol, and 0.5-10% of the PEG or PEG-modified lipid on a molar basis.

[3245] In one embodiment, the formulations of the disclosure include 45-65% of a cationic lipid selected from 2,2-dilinoleyl-4-dimethylaminoethyl-[1,3]-dioxolane (DLin-KC2-DMA), dilinoleyl-methyl-4-dimethylaminobutyrate (DLin-MC3-DMA), and di((Z)-non-2-en-1-yl) 9-((4-(dimethylamino)butanoyl)oxy)heptadecanedioate (L319), 5-10% of the neutral lipid, 25-40% of the sterol, and 0.5-10% of the PEG or PEG-modified lipid on a molar basis.

[3246] In one embodiment, the formulations of the disclosure include about 60% of a cationic lipid selected from 2,2-dilinoleyl-4-dimethylaminoethyl-[1,3]-dioxolane (DLin-KC2-DMA), dilinoleyl-methyl-4-dimethylaminobutyrate (DLin-MC3-DMA), and di((Z)-non-2-en-1-yl) 9-((4-(dimethylamino)butanoyl)oxy)heptadecanedioate (L319), about 7.5% of the neutral lipid, about 31% of the sterol, and about 1.5% of the PEG or PEG-modified lipid on a molar basis.

[3247] In one embodiment, the formulations of the disclosure include about 50% of a cationic lipid selected from 2,2-dilinoleyl-4-dimethylaminoethyl-[1,3]-dioxolane (DLin-KC2-DMA), dilinoleyl-methyl-4-dimethylaminobutyrate (DLin-MC3-DMA), and di((Z)-non-2-en-1-yl) 9-((4-(dimethylamino)butanoyl)oxy)heptadecanedioate (L319), about 10% of the neutral lipid, about 38.5% of the sterol, and about 1.5% of the PEG or PEG-modified lipid on a molar basis.

[3248] In one embodiment, the formulations of the disclosure include about 50% of a cationic lipid selected from 2,2-dilinoleyl-4-dimethylaminoethyl-[1,3]-dioxolane (DLin-KC2-DMA), dilinoleyl-methyl-4-dimethylaminobutyrate (DLin-MC3-DMA), and di((Z)-non-2-en-1-yl) 9-((4-(dimethylamino)butanoyl)oxy)heptadecanedioate (L319), about 10% of the neutral lipid, about 35% of the sterol, about 4.5% or about 5% of the PEG or PEG-modified lipid, and about 0.5% of the targeting lipid on a molar basis.

[3249] In one embodiment, the formulations of the disclosure include about 40% of a cationic lipid selected from 2,2-dilinoleyl-4-dimethylaminoethyl-[1,3]-dioxolane (DLin-KC2-DMA), dilinoleyl-methyl-4-dimethylaminobutyrate (DLin-MC3-DMA), and di((Z)-non-2-en-1-yl) 9-((4-(dimethylamino)butanoyl)oxy)heptadecanedioate (L319), about 15% of the neutral lipid, about 40% of the sterol, and about 5% of the PEG or PEG-modified lipid on a molar basis.

[3250] In one embodiment, the formulations of the disclosure include about 570.2% of a cationic lipid selected from 2,2-dilinoleyl-4-dimethylaminoethyl-[1,3]-dioxolane (DLin-KC2-DMA), dilinoleyl-methyl-4-dimethylaminobutyrate (DLin-MC3-DMA), and di((Z)-non-2-en-1-yl) 9-((4-(dimethylamino)butanoyl)oxy)heptadecanedioate (L319), about 7.1% of the neutral lipid, about 34.3% of the sterol, and about 1.4% of the PEG or PEG-modified lipid on a molar basis.

[3251] In one embodiment, the formulations of the disclosure include about 57.5% of a cationic lipid selected from the PEG lipid is PEG-cDMA (PEG-cDMA is further discussed in Reyes et al. (2005) J. Controlled Release 107:276-287, about 7.5% of the neutral lipid, about 31.5% of the sterol, and about 3.5% of the PEG or PEG-modified lipid on a molar basis.

[3252] In some embodiments, lipid nanoparticle formulation consists essentially of a lipid mixture in molar ratios of about 20-70% cationic lipid: 5-45% neutral lipid: 20-55% cholesterol: 0.5-15% PEG-modified lipid; e.g., in a molar ratio of about 20-60% cationic lipid: 5-25% neutral lipid: 25-55% cholesterol: 0.5-15% PEG-modified lipid.

[3253] In particular embodiments, the molar lipid ratio is approximately 50/10/38.5/1.5 (mol % cationic lipid/neutral lipid, e.g., DSPC/Cho1/PEG-modified lipid, e.g., PEG-DMG, PEG-DSG or PEG-DPG), 57.2/7.1134.3/1.4 (mol % cationic lipid/neutral lipid, e.g., DPPC/Cho1/PEG-modified lipid, e.g., PEG-cDMA), 40/15/40/5 (mol % cationic lipid/neutral lipid, e.g., DSPC/Cho1/PEG-modified lipid, e.g., PEG-DMG), 50/10/35/4.5/0.5 (mol % cationic lipid/neutral lipid, e.g., DSPC/Cho1/PEG-modified lipid, e.g., PEG-DSG), 50/10/35/5 (cationic lipid/neutral lipid, e.g., DSPC/Cho1/PEG-modified lipid, e.g., PEG-DMG), 40/10/40/10 (mol % cationic lipid/neutral lipid, e.g., DSPC/Cho1/PEG-modified lipid, e.g., PEG-DMG or PEG-cDMA), 35/15/40/10 (mol % cationic lipid/neutral lipid, e.g., DSPC/Cho1/PEG-modified lipid, e.g., PEG-DMG or PEG-cDMA) or 52/13/30/5 (mol % cationic lipid/neutral lipid, e.g., DSPC/Cho1/PEG-modified lipid, e.g., PEG-DMG or PEG-cDMA).

[3254] Exemplary lipid nanoparticle compositions and methods of making same are described, for example, in Semple et al. (2010) Nat. Biotechnol. 28:172-176; Jayarama et al. (2012) Angew. Chem. Int. Ed. 51:8529-8533; and Maier et al. (2013) Molecular Therapy 21:570-1578.

[3255] In one embodiment, the lipid nanoparticle formulations described herein comprise a cationic lipid, a PEG lipid and a structural lipid and optionally comprise a non-cationic lipid. As a non-limiting example, the lipid nanoparticle comprises about 40-60% of cationic lipid, about 5-15% of a non-cationic lipid, about 1-2% of a PEG lipid and about 30-50% of a structural lipid. As another non-limiting example, the lipid nanoparticle comprises about 50% cationic lipid, about 10% non-cationic lipid, about 1.5% PEG lipid and about 38.5% structural lipid. As yet another non-limiting example, the lipid nanoparticle comprises about 55% cationic lipid, about 10% non-cationic lipid, about 2.5% PEG lipid and about 32.5% structural lipid. In one embodiment, the cationic lipid is any cationic lipid described herein such as, but not limited to, DLin-KC2-DMA, DLin-MC3-DMA and L319.

[3256] In one embodiment, the lipid nanoparticle formulations described herein are 4 component lipid nanoparticles. The lipid nanoparticle can comprise a cationic lipid, a non-cationic lipid, a PEG lipid and a structural lipid. As a non-limiting example, the lipid nanoparticle can comprise about 40-60% of cationic lipid, about 5-15% of a non-cationic lipid, about 1-2% of a PEG lipid and about 30-50% of a structural lipid. As another non-limiting example, the lipid nanoparticle can comprise about 50% cationic lipid, about 10% non-cationic lipid, about 1.5% PEG lipid and about 38.5% structural lipid. As yet another non-limiting example, the lipid nanoparticle can comprise about 55% cationic lipid, about 10% non-cationic lipid, about 2.5% PEG lipid and about 32.5% structural lipid. In one embodiment, the cationic lipid can be any cationic lipid described herein such as, but not limited to, DLin-KC2-DMA, DLin-MC3-DMA and L319.

[3257] In one embodiment, the lipid nanoparticle formulations described herein comprise a cationic lipid, a non-cationic lipid, a PEG lipid and a structural lipid. As a non-limiting example, the lipid nanoparticle comprise about 50% of the cationic lipid DLin-KC2-DMA, about 10% of the non-cationic lipid DSPC, about 1.5% of the PEG lipid PEG-DOMG and about 38.5% of the structural lipid cholesterol. As a non-limiting example, the lipid nanoparticle comprise about 50% of the cationic lipid DLin-MC3-DMA, about 10% of the non-cationic lipid DSPC, about 1.5% of the PEG lipid PEG-DOMG and about 38.5% of the structural lipid cholesterol. As a non-limiting example, the lipid nanoparticle comprise about 50% of the cationic lipid DLin-MC3-DMA, about 10% of the non-cationic lipid DSPC, about 1.5% of the PEG lipid PEG-DMG and about 38.5% of the structural lipid cholesterol. As yet another non-limiting example, the lipid nanoparticle comprise about 55% of the cationic lipid L319, about 10% of the non-cationic lipid DSPC, about 2.5% of the PEG lipid PEG-DMG and about 32.5% of the structural lipid cholesterol.

[3258] In one embodiment, the cationic lipid is selected from, but not limited to, a cationic lipid described in International Publication Nos. WO2012040184, WO2011153120, WO2011149733, WO2011090965, WO2011043913, WO2011022460, WO2012061259, WO2012054365, WO2012044638, WO2010080724, WO201021865, WO2008103276, WO2013086373 and WO2013086354, U.S. Pat. Nos. 7,893,302, 7,404,969, 8,283,333, and 8,466,122 and US Patent Publication No. US20100036115, US20120202871, US20130064894, US20130129785, US20130150625, US20130178541 and US20130225836.

[3259] In another embodiment, the cationic lipid can be selected from, but not limited to, formula A described in International Publication Nos. WO2012040184, WO2011153120, WO2011149733, WO2011090965, WO2011043913, WO2011022460, WO2012061259, WO2012054365, WO2012044638 and WO2013116126 or US Patent Publication No. US20130178541 and US20130225836.

[3260] In yet another embodiment, the cationic lipid can be selected from, but not limited to, formula CLI-CLXXIX of International Publication No. WO2008103276, formula CLI-CLXXIX of U.S. Pat. No. 7,893,302, formula CLI-CLXXXXII of U.S. Pat. No. 7,404,969 and formula I-VI of US Patent Publication No. US20100036115, formula I of US Patent Publication No US20130123338. As a non-limiting example, the cationic lipid can be selected from (20Z,23Z)-N,N-dimethylnonacosa-20,23-dien-10-amine, (17Z,20Z)-N,N-dimemylhexacosa-17,20-dien-9-amine, (1Z,19Z)-N5N-dimethylpentacosa-l 6, 19-dien-8-amine, (13Z,16Z)-N,N-dimethyldocosa-13,16-dien-5-amine, (12Z,15Z)-N,N-dimethylhenicosa-12,15-dien-4-amine, (14Z,17Z)-N,N-dimethyltricosa-14,17-dien-6-amine, (15Z,18Z)-N,N-dimethyltetracosa-15,18-dien-7-amine, (18Z,21Z)-N,N-dimethylheptacosa-18,21-dien-10-amine, (15Z,18Z)-N,N-dimethyltetracosa-15,18-dien-5-amine, (14Z,17Z)-N,N-dimethyltricosa-14,17-dien-4-amine, (19Z,22Z)-N,N-dimeihyloctacosa-19,22-dien-9-amine, (18Z, 21 Z)-N,N-dimethylheptacosa-18,21-dien-8-amine, (17Z,20Z)-N,N-dimethylhexacosa-17,20-dien-7-amine, (16Z,19Z)-N,N-dimethylpentacosa-16,19-dien-6-amine, (22Z,25Z)-N,N-dimethylhentriaconta-22,25-dien-10-amine, (21 Z,24Z)-N,N-dimethyltriaconta-21,24-dien-9-amine, (18Z)-N,N-dimetylheptacos-18-en-10-amine, (17Z)-N,N-dimethylhexacos-17-en-9-amine, (19Z,22Z)-N,N-dimethyloctacosa-19,22-dien-7-amine, N,N-dimethylheptacosan-10-amine, (20Z,23Z)-N-ethyl-N-methylnonacosa-20,23-dien-10-amine, 1-[(11Z,14Z)-1-nonylicosa-11,14-dien-1-yl] pyrrolidine, (20Z)-N,N-dimethylheptacos-20-en-10-amine, (15Z)-N,N-dimethyl eptacos-15-en-10-amine, (14Z)-N,N-dimethylnonacos-14-en-10-amine, (17Z)-N,N-dimethylnonacos-17-en-10-amine, (24Z)-N,N-dimethyltritriacont-24-en-10-amine, (20Z)-N,N-dimethylnonacos-20-en-10-amine, (22Z)-N,N-dimethylhentriacont-22-en-10-amine, (16Z)-N,N-dimethylpentacos-16-en-8-amine, (12Z,15Z)-N,N-dimethyl-2-nonylhenicosa-12,15-dien-1-amine, (13Z,16Z)-N,N-dimethyl-3-nonyldocosa-13,16-dien-1-amine, N,N-dimethyl-1-[(1S,2R)-2-octylcyclopropyl] eptadecan-8-amine, 1-[(1S,2R)-2-hexylcyclopropyl]-N,N-dimethylnonadecan-10-amine, N,N-dimethyl-1-[(1S,2R)-2-octylcyclopropyl]nonadecan-10-amine, N,N-dimethyl-21-[(1S,2R)-2-octylcyclopropyl]henicosan-10-amine,N,N-dimethyl-1-[(1S,2S)-2-{[(1R,2R)-2-pentylcyclopropyl]methyl}cyclopropyl]nonadecan-10-amine,N,N-dimethyl-1-[(1S,2R)-2-octylcyclopropyl]hexadecan-8-amine, N,N-dimethyl-[(1R,2S)-2-undecyIcyclopropyl]tetradecan-5-amine, N,N-dimethyl-3-{7-[(1S,2R)-2-octylcyclopropyl]heptyl} dodecan-1-amine, 1-[(1R,2S)-2-hepty lcyclopropyl]-N,N-dimethyloctadecan-9-amine, 1-[(1S,2R)-2-decylcyclopropyl]-N,N-dimethylpentadecan-6-amine, N,N-dimethyl-1-[(1S,2R)-2-octylcyclopropyl]pentadecan-8-amine, R-N,N-dimethyl-1-[(9Z,12Z)-octadeca-9,12-dien-1-yloxy]-3-(octyloxy)propan-2-amine, S-N,N-dimethyl-1-[(9Z,12Z)-octadeca-9,12-dien-1-yloxy]-3-(octyloxy)propan-2-amine, 1-{2-[(9Z,12Z)-octadeca-9,12-dien-1-yloxy]-1-[(octyloxy)methyl]ethyl}pyrrolidine, (2S)-N,N-dimethyl-1-[(9Z,12Z)-octadeca-9,12-dien-1-yloxy]-3-[(5Z)-oct-5-en-1-yloxy]propan-2-amine, 1-{2-[(9Z,12Z)-octadeca-9,12-dien-1-yloxy]-1-[(octyloxy)methyl]ethyl}azetidine, (2S)-1-(hexyloxy)-N,N-dimethyl-3-[(9Z,12Z)-octadeca-9,12-dien-1-yloxy]propan-2-amine, (2S)-1-(heptyloxy)-N,N-dimethyl-3-[(9Z,12Z)-octadeca-9,12-dien-1-yloxy]propan-2-amine, N,N-dimethyl-1-(nonyloxy)-3-[(9Z,12Z)-octadeca-9,12-dien-1-yloxy]propan-2-amine, N,N-dimethyl-1-[(9Z)-octadec-9-en-1-yloxy]-3-(octyloxy)propan-2-amine; (2S)-N,N-dimethyl-1-[(6Z,9Z,12Z)-octadeca-6,9,12-trien-1-yloxy]-3-(octyloxy)propan-2-amine, (2S)-1-[(11Z,14Z)-icosa-11,14-dien-1-yloxy]-N,N-dimethyl-3-(pentyloxy)propan-2-amine, (2S)-1-(hexyloxy)-3-[(11Z,14Z)-icosa-11,14-dien-1-yloxy]-N,N-dimethylpropan-2-amine, 1-[(11Z,14Z)-icosa-11,14-dien-1-yloxy]-N,N-dimethyl-3-(octyloxy)propan-2-amine, 1-[(13Z,16Z)-docosa-13,16-dien-1-yloxy]-N,N-dimethyl-3-(octyloxy)propan-2-amine, (2S)-1-[(13Z,16Z)-docosa-13,16-dien-1-yloxy]-3-(hexyloxy)-N,N-dimethylpropan-2-amine, (2S)-1-[(13Z)-docos-13-en-1-yloxy]-3-(hexyloxy)-N,N-dimethylpropan-2-amine, 1-[(13Z)-docos-13-en-1-yloxy]-N,N-dimethyl-3-(octyloxy)propan-2-amine, 1-[(9Z)-hexadec-9-en-1-yloxy]-N,N-dimethyl-3-(octyloxy)propan-2-amine, (2R)-N,N-dimethyl-H(1-metoylo ctyl)oxy]-3-[(9Z,12Z)-octadeca-9,12-dien-1-yloxy]propan-2-amine, (2R)-1-[(3,7-dimethyloctyl)oxy]-N,N-dimethyl-3-[(9Z,12Z)-octadeca-9,12-dien-1-yloxy]propan-2-amine, N,N-dimethyl-1-(octyloxy)-3-({8-[(1S,2S)-2-{[(1R,2R)-2-pentylcyclopropyl]methyl}cyclopropyl]octyl}oxy) propan-2-amine, N,N-dimethyl-1-{[8-(2-oclylcyclopropyl)octyl]oxy}-3-(octyloxy)propan-2-amine and (1lE,20Z,23Z)-N,N-dimethylnonacosa-11,20,2-trien-10-amine or a pharmaceutically acceptable salt or stereoisomer thereof.

[3261] In one embodiment, the lipid is a cleavable lipid such as those described in International Publication No. WO2012170889. In another embodiment, the lipid is a cationic lipid such as, but not limited to, Formula (I) of U.S. Patent Application No. US20130064894.

[3262] In one embodiment, the cationic lipid is synthesized by methods known in the art and/or as described in International Publication Nos. WO2012040184, WO2011153120, WO2011149733, WO2011090965, WO2011043913, WO2011022460, WO2012061259, WO2012054365, WO2012044638, WO2010080724, WO201021865, WO2013086373 and WO2013086354.

[3263] In another embodiment, the cationic lipid is a trialkyl cationic lipid. Non-limiting examples of trialkyl cationic lipids and methods of making and using the trialkyl cationic lipids are described in International Patent Publication No. WO2013126803.

[3264] In one embodiment, the LNP formulations of the polynucleotides contain PEG-c-DOMG at 3% lipid molar ratio. In another embodiment, the LNP formulations of the polynucleotides contains PEG-c-DOMG at 1.5% lipid molar ratio.

[3265] In one embodiment, a pharmaceutical composition comprising a polynucleotide of any of the combination therapies disclosed herein, e.g., an mRNA encoding an immune response primer polypeptide, an mRNA encoding an immune response co-stimulatory signal polypeptide, an mRNA encoding a checkpoint inhibitor polypeptide, or a combination thereof, and further comprises at least one of the PEGylated lipids described in International Publication No. WO2012099755.

[3266] In one embodiment, the LNP formulation contains PEG-DMG 2000 (1,2-dimyristoyl-sn-glycero-3-phophoethanolamine-N-[methoxy(polyethylene glycol)-2000). In one embodiment, the LNP formulation can contain PEG-DMG 2000, a cationic lipid known in the art and at least one other component. In another embodiment, the LNP formulation contains PEG-DMG 2000, a cationic lipid known in the art, DSPC and cholesterol. As a non-limiting example, the LNP formulation contains PEG-DMG 2000, DLin-DMA, DSPC and cholesterol. As another non-limiting example the LNP formulation contains PEG-DMG 2000, DLin-DMA, DSPC and cholesterol in a molar ratio of 2:40:10:48 (see, e.g., Geall et al. (2012) Proc. Nat'l. Acad. Sci. USA 109:14604-9).

[3267] In one embodiment, the LNP formulation is formulated by the methods described in International Publication Nos. WO2011127255 or WO2008103276. As a non-limiting example, a polynucleotide of any of the combination therapies disclosed herein, e.g., an mRNA encoding an immune response primer polypeptide, an mRNA encoding an immune response co-stimulatory signal polypeptide, an mRNA encoding a checkpoint inhibitor polypeptide, or a combination thereof, is encapsulated in LNP formulations as described in WO2011127255 and/or WO2008103276; see also, U.S. Pat. Appl. Publ. Nos. US20130037977 and US20100015218, which are herein incorporated by reference in their entireties.

[3268] In one embodiment, a polynucleotide of any of the combination therapies disclosed herein, e.g., an mRNA encoding an immune response primer polypeptide, an mRNA encoding an immune response co-stimulatory signal polypeptide, an mRNA encoding a checkpoint inhibitor polypeptide, or a combination thereof, is formulated in a nanoparticle to be delivered by a parenteral route as described in U.S. Patent Application Publication No. US20120207845.

[3269] In one embodiment, a polynucleotide of any of the combination therapies disclosed herein, e.g., an mRNA encoding an immune response primer polypeptide, an mRNA encoding an immune response co-stimulatory signal polypeptide, an mRNA encoding a checkpoint inhibitor polypeptide, or a combination thereof, is formulated in a lipid nanoparticle made by the methods described in U.S. Patent Application Publication No. US20130156845 or International Publication No. WO2013093648 or WO2012024526.

[3270] The lipid nanoparticles described herein can be made in a sterile environment by the system and/or methods described in U.S. Patent Application Publication No. US20130164400.

[3271] In one embodiment, the LNP formulation is formulated in a nanoparticle such as a nucleic acid-lipid particle described in U.S. Pat. No. 8,492,359. As a non-limiting example, the lipid particle comprises one or more active agents or therapeutic agents; one or more cationic lipids comprising from about 50 mol % to about 85 mol % of the total lipid present in the particle; one or more non-cationic lipids comprising from about 13 mol % to about 49.5 mol % of the total lipid present in the particle; and one or more conjugated lipids that inhibit aggregation of particles comprising from about 0.5 mol % to about 2 mol % of the total lipid present in the particle. The nucleic acid in the nanoparticle can be the polynucleotides described herein and/or are known in the art.

[3272] In one embodiment, the LNP formulation is formulated by the methods described in International Publication Nos. WO2011127255 or WO2008103276. As a non-limiting example, modified RNA described herein is encapsulated in LNP formulations as described in WO2011127255 and/or WO2008103276.

[3273] In one embodiment, LNP formulations described herein comprise a polycationic composition. As a non-limiting example, the polycationic composition is selected from formula 1-60 of U.S. Patent Publication No. US20050222064. In another embodiment, the LNP formulations comprising a polycationic composition are used for the delivery of the modified RNA described herein in vivo and/or in vitro.

[3274] In one embodiment, the LNP formulations described herein additionally comprise a permeability enhancer molecule. Non-limiting permeability enhancer molecules are described in U.S. Patent Application Publication No. US20050222064.

[3275] In one embodiment, the polynucleotide pharmaceutical compositions are formulated in liposomes such as, but not limited to, DiLa2 liposomes (Marina Biotech, Bothell, WA), SMARTICLES® (Marina Biotech, Bothell, WA), neutral DOPC (1,2-dioleoyl-sn-glycero-3-phosphocholine) based liposomes (e.g., siRNA delivery for ovarian cancer (Landen et al. (2006) Cancer Biology & Therapy 5:1708-1713) and hyaluronan-coated liposomes (Quiet Therapeutics, Israel).

[3276] In one embodiment, a polynucleotide of any of the combination therapies disclosed herein, e.g., an mRNA encoding an immune response primer polypeptide, an mRNA encoding an immune response co-stimulatory signal polypeptide, an mRNA encoding a checkpoint inhibitor polypeptide, or a combination thereof, is formulated in a lyophilized gel-phase liposomal composition as described in U.S. Patent Application Publication No. US2012060293.

[3277] The nanoparticle formulations can comprise a phosphate conjugate. The phosphate conjugate can increase in vivo circulation times and/or increase the targeted delivery of the nanoparticle. Phosphate conjugates for use with the present disclosure can be made by the methods described in International Application No. WO2013033438 or U.S. Patent Application Publication No. US20130196948. As a non-limiting example, the phosphate conjugates can include a compound of any one of the formulas described in International Application No. WO2013033438; see also, U.S. Pat. Appl. Publ. No. US20130066086.

[3278] The nanoparticle formulation can comprise a polymer conjugate. The polymer conjugate can be a water soluble conjugate. The polymer conjugate can have a structure as described in U.S. Patent Application Publication No. 20130059360. In one embodiment, polymer conjugates with a polynucleotide of any of the combination therapies disclosed herein, e.g., an mRNA encoding an immune response primer polypeptide, an mRNA encoding an immune response co-stimulatory signal polypeptide, an mRNA encoding a checkpoint inhibitor polypeptide, or a combination thereof, of the present disclosure can be made using the methods and/or segmented polymeric reagents described in U.S. Patent Application Publication No. US20130072709. In another embodiment, the polymer conjugate can have pendant side groups comprising ring moieties such as, but not limited to, the polymer conjugates described in U.S. Patent Application Publication No. US20130196948.

[3279] The nanoparticle formulations can comprise a conjugate to enhance the delivery of nanoparticles of the present disclosure in a subject. Further, the conjugate can inhibit phagocytic clearance of the nanoparticles in a subject. In one embodiment, the conjugate is a “self” peptide designed from the human membrane protein CD47, e.g., the “self” particles described by Rodriguez et al. (2013) Science 339:971-975. As shown by Rodriguez et al. the self peptides delayed macrophage-mediated clearance of nanoparticles which enhanced delivery of the nanoparticles. In another embodiment, the conjugate is the membrane protein CD47. See, e.g., Rodriguez et al. (2013) Science 339:971-975. Rodriguez et al. showed that, similarly to “self” peptides, CD47 can increase the circulating particle ratio in a subject as compared to scrambled peptides and PEG coated nanoparticles.

[3280] In one embodiment, a polynucleotide of any of the combination therapies disclosed herein, e.g., an mRNA encoding an immune response primer polypeptide, an mRNA encoding an immune response co-stimulatory signal polypeptide, an mRNA encoding a checkpoint inhibitor polypeptide, or a combination thereof, of the present disclosure can be formulated in nanoparticles which comprise a conjugate to enhance the delivery of the nanoparticles of the present disclosure in a subject. The conjugate can be the CD47 membrane or the conjugate can be derived from the CD47 membrane protein, such as the “self” peptide described previously. In another aspect the nanoparticle can comprise PEG and a conjugate of CD47 or a derivative thereof. In yet another aspect, the nanoparticle comprises both the “self” peptide described above and the membrane protein CD47.

[3281] In another aspect, a “self” peptide and/or CD47 protein is conjugated to a virus-like particle or pseudovirion, as described herein for delivery of the polynucleotides of the present disclosure.

[3282] In another embodiment, pharmaceutical compositions comprising a polynucleotide of any of the combination therapies disclosed herein, e.g., an mRNA encoding an immune response primer polypeptide, an mRNA encoding an immune response co-stimulatory signal polypeptide, an mRNA encoding a checkpoint inhibitor polypeptide, or a combination thereof, of the present disclosure, can comprise a conjugate with a degradable linkage. Non-limiting examples of conjugates include an aromatic moiety comprising an ionizable hydrogen atom, a spacer moiety, and a water-soluble polymer. As a non-limiting example, pharmaceutical compositions comprising a conjugate with a degradable linkage and methods for delivering such pharmaceutical compositions are described in U.S. Patent Application Publication No. US20130184443.

[3283] The nanoparticle formulations can be a carbohydrate nanoparticle comprising a carbohydrate carrier and a polynucleotide. As a non-limiting example, the carbohydrate carrier includes, but is not limited to, an anhydride-modified phytoglycogen or glycogen-type material, phtoglycogen octenyl succinate, phytoglycogen beta-dextrin, anhydride-modified phytoglycogen beta-dextrin. See, e.g., International Publication No. WO2012109121; see also U.S. Pat. Appl. Publ. No. US20140066363.

[3284] Nanoparticle formulations of the present disclosure can be coated with a surfactant or polymer in order to improve the delivery of the particle. In one embodiment, the nanoparticle is coated with a hydrophilic coating such as, but not limited to, PEG coatings and/or coatings that have a neutral surface charge. The hydrophilic coatings can help to deliver nanoparticles with larger payloads such as, but not limited to, polynucleotides within the central nervous system. As a non-limiting example nanoparticles comprising a hydrophilic coating and methods of making such nanoparticles are described in U.S. Patent Application Publication No. US20130183244.

[3285] In one embodiment, the lipid nanoparticles of the present disclosure are hydrophilic polymer particles. Non-limiting examples of hydrophilic polymer particles and methods of making hydrophilic polymer particles are described in U.S. Patent Application Publication No. US20130210991.

[3286] In another embodiment, the lipid nanoparticles of the present disclosure are hydrophobic polymer particles. Lipid nanoparticle formulations can be improved by replacing the cationic lipid with a biodegradable cationic lipid which is known as a rapidly eliminated lipid nanoparticle (reLNP). Ionizable cationic lipids, such as, but not limited to, DLinDMA, DLin-KC2-DMA, and DLin-MC3-DMA, have been shown to accumulate in plasma and tissues over time and can be a potential source of toxicity. The rapid metabolism of the rapidly eliminated lipids can improve the tolerability and therapeutic index of the lipid nanoparticles by an order of magnitude from a 1 mg/kg dose to a 10 mg/kg dose in rat. Inclusion of an enzymatically degraded ester linkage can improve the degradation and metabolism profile of the cationic component, while still maintaining the activity of the reLNP formulation. The ester linkage can be internally located within the lipid chain or it can be terminally located at the terminal end of the lipid chain. The internal ester linkage can replace any carbon in the lipid chain.

[3287] In one embodiment, the internal ester linkage is located on either side of the saturated carbon.

[3288] In one embodiment, an immune response is elicited by delivering a lipid nanoparticle which can include a nanospecies, a polymer and an immunogen. See, e.g., U.S. Patent Application Publication No. US20120189700 and International Publication No. WO2012099805. The polymer can encapsulate the nanospecies or partially encapsulate the nanospecies. The immunogen can be a recombinant protein, a modified RNA and/or a polynucleotide of any of the combination therapies disclosed herein, e.g., an mRNA encoding an immune response primer polypeptide, an mRNA encoding an immune response co-stimulatory signal polypeptide, an mRNA encoding a checkpoint inhibitor polypeptide, or a combination thereof, of the present disclosure.

[3289] Lipid nanoparticles can be engineered to alter the surface properties of particles so the lipid nanoparticles can penetrate the mucosal barrier. Mucus is located on mucosal tissue such as, but not limited to, oral (e.g., the buccal and esophageal membranes and tonsil tissue), ophthalmic, gastrointestinal (e.g., stomach, small intestine, large intestine, colon, rectum), nasal, respiratory (e.g., nasal, pharyngeal, tracheal and bronchial membranes), genital (e.g., vaginal, cervical and urethral membranes). Nanoparticles larger than 10-200 nm which are preferred for higher drug encapsulation efficiency and the ability to provide the sustained delivery of a wide array of drugs have been thought to be too large to rapidly diffuse through mucosal barriers. Mucus is continuously secreted, shed, discarded or digested and recycled so most of the trapped particles can be removed from the mucosal tissue within seconds or within a few hours. Large polymeric nanoparticles (200 nm-500 nm in diameter) which have been coated densely with a low molecular weight polyethylene glycol (PEG) diffused through mucus only 4 to 6-fold lower than the same particles diffusing in water (Lai et al. (2007) Proc. Nat'l. Acad. Sci. USA 104:1482-487; Lai et al. (2009) Adv. Drug Deliv. Rev. 61:158-171). The transport of nanoparticles can be determined using rates of permeation and/or fluorescent microscopy techniques including, but not limited to, fluorescence recovery after photobleaching (FRAP) and high resolution multiple particle tracking (MPT). As a non-limiting example, compositions which can penetrate a mucosal barrier can be made as described in U.S. Pat. No. 8,241,670 or International Patent Publication No. WO2013110028 (see, also U.S. Pat. Appl. Publ. No. US20150297531).

[3290] The lipid nanoparticle engineered to penetrate mucus can comprise a polymeric material (i.e. a polymeric core) and/or a polymer-vitamin conjugate and/or a tri-block co-polymer. The polymeric material can include, but is not limited to, polyamines, polyethers, polyamides, polyesters, polycarbamates, polyureas, polycarbonates, poly(styrenes), polyimides, polysulfones, polyurethanes, polyacetylenes, polyethylenes, polyethyeneimines, polyisocyanates, polyacrylates, polymethacrylates, polyacrylonitriles, and polyarylates. The polymeric material can be biodegradable and/or biocompatible. Non-limiting examples of biocompatible polymers are described in International Patent Publication No. WO2013116804; see also, U.S. Pat. Appl. Publ. No. US20130203713, which is herein incorporated by reference in its entirety. The polymeric material can additionally be irradiated. As a non-limiting example, the polymeric material can be gamma irradiated. See, e.g., International App. No. WO2012082165; see also, U.S. Pat. Appl. Publ. No. US20130101609, which is herein incorporated by reference in its entirety.

[3291] Non-limiting examples of specific polymers include poly(caprolactone) (PCL), ethylene vinyl acetate polymer (EVA), poly(lactic acid) (PLA), poly(L-lactic acid) (PLLA), poly(glycolic acid) (PGA), poly(lactic acid-co-glycolic acid) (PLGA), poly(L-lactic acid-co-glycolic acid) (PLLGA), poly(D,L-lactide) (PDLA), poly(L-lactide) (PLLA), poly(D,L-lactide-co-caprolactone), poly(D,L-lactide-co-caprolactone-co-glycolide), poly(D,L-lactide-co-PEO-co-D,L-lactide), poly(D,L-lactide-co-PPO-co-D,L-lactide), polyalkyl cyanoacralate, polyurethane, poly-L-lysine (PLL), hydroxypropyl methacrylate (HPMA), polyethyleneglycol, poly-L-glutamic acid, poly(hydroxy acids), polyanhydrides, polyorthoesters, poly(ester amides), polyamides, poly(ester ethers), polycarbonates, polyalkylenes such as polyethylene and polypropylene, polyalkylene glycols such as poly(ethylene glycol) (PEG), polyalkylene oxides (PEO), polyalkylene terephthalates such as poly(ethylene terephthalate), polyvinyl alcohols (PVA), polyvinyl ethers, polyvinyl esters such as poly(vinyl acetate), polyvinyl halides such as poly(vinyl chloride) (PVC), polyvinylpyrrolidone, polysiloxanes, polystyrene (PS), polyurethanes, derivatized celluloses such as alkyl celluloses, hydroxyalkyl celluloses, cellulose ethers, cellulose esters, nitro celluloses, hydroxypropylcellulose, carboxymethylcellulose, polymers of acrylic acids, such as poly(methyl(meth)acrylate) (PMMA), poly(ethyl(meth)acrylate), poly(butyl(meth)acrylate), poly(isobutyl(meth)acrylate), poly(hexyl(meth)acrylate), poly(isodecyl(meth)acrylate), poly(lauryl(meth)acrylate), poly(phenyl(meth)acrylate), poly(methyl acrylate), poly(isopropyl acrylate), poly(isobutyl acrylate), poly(octadecyl acrylate) and copolymers and mixtures thereof, polydioxanone and its copolymers, polyhydroxyalkanoates, polypropylene fumarate, polyoxymethylene, poloxamers, poly(ortho)esters, poly(butyric acid), poly(valeric acid), poly(lactide-co-caprolactone), PEG-PLGA-PEG and trimethylene carbonate, polyvinylpyrrolidone. The lipid nanoparticle can be coated or associated with a co-polymer such as, but not limited to, a block co-polymer (such as a branched polyether-polyamide block copolymer described in International Publication No. WO2013012476), and (poly(ethylene glycol))-(poly(propylene oxide))-(poly(ethylene glycol)) triblock copolymer. See, e.g., U.S. Patent Application Publication Nos. US20120121718 and US20100003337, and U.S. Pat. No. 8,263,665.

[3292] The co-polymer can be a polymer that is generally regarded as safe (GRAS) and the formation of the lipid nanoparticle can be in such a way that no new chemical entities are created. For example, the lipid nanoparticle can comprise poloxamers coating PLGA nanoparticles without forming new chemical entities which are still able to rapidly penetrate human mucus. Yang et al. (2011) Angew. Chem. Int. Ed. 50:2597-2600. A non-limiting scalable method to produce nanoparticles which can penetrate human mucus is described by Xu et al. (2013) J. Control Release 170:279-86.

[3293] The vitamin of the polymer-vitamin conjugate can be vitamin E. The vitamin portion of the conjugate can be substituted with other suitable components such as, but not limited to, vitamin A, vitamin E, other vitamins, cholesterol, a hydrophobic moiety, or a hydrophobic component of other surfactants (e.g., sterol chains, fatty acids, hydrocarbon chains and alkylene oxide chains).

[3294] The lipid nanoparticle engineered to penetrate mucus can include surface altering agents such as, but not limited to, polynucleotides, anionic proteins (e.g., bovine serum albumin), surfactants (e.g., cationic surfactants such as for example dimethyldioctadecyl-ammonium bromide), sugars or sugar derivatives (e.g., cyclodextrin), nucleic acids, polymers (e.g., heparin, polyethylene glycol and poloxamer), mucolytic agents (e.g., N-acetylcysteine, mugwort, bromelain, papain, clerodendrum, acetylcysteine, bromhexine, carbocysteine, eprazinone, mesna, ambroxol, sobrerol, domiodol, letosteine, stepronin, tiopronin, gelsolin, thymosin β4 dornase alfa, neltenexine, erdosteine) and various DNases including rhDNase. The surface altering agent can be embedded or enmeshed in the particle's surface or disposed (e.g., by coating, adsorption, covalent linkage, or other process) on the surface of the lipid nanoparticle. See, e.g., U.S. Patent Application Publication Nos. US20100215580, US20080166414, and US20130164343.

[3295] In one embodiment, the mucus penetrating lipid nanoparticles comprises at least one polynucleotide described herein. The polynucleotide can be encapsulated in the lipid nanoparticle and/or disposed on the surface of the particle. The polynucleotide can be covalently coupled to the lipid nanoparticle. Formulations of mucus penetrating lipid nanoparticles can comprise a plurality of nanoparticles. Further, the formulations can contain particles which can interact with the mucus and alter the structural and/or adhesive properties of the surrounding mucus to decrease mucoadhesion which can increase the delivery of the mucus penetrating lipid nanoparticles to the mucosal tissue.

[3296] In another embodiment, the mucus penetrating lipid nanoparticles are a hypotonic formulation comprising a mucosal penetration enhancing coating. The formulation can be hypotonic for the epithelium to which it is being delivered. Non-limiting examples of hypotonic formulations can be found in International Patent Publication No. WO2013110028; see also U.S. Pat. Appl. Publ. No. US20150297531, which is herein incorporated by reference in its entirety.

[3297] In one embodiment, in order to enhance the delivery through the mucosal barrier the polynucleotide formulation comprises or is a hypotonic solution. Hypotonic solutions were found to increase the rate at which mucoinert particles such as, but not limited to, mucus-penetrating particles, were able to reach the vaginal epithelial surface. See, e.g., Ensign et al. (2013) Biomaterials 34:6922-9.

[3298] In one embodiment, the polynucleotide is formulated as a lipoplex, such as, without limitation, the ATUPLEX™ system, the DACC system, the DBTC system and other siRNA-lipoplex technology from Silence Therapeutics (London, United Kingdom), STEMFECT™ from STEMGENT® (Cambridge, MA), and polyethylenimine (PEI) or protamine-based targeted and non-targeted delivery of nucleic acids. See Aleku et al. (2008) Cancer Res. 68:9788-9798; Strumberg et al. (2012) Int. J. Clin. Pharmacol. Ther. 50:76-78; Santel et al. (2006) Gene Ther. 13:1222-1234; Santel et al. (2006) Gene Ther. 13:1360-1370; Gutbier et al. (2010) Pulm. Pharmacol. Ther. 23:334-344; Kaufmann et al. (2010) Microvasc. Res. 80:286-293; Weide et al. (2009) J. Immunother. 32:498-507; Weide et al. (2008) J. Immunother. 31:180-188; Pascolo (2004) Expert Opin. Biol. Ther. 4:1285-1294; Fotin-Mleczek et al. (2011) J. Immunother. 34:1-15; Song et al. (2005) Nature Biotechnol. 23:709-717; Peer et al. (2007) Proc. Natl. Acad. Sci. USA 6:104:4095-4100; deFougerolles (2008) Hum. Gene Ther. 19:125-132).

[3299] In one embodiment, such formulations are also constructed or compositions altered such that they passively or actively are directed to different cell types in vivo, including but not limited to hepatocytes, immune cells, tumor cells, endothelial cells, antigen presenting cells, and leukocytes (Akinc et al. (2010) Mol. Ther. 18:1357-1364; Song et al. (2005) Nat. Biotechnol. 23:709-717; Judge et al. (2009) J. Clin. Invest. 119:661-673; Kaufmann et al. (2010) Microvasc. Res. 80:286-293; Santel et al. (2006) Gene Ther. 13:1222-1234; Santel et al. (2006) Gene Ther. 13:1360-1370; Gutbier et al. (2010) Pulm. Pharmacol. Ther. 23:334-344; Basha et al. (2011) Mol. Ther. 19:2186-2200; Fenske and Cullis (2008) Expert Opin. Drug Deliv. 5:25-44; Peer et al. (2008) Science 319:627-630; Peer and Lieberman (2011) Gene Ther. 18:1127-1133). One example of passive targeting of formulations to liver cells includes the DLin-DMA, DLin-KC2-DMA and DLin-MC3-DMA-based lipid nanoparticle formulations which have been shown to bind to apolipoprotein E and promote binding and uptake of these formulations into hepatocytes in vivo (Akinc et al. (2010) Mol. Ther. 18:1357-1364).

[3300] Formulations can also be selectively targeted through expression of different ligands on their surface as exemplified by, but not limited by, folate, transferrin, N-acetylgalactosamine (GalNAc), and antibody targeted approaches. See, e.g., Kolhatkar et al., Curr Drug Discov Technol. 2011 8:197-206; Musacchio and Torchilin, Front Biosci. 2011 16:1388-1412; Yu et al., Mol Membr Biol. 2010 27:286-298; Patil et al., Crit Rev Ther Drug Carrier Syst. 2008 25:1-61; Benoit et al., Biomacromolecules. 2011 12:2708-2714; Zhao et al., Expert Opin Drug Deliv. 2008 5:309-319; Akinc et al., Mol Ther. 2010 18:1357-1364; Srinivasan et al., Methods Mol Biol. 2012 820:105-116; Ben-Arie et al., Methods Mol Biol. 2012 757:497-507; Peer 2010 J Control Release. 20:63-68; Peer et al., Proc Natl Acad Sci USA. 2007 104:4095-4100; Kim et al., Methods Mol Biol. 2011 721:339-353; Subramanya et al., Mol Ther. 2010 18:2028-2037; Song et al., Nat Biotechnol. 2005 23:709-717; Peer et al., Science. 2008 319:627-630; and, Peer and Lieberman, Gene Ther. 2011 18:1127-1133; all of which are herein incorporated by reference in their entireties.

[3301] In one embodiment, a polynucleotide of any of the combination therapies disclosed herein, e.g., an mRNA encoding an immune response primer polypeptide, an mRNA encoding an immune response co-stimulatory signal polypeptide, an mRNA encoding a checkpoint inhibitor polypeptide, or a combination thereof, is formulated as a solid lipid nanoparticle.

[3302] A solid lipid nanoparticle (SLN) can be spherical with an average diameter between 10 to 1,000 nm. SLN possess a solid lipid core matrix that can solubilize lipophilic molecules and can be stabilized with surfactants and/or emulsifiers. In a further embodiment, the lipid nanoparticle can be a self-assembly lipid-polymer nanoparticle. See Zhang et al. (2008) ACS Nano 2:1696-1702. As a non-limiting example, the SLN can be the SLN described in International Patent Publication No. WO2013105101. As another non-limiting example, the SLN can be made by the methods or processes described in International Patent Publication No. WO2013105101.

[3303] Liposomes, lipoplexes, or lipid nanoparticles can be used to improve the efficacy of a polynucleotide (or the efficacy of a combination of polynucleotides) of any of the combination therapies disclosed herein, e.g., an mRNA encoding an immune response primer polypeptide, an mRNA encoding an immune response co-stimulatory signal polypeptide, an mRNA encoding a checkpoint inhibitor polypeptide, or a combination thereof, as these formulations can be able to increase cell transfection by the polynucleotides; and/or increase the translation of the encoded polypeptides. One such example involves the use of lipid encapsulation to enable the effective systemic delivery of polyplex plasmid DNA. See Heyes et al. (2007) Mol. Ther. 15:713-720. The liposomes, lipoplexes, or lipid nanoparticles can also be used to increase the stability of the polynucleotide.

[3304] In one embodiment, a polynucleotide of any of the combination therapies disclosed herein, e.g., an mRNA encoding an immune response primer polypeptide, an mRNA encoding an immune response co-stimulatory signal polypeptide, an mRNA encoding a checkpoint inhibitor polypeptide, or a combination thereof, can be formulated for controlled release and/or targeted delivery.

[3305] As used herein, “controlled release” refers to a pharmaceutical composition or compound release profile that conforms to a particular pattern of release to effect a therapeutic outcome. In one embodiment, the polynucleotides are encapsulated into a delivery agent described herein and/or known in the art for controlled release and/or targeted delivery. As used herein, the term “encapsulate” means to enclose, surround or encase. As it relates to the formulation of the compounds of the disclosure, encapsulation can be substantial, complete or partial. The term “substantially encapsulated” means that at least greater than 50, 60, 70, 80, 85, 90, 95, 96, 97, 98, 99, 99.9, 99.9 or greater than 99.999% of the pharmaceutical composition or compound of the disclosure can be enclosed, surrounded or encased within the delivery agent. “Partially encapsulation” means that less than 10, 10, 20, 30, 40 50 or less of the pharmaceutical composition or compound of the disclosure can be enclosed, surrounded or encased within the delivery agent. Advantageously, encapsulation can be determined by measuring the escape or the activity of the pharmaceutical composition or compound of the disclosure using fluorescence and/or electron micrograph. For example, at least 1, 5, 10, 20, 30, 40, 50, 60, 70, 80, 85, 90, 95, 96, 97, 98, 99, 99.9, 99.99 or greater than 99.99% of the pharmaceutical composition or compound of the disclosure are encapsulated in the delivery agent.

[3306] In one embodiment, the controlled release formulation includes, but is not limited to, tri-block co-polymers. As a non-limiting example, the formulation includes two different types of ti-block co-polymers. See International Publ. Nos. WO2012131104 and WO2012131106; see also U.S. Pat. Appl. Publ. Nos. US20140219923 and US20150165042, which are herein incorporated by reference in their entireties.

[3307] In another embodiment, a polynucleotide of any of the combination therapies disclosed herein, e.g., an mRNA encoding an immune response primer polypeptide, an mRNA encoding an immune response co-stimulatory signal polypeptide, an mRNA encoding a checkpoint inhibitor polypeptide, or a combination thereof, can be encapsulated into a lipid nanoparticle or a rapidly eliminated lipid nanoparticle and the lipid nanoparticles or a rapidly eliminated lipid nanoparticle can then be encapsulated into a polymer, hydrogel and/or surgical sealant described herein and/or known in the art. As a non-limiting example, the polymer, hydrogel or surgical sealant is PLGA, ethylene vinyl acetate (EVAc), poloxamer, GELSITE® (Nanotherapeutics, Inc. Alachua, FL), HYLENEX® (Halozyme Therapeutics, San Diego CA), surgical sealants such as fibrinogen polymers (Ethicon Inc. Cornelia, GA), TISSELL® (Baxter International, Inc Deerfield, IL), PEG-based sealants, or COSEAL® (Baxter International, Inc Deerfield, IL).

[3308] In another embodiment, the lipid nanoparticle is encapsulated into any polymer known in the art which can form a gel when injected into a subject. As another non-limiting example, the lipid nanoparticle is encapsulated into a polymer matrix which can be biodegradable.

[3309] In one embodiment, the formulation for controlled release and/or targeted delivery comprises a polynucleotide comprising a polynucleotide of any of the combination therapies disclosed herein, e.g., an mRNA encoding an immune response primer polypeptide, an mRNA encoding an immune response co-stimulatory signal polypeptide, an mRNA encoding a checkpoint inhibitor polypeptide, or a combination thereof, also includes at least one controlled release coating.

[3310] Controlled release coatings include, but are not limited to, OPADRY®, polyvinylpyrrolidone/vinyl acetate copolymer, polyvinylpyrrolidone, hydroxypropyl methylcellulose, hydroxypropyl cellulose, hydroxyethyl cellulose, EUDRAGIT RL®, EUDRAGIT RS® and cellulose derivatives such as ethylcellulose aqueous dispersions (AQUACOAT® and SURELEASE®).

[3311] In one embodiment, the polynucleotide controlled release and/or targeted delivery formulation comprises at least one degradable polyester which can contain polycationic side chains. Degradable polyesters include, but are not limited to, poly(serine ester), poly(L-lactide-co-L-lysine), poly(4-hydroxy-L-proline ester), and combinations thereof. In another embodiment, the degradable polyesters can include a PEG conjugation to form a PEGylated polymer.

[3312] In one embodiment, the polynucleotide controlled release and/or targeted delivery formulation comprising at least one polynucleotide comprises at least one PEG and/or PEG related polymer derivatives as described in U.S. Pat. No. 8,404,222.

[3313] In another embodiment, the polynucleotide controlled release delivery formulation comprising at least one polynucleotide is the controlled release polymer system described in U.S. Pat. Appl. Publ. No. US20130130348.

[3314] In one embodiment, a polynucleotide of any of the combination therapies disclosed herein, e.g., an mRNA encoding an immune response primer polypeptide, an mRNA encoding an immune response co-stimulatory signal polypeptide, an mRNA encoding a checkpoint inhibitor polypeptide, or a combination thereof, is encapsulated in a therapeutic nanoparticle

[3315] Therapeutic nanoparticles can be formulated by methods described herein and known in the art such as, but not limited to, International Publ. Nos. WO2010005740, WO2010030763, WO2010005721, WO2010005723, WO2012054923, U.S. Pat. Appl. Publ. Nos. US20110262491, US20100104645, US20100087337, US20100068285, US20110274759, US20100068286, US20120288541, US20130123351 and US20130230567 and U.S. Pat. Nos. 8,206,747, 8,293,276, 8,318,208 and 8,318,211. In another embodiment, therapeutic polymer nanoparticles can be identified by the methods described in U.S. Pat. Appl. Publ. No. US20120140790.

[3316] In one embodiment, a polynucleotide of any of the combination therapies disclosed herein, e.g., an mRNA encoding an immune response primer polypeptide, an mRNA encoding an immune response co-stimulatory signal polypeptide, an mRNA encoding a checkpoint inhibitor polypeptide, or a combination thereof, can be formulated for sustained release.

[3317] As used herein, “sustained release” refers to a pharmaceutical composition or compound that conforms to a release rate over a specific period of time. The period of time can include, but is not limited to, hours, days, weeks, months and years. As a non-limiting example, the sustained release nanoparticle comprises a polymer and a therapeutic agent such as, but not limited to, a polynucleotide of any of the combination therapies disclosed herein, e.g., an mRNA encoding an immune response primer polypeptide, an mRNA encoding an immune response co-stimulatory signal polypeptide, an mRNA encoding a checkpoint inhibitor polypeptide, or a combination thereof, of the present disclosure. See International Publ. No. WO2010075072 and U.S. Pat. Appl. Publ. Nos. US20100216804, US20110217377 and US20120201859. In another non-limiting example, the sustained release formulation comprises agents which permit persistent bioavailability such as, but not limited to, crystals, macromolecular gels and/or particulate suspensions. See U.S. Pat. Appl. Publ. No. US20130150295.

[3318] In one embodiment, a polynucleotide of any of the combination therapies disclosed herein, e.g., an mRNA encoding an immune response primer polypeptide, an mRNA encoding an immune response co-stimulatory signal polypeptide, an mRNA encoding a checkpoint inhibitor polypeptide, or a combination thereof, can be formulated to be target specific.

[3319] As a non-limiting example, the therapeutic nanoparticles include a corticosteroid. See International Pub. No. WO2011084518. As a non-limiting example, the therapeutic nanoparticles are formulated in nanoparticles described in International Publ. Nos. WO2008121949, WO2010005726, WO2010005725, WO2011084521 and U.S. Pat. Appl. Publ. Nos. US20100069426, US20120004293 and US20100104655.

[3320] In one embodiment, the nanoparticles of the present disclosure comprise a polymeric matrix. As a non-limiting example, the nanoparticle comprises two or more polymers such as, but not limited to, polyethylenes, polycarbonates, polyanhydrides, polyhydroxyacids, polypropylfumerates, polycaprolactones, polyamides, polyacetals, polyethers, polyesters, poly(orthoesters), polycyanoacrylates, polyvinyl alcohols, polyurethanes, polyphosphazenes, polyacrylates, polymethacrylates, polycyanoacrylates, polyureas, polystyrenes, polyamines, polylysine, poly(ethylene imine), poly(serine ester), poly(L-lactide-co-L-lysine), poly(4-hydroxy-L-proline ester) or combinations thereof.

[3321] In one embodiment, the therapeutic nanoparticle comprises a diblock copolymer. In one embodiment, the diblock copolymer includes PEG in combination with a polymer such as, but not limited to, polyethylenes, polycarbonates, polyanhydrides, polyhydroxyacids, polypropylfumerates, polycaprolactones, polyamides, polyacetals, polyethers, polyesters, poly(orthoesters), polycyanoacrylates, polyvinyl alcohols, polyurethanes, polyphosphazenes, polyacrylates, polymethacrylates, polycyanoacrylates, polyureas, polystyrenes, polyamines, polylysine, poly(ethylene imine), poly(serine ester), poly(L-lactide-co-L-lysine), poly(4-hydroxy-L-proline ester) or combinations thereof. In yet another embodiment, the diblock copolymer is a high-X diblock copolymer such as those described in International Patent Publication No. WO2013120052; see also U.S. Pat. Appl. Publ. No. US20150337068, which is herein incorporated by reference in its entirety.

[3322] As a non-limiting example the therapeutic nanoparticle comprises a PLGA-PEG block copolymer. See U.S. Pat. Appl. Publ. No. US20120004293 and U.S. Pat. No. 8,236,330. In another non-limiting example, the therapeutic nanoparticle is a stealth nanoparticle comprising a diblock copolymer of PEG and PLA or PEG and PLGA. See U.S. Pat. No. 8,246,968 and International Publication No. WO2012166923. In yet another non-limiting example, the therapeutic nanoparticle is a stealth nanoparticle or a target-specific stealth nanoparticle as described in U.S. Pat. Appl. Publ. No. US20130172406.

[3323] In one embodiment, the therapeutic nanoparticle comprises a multiblock copolymer. See, e.g., U.S. Pat. Nos. 8,263,665 and 8,287,910 and U.S. Pat. Appl. Publ. No. US20130195987. In yet another non-limiting example, the lipid nanoparticle comprises the block copolymer PEG-PLGA-PEG. See, e.g., Lee et al. (2003) Pharmaceutical Research 20:1995-2000; Li et al. (2003) Pharmaceutical Research 20:884-888; and Chang et al. (2007) J. Controlled Release. 118:245-253.

[3324] A polynucleotide of any of the combination therapies disclosed herein, e.g., an mRNA encoding an immune response primer polypeptide, an mRNA encoding an immune response co-stimulatory signal polypeptide, an mRNA encoding a checkpoint inhibitor polypeptide, or a combination thereof, can be formulated in lipid nanoparticles comprising the PEG-PLGA-PEG block copolymer.

[3325] In one embodiment, the therapeutic nanoparticle comprises a multiblock copolymer. See, e.g., U.S. Pat. Nos. 8,263,665 and 8,287,910 and U.S. Patent Appl. Publ. No. US20130195987.

[3326] In one embodiment, the block copolymers described herein are included in a polyion complex comprising a non-polymeric micelle and the block copolymer. See, e.g., U.S. Pat. App. Publ. No. US20120076836.

[3327] In one embodiment, the therapeutic nanoparticle comprises at least one acrylic polymer. Acrylic polymers include but are not limited to, acrylic acid, methacrylic acid, acrylic acid and methacrylic acid copolymers, methyl methacrylate copolymers, ethoxyethyl methacrylates, cyanoethyl methacrylate, amino alkyl methacrylate copolymer, poly(acrylic acid), poly(methacrylic acid), polycyanoacrylates and combinations thereof.

[3328] In one embodiment, the therapeutic nanoparticles comprises at least one poly(vinyl ester) polymer. The poly(vinyl ester) polymer can be a copolymer such as a random copolymer. As a non-limiting example, the random copolymer has a structure such as those described in International Application No. WO2013032829 or U.S. Pat. Appl. Publ. No. US20130121954. In one aspect, the poly(vinyl ester) polymers can be conjugated to the polynucleotides described herein.

[3329] In one embodiment, the therapeutic nanoparticle comprises at least one diblock copolymer. The diblock copolymer can be, but it not limited to, a poly(lactic) acid-poly(ethylene)glycol copolymer. See, e.g., International Patent Publication No. WO2013044219.

[3330] As a non-limiting example, the therapeutic nanoparticle are used to treat cancer. See International Publication No. WO2013044219; see also, U.S. Pat. Appl. Publ. No. US20150017245, which is herein incorporated by reference in its entirety.

[3331] In one embodiment, the therapeutic nanoparticles comprise at least one cationic polymer described herein and/or known in the art.

[3332] In one embodiment, the therapeutic nanoparticles comprise at least one amine-containing polymer such as, but not limited to polylysine, polyethylene imine, poly(amidoamine) dendrimers, poly(beta-amino esters) and combinations thereof. See, e.g., U.S. Pat. No. 8,287,849.

[3333] In another embodiment, the nanoparticles described herein comprise an amine cationic lipid such as those described in International Patent Application No. WO2013059496. In one aspect the cationic lipids have an amino-amine or an amino-amide moiety.

[3334] In one embodiment, the therapeutic nanoparticles comprise at least one degradable polyester which can contain polycationic side chains. Degradable polyesters include, but are not limited to, poly(serine ester), poly(L-lactide-co-L-lysine), poly(4-hydroxy-L-proline ester), and combinations thereof. In another embodiment, the degradable polyesters can include a PEG conjugation to form a PEGylated polymer.

[3335] In another embodiment, the therapeutic nanoparticle include a conjugation of at least one targeting ligand. The targeting ligand can be any ligand known in the art such as, but not limited to, a monoclonal antibody. See Kirpotin et al (2006) Cancer Res. 66:6732-6740.

[3336] In one embodiment, the therapeutic nanoparticle is formulated in an aqueous solution which can be used to target cancer (see International Pub No. WO2011084513 and U.S. Pat. Appl. Publ. No. US20110294717).

[3337] In one embodiment, a polynucleotide of any of the combination therapies disclosed herein, e.g., an mRNA encoding an immune response primer polypeptide, an mRNA encoding an immune response co-stimulatory signal polypeptide, an mRNA encoding a checkpoint inhibitor polypeptide, or a combination thereof, can be formulated using the methods described in U.S. Pat. No. 8,404,799.

[3338] In one embodiment, a polynucleotide of any of the combination therapies disclosed herein, e.g., an mRNA encoding an immune response primer polypeptide, an mRNA encoding an immune response co-stimulatory signal polypeptide, an mRNA encoding a checkpoint inhibitor polypeptide, or a combination thereof, can be are encapsulated in, linked to and/or associated with synthetic nanocarriers.

[3339] Synthetic nanocarriers include, but are not limited to, those described in International Pub. Nos. WO2010005740, WO2010030763, WO201213501, WO2012149252, WO2012149255, WO2012149259, WO2012149265, WO2012149268, WO2012149282, WO2012149301, WO2012149393, WO2012149405, WO2012149411, WO2012149454 and WO2013019669, and U.S. Pat. Appl. Publ. Nos. US20110262491, US20100104645, US20100087337 and US20120244222. The synthetic nanocarriers can be formulated using methods known in the art and/or described herein. As a non-limiting example, the synthetic nanocarriers can be formulated by the methods described in International Pub Nos. WO2010005740, WO2010030763 and WO201213501and U.S. Pat. Appl. Publ. Nos. US20110262491, US20100104645, US20100087337 and US2012024422. In another embodiment, the synthetic nanocarrier formulations can be lyophilized by methods described in International Pub. No. WO2011072218 and U.S. Pat. No. 8,211,473. In yet another embodiment, formulations of the present disclosure, including, but not limited to, synthetic nanocarriers, can be lyophilized or reconstituted by the methods described in US Pat. Appl. Publ. No. US20130230568.

[3340] In one embodiment, the synthetic nanocarriers contain reactive groups to release the polynucleotides described herein (see International Publ. No. WO20120952552 and U.S. Pat. Appl. Publ. No. US20120171229).

[3341] In one embodiment, the synthetic nanocarriers contain an immunostimulatory agent to enhance the immune response from delivery of the synthetic nanocarrier. As a non-limiting example, the synthetic nanocarrier can comprise a Th1 immunostimulatory agent which can enhance a Th1-based response of the immune system (see International Publ. No. WO2010123569 and U.S. Pat. Appl. Publ. No. US20110223201).

[3342] In one embodiment, the synthetic nanocarriers are formulated for targeted release. In one embodiment, the synthetic nanocarrier is formulated to release the polynucleotides at a specified pH and/or after a desired time interval. As a non-limiting example, the synthetic nanoparticle are formulated to release the polynucleotides after 24 hours and/or at a pH of 4.5 (see International Publ. Nos. WO2010138193 and WO2010138194 and U.S. Pat. Appl. Publ. Nos. US20110020388 and US20110027217).

[3343] In one embodiment, the synthetic nanocarriers are formulated for controlled and/or sustained release of the polynucleotides described herein. As a non-limiting example, the synthetic nanocarriers for sustained release are formulated by methods known in the art, described herein and/or as described in International Pub No. WO2010138192 and U.S. Pat. Appl. Publ. No. 20100303850, both of which are herein incorporated by reference in their entireties.

[3344] In one embodiment, a polynucleotide of any of the combination therapies disclosed herein, e.g., an mRNA encoding an immune response primer polypeptide, an mRNA encoding an immune response co-stimulatory signal polypeptide, an mRNA encoding a checkpoint inhibitor polypeptide, or a combination thereof, can be formulated for controlled and/or sustained release wherein the formulation comprises at least one polymer that is a crystalline side chain (CYSC) polymer. CYSC polymers are described in U.S. Pat. No. 8,399,007.

[3345] In one embodiment, a polynucleotide of any of the combination therapies disclosed herein, e.g., an mRNA encoding an immune response primer polypeptide, an mRNA encoding an immune response co-stimulatory signal polypeptide, an mRNA encoding a checkpoint inhibitor polypeptide, or a combination thereof, can be encapsulated in, linked to, and/or associated with zwitterionic lipids. Non-limiting examples of zwitterionic lipids and methods of using zwitterionic lipids are described in U.S. Pat. Appl. Publ. No. US20130216607. In one aspect, the zwitterionic lipids can be used in the liposomes and lipid nanoparticles described herein.

[3346] In one embodiment, a polynucleotide of any of the combination therapies disclosed herein, e.g., an mRNA encoding an immune response primer polypeptide, an mRNA encoding an immune response co-stimulatory signal polypeptide, an mRNA encoding a checkpoint inhibitor polypeptide, or a combination thereof, can be formulated in colloid nanocarriers as described in U.S. Pat. Appl. Publ. No. US20130197100.

[3347] In one embodiment, the nanoparticle is optimized for oral administration. The nanoparticle can comprise at least one cationic biopolymer such as, but not limited to, chitosan or a derivative thereof. As a non-limiting example, the nanoparticle can be formulated by the methods described in U.S. Pat. Appl. Publ. No. US20120282343.

[3348] In some embodiments, LNPs comprise the lipid KL52 (an amino-lipid disclosed in U.S. Pat. Appl. Publ. No. US2012/0295832). Activity and/or safety (as measured by examining one or more of ALT/AST, white blood cell count and cytokine induction) of LNP administration can be improved by incorporation of such lipids. LNPs comprising KL52 can be administered intravenously and/or in one or more doses. In some embodiments, administration of LNPs comprising KL52 results in equal or improved mRNA and/or protein expression as compared to LNPs comprising MC3.

[3349] In some embodiments, a polynucleotide of any of the combination therapies disclosed herein, e.g., an mRNA encoding an immune response primer polypeptide, an mRNA encoding an immune response co-stimulatory signal polypeptide, an mRNA encoding a checkpoint inhibitor polypeptide, or a combination thereof, can be delivered using smaller LNPs. Such particles can comprise a diameter from below 0.1 um up to 100 nm such as, but not limited to, less than 0.1 um, less than 1.0 um, less than 5 um, less than 10 um, less than 15 um, less than 20 um, less than 25 um, less than 30 um, less than 35 um, less than 40 um, less than 50 um, less than 55 um, less than 60 um, less than 65 um, less than 70 um, less than 75 um, less than 80 um, less than 85 um, less than 90 um, less than 95 um, less than 100 um, less than 125 um, less than 150 um, less than 175 um, less than 200 um, less than 225 um, less than 250 um, less than 275 um, less than 300 um, less than 325 um, less than 350 um, less than 375 um, less than 400 um, less than 425 um, less than 450 um, less than 475 um, less than 500 um, less than 525 um, less than 550 um, less than 575 um, less than 600 um, less than 625 um, less than 650 um, less than 675 um, less than 700 um, less than 725 um, less than 750 um, less than 775 um, less than 800 um, less than 825 um, less than 850 um, less than 875 um, less than 900 um, less than 925 um, less than 950 um, or less than 975 um.

[3350] In another embodiment, a polynucleotide of any of the combination therapies disclosed herein, e.g., an mRNA encoding an immune response primer polypeptide, an mRNA encoding an immune response co-stimulatory signal polypeptide, an mRNA encoding a checkpoint inhibitor polypeptide, or a combination thereof, can be delivered using smaller LNPs which can comprise a diameter from about 1 nm to about 100 nm, from about 1 nm to about 10 nm, about 1 nm to about 20 nm, from about 1 nm to about 30 nm, from about 1 nm to about 40 nm, from about 1 nm to about 50 nm, from about 1 nm to about 60 nm, from about 1 nm to about 70 nm, from about 1 nm to about 80 nm, from about 1 nm to about 90 nm, from about 5 nm to about from 100 nm, from about 5 nm to about 10 nm, about 5 nm to about 20 nm, from about 5 nm to about 30 nm, from about 5 nm to about 40 nm, from about 5 nm to about 50 nm, from about 5 nm to about 60 nm, from about 5 nm to about 70 nm, from about 5 nm to about 80 nm, from about 5 nm to about 90 nm, about 10 to about 50 nM, from about 20 to about 50 nm, from about 30 to about 50 nm, from about 40 to about 50 nm, from about 20 to about 60 nm, from about 30 to about 60 nm, from about 40 to about 60 nm, from about 20 to about 70 nm, from about 30 to about 70 nm, from about 40 to about 70 nm, from about 50 to about 70 nm, from about 60 to about 70 nm, from about 20 to about 80 nm, from about 30 to about 80 nm, from about 40 to about 80 nm, from about 50 to about 80 nm, from about 60 to about 80 nm, from about 20 to about 90 nm, from about 30 to about 90 nm, from about 40 to about 90 nm, from about 50 to about 90 nm, from about 60 to about 90 nm and/or from about 70 to about 90 nm.

[3351] In some embodiments, such LNPs are synthesized using methods comprising microfluidic mixers. Exemplary microfluidic mixers can include, but are not limited to a slit Interdigital micromixer including, but not limited to those manufactured by Microinnova (Allerheiligen bei Wildon, Austria) and/or a staggered herringbone micromixer (SHM). See Zhigaltsev et al. (2012) Langmuir 28:3633-40; Belliveau et al. (2012) Molecular Therapy—Nucleic Acids 1:e37; Chen et al. (2012) J. Am. Chem. Soc. 134:6948-51.

[3352] In some embodiments, methods of LNP generation comprising SHM, further comprise the mixing of at least two input streams wherein mixing occurs by microstructure-induced chaotic advection (MICA). According to this method, fluid streams flow through channels present in a herringbone pattern causing rotational flow and folding the fluids around each other. This method can also comprise a surface for fluid mixing wherein the surface changes orientations during fluid cycling. Methods of generating LNPs using SHM include those disclosed in U.S. Pat. Appl. Publ. Nos. US2004/0262223 and US2012/0276209.

[3353] In one embodiment, a polynucleotide of any of the combination therapies disclosed herein, e.g., an mRNA encoding an immune response primer polypeptide, an mRNA encoding an immune response co-stimulatory signal polypeptide, an mRNA encoding a checkpoint inhibitor polypeptide, or a combination thereof, of the present disclosure can be formulated in lipid nanoparticles created using a micromixer such as, but not limited to, a Slit Interdigital Microstructured Mixer (SIMM-V2) or a Standard Slit Interdigital Micro Mixer (SSIMM) or Caterpillar (CPMM) or Impinging-jet (IJMM) from the Institut fir Mikrotechnik Mainz GmbH, Mainz Germany).

[3354] In one embodiment, a polynucleotide of any of the combination therapies disclosed herein, e.g., an mRNA encoding an immune response primer polypeptide, an mRNA encoding an immune response co-stimulatory signal polypeptide, an mRNA encoding a checkpoint inhibitor polypeptide, or a combination thereof, of the present disclosure can be formulated in lipid nanoparticles created using microfluidic technology. See Whitesides (2006) Nature 442: 368-373; and Abraham et al. (2002) Science 295:647-651. As a non-limiting example, controlled microfluidic formulation includes a passive method for mixing streams of steady pressure-driven flows in micro channels at a low Reynolds number. See, e.g., Abraham et al. (2002) Science 295: 647-651.

[3355] In one embodiment, a polynucleotide of any of the combination therapies disclosed herein, e.g., an mRNA encoding an immune response primer polypeptide, an mRNA encoding an immune response co-stimulatory signal polypeptide, an mRNA encoding a checkpoint inhibitor polypeptide, or a combination thereof, can be formulated in lipid nanoparticles created using a micromixer chip such as, but not limited to, those from Harvard Apparatus (Holliston, MA) or Dolomite Microfluidics (Royston, UK). A micromixer chip can be used for rapid mixing of two or more fluid streams with a split and recombine mechanism.

[3356] In one embodiment, a polynucleotide of any of the combination therapies disclosed herein, e.g., an mRNA encoding an immune response primer polypeptide, an mRNA encoding an immune response co-stimulatory signal polypeptide, an mRNA encoding a checkpoint inhibitor polypeptide, or a combination thereof, can be formulated for delivery using the drug encapsulating microspheres described in International Patent Publication No. WO2013063468 or U.S. Pat. No. 8,440,614. The microspheres can comprise a compound of the formula (I), (II), (III), (IV), (V) or (VI) as described in International Patent Publication No. WO2013063468. In another aspect, the amino acid, peptide, polypeptide, lipids (APPL) are useful in delivering the polynucleotides of the disclosure to cells. See International Patent Publication No. WO2013063468; see also, U.S. Pat. Appl. Publ. No. US20130158021, which is herein incorporated by reference in its entirety.

[3357] In one embodiment, a polynucleotide of any of the combination therapies disclosed herein, e.g., an mRNA encoding an immune response primer polypeptide, an mRNA encoding an immune response co-stimulatory signal polypeptide, an mRNA encoding a checkpoint inhibitor polypeptide, or a combination thereof, can be formulated in lipid nanoparticles having a diameter from about 10 to about 100 nm such as, but not limited to, about 10 to about 20 nm, about 10 to about 30 nm, about 10 to about 40 nm, about 10 to about 50 nm, about 10 to about 60 nm, about 10 to about 70 nm, about 10 to about 80 nm, about 10 to about 90 nm, about 20 to about 30 nm, about 20 to about 40 nm, about 20 to about 50 nm, about 20 to about 60 nm, about 20 to about 70 nm, about 20 to about 80 nm, about 20 to about 90 nm, about 20 to about 100 nm, about 30 to about 40 nm, about 30 to about 50 nm, about 30 to about 60 nm, about 30 to about 70 nm, about 30 to about 80 nm, about 30 to about 90 nm, about 30 to about 100 nm, about 40 to about 50 nm, about 40 to about 60 nm, about 40 to about 70 nm, about 40 to about 80 nm, about 40 to about 90 nm, about 40 to about 100 nm, about 50 to about 60 nm, about 50 to about 70 nm about 50 to about 80 nm, about 50 to about 90 nm, about 50 to about 100 nm, about 60 to about 70 nm, about 60 to about 80 nm, about 60 to about 90 nm, about 60 to about 100 nm, about 70 to about 80 nm, about 70 to about 90 nm, about 70 to about 100 nm, about 80 to about 90 nm, about 80 to about 100 nm and/or about 90 to about 100 nm.

[3358] In one embodiment, the lipid nanoparticles have a diameter from about 10 to 500 nm. In one embodiment, the lipid nanoparticle has a diameter greater than 100 nm, greater than 150 nm, greater than 200 nm, greater than 250 nm, greater than 300 nm, greater than 350 nm, greater than 400 nm, greater than 450 nm, greater than 500 nm, greater than 550 nm, greater than 600 nm, greater than 650 nm, greater than 700 nm, greater than 750 nm, greater than 800 nm, greater than 850 nm, greater than 900 nm, greater than 950 nm or greater than 1000 nm.

[3359] In one aspect, the lipid nanoparticle is a limit size lipid nanoparticle described in International Patent Publication No. WO2013059922 (see also U.S. Pat. Appl. Publ. No. US20140328759, which is herein incorporated by reference in its entirety). The limit size lipid nanoparticle can comprise a lipid bilayer surrounding an aqueous core or a hydrophobic core; where the lipid bilayer can comprise a phospholipid such as, but not limited to, diacylphosphatidylcholine, a diacylphosphatidylethanolamine, a ceramide, a sphingomyelin, a dihydrosphingomyelin, a cephalin, a cerebroside, a C8-C20 fatty acid diacylphophatidylcholine, and 1-palmitoyl-2-oleoyl phosphatidylcholine (POPC). In another aspect the limit size lipid nanoparticle can comprise a polyethylene glycol-lipid such as, but not limited to, DLPE-PEG, DMPE-PEG, DPPC-PEG and DSPE-PEG.

[3360] In one embodiment, a polynucleotide of any of the combination therapies disclosed herein, e.g., an mRNA encoding an immune response primer polypeptide, an mRNA encoding an immune response co-stimulatory signal polypeptide, an mRNA encoding a checkpoint inhibitor polypeptide, or a combination thereof, can be delivered, localized, and/or concentrated in a specific location (e.g., a specific organ, tissue, physiological compartment, cell type, etc.) using the delivery methods described in International Patent Publication No. WO2013063530. See also, U.S. Pat. Appl. Publ. No. US20140323907, which is herein incorporated by reference in its entirety. As a non-limiting example, a subject can be administered an empty polymeric particle prior to, simultaneously with or after delivering the polynucleotides to the subject. The empty polymeric particle undergoes a change in volume once in contact with the subject and becomes lodged, embedded, immobilized or entrapped at a specific location in the subject.

[3361] In one embodiment, a polynucleotide of any of the combination therapies disclosed herein, e.g., an mRNA encoding an immune response primer polypeptide, an mRNA encoding an immune response co-stimulatory signal polypeptide, an mRNA encoding a checkpoint inhibitor polypeptide, or a combination thereof, can be formulated in an active substance release system (see, e.g., U.S. Patent Appl. Publ. No. US20130102545). The active substance release system can comprise 1) at least one nanoparticle bonded to an oligonucleotide inhibitor strand which is hybridized with a catalytically active nucleic acid and 2) a compound bonded to at least one substrate molecule bonded to a therapeutically active substance (e.g., polynucleotides described herein), where the therapeutically active substance is released by the cleavage of the substrate molecule by the catalytically active nucleic acid.

[3362] In one embodiment, a polynucleotide of any of the combination therapies disclosed herein, e.g., an mRNA encoding an immune response primer polypeptide, an mRNA encoding an immune response co-stimulatory signal polypeptide, an mRNA encoding a checkpoint inhibitor polypeptide, or a combination thereof, can be formulated in a nanoparticle comprising an inner core comprising a non-cellular material and an outer surface comprising a cellular membrane. The cellular membrane can be derived from a cell or a membrane derived from a virus. As a non-limiting example, the nanoparticle is made by the methods described in International Patent Publication No. WO2013052167. As another non-limiting example, the nanoparticle described in International Patent Publication No. WO2013052167, is used to deliver the polynucleotides described herein. See also, U.S. Pat. Appl. Publ. No. US20130337066, which is herein incorporated by reference in its entirety.

[3363] In one embodiment, a polynucleotide of any of the combination therapies disclosed herein, e.g., an mRNA encoding an immune response primer polypeptide, an mRNA encoding an immune response co-stimulatory signal polypeptide, an mRNA encoding a checkpoint inhibitor polypeptide, or a combination thereof, can be formulated in porous nanoparticle-supported lipid bilayers (protocells). Protocells are described in International Patent Publication No. WO2013056132 (see also U.S. Pat. Appl. Publ. No. US20150272885, which is herein incorporated by reference in its entirety).

[3364] In one embodiment, a polynucleotide of any of the combination therapies disclosed herein, e.g., an mRNA encoding an immune response primer polypeptide, an mRNA encoding an immune response co-stimulatory signal polypeptide, an mRNA encoding a checkpoint inhibitor polypeptide, or a combination thereof, can be formulated in polymeric nanoparticles as described in or made by the methods described in U.S. Pat. Nos. 8,420,123 and 8,518,963 and European Patent No. EP2073848B1 As a non-limiting example, the polymeric nanoparticle has a high glass transition temperature such as the nanoparticles described in or nanoparticles made by the methods described in U.S. Pat. No. 8,518,963. As another non-limiting example, the polymer nanoparticle for oral and parenteral formulations is made by the methods described in European Patent No. EP2073848B1.

[3365] In another embodiment, a polynucleotide of any of the combination therapies disclosed herein, e.g., an mRNA encoding an immune response primer polypeptide, an mRNA encoding an immune response co-stimulatory signal polypeptide, an mRNA encoding a checkpoint inhibitor polypeptide, or a combination thereof, can be formulated in nanoparticles used in imaging (e.g., as a contrast medium in magnetic resonance imaging). The nanoparticles can be liposome nanoparticles such as those described in U.S. Pat. Appl. Publ. No. US20130129636. As a non-limiting example, the liposome can comprise gadolinium(III)2-{4,7-bis-carboxymethyl-10-[(N,N-distearylamidomethyl-N′-amido-methyl]-1,4,7,10-tetra-azacyclododec-1-yl}-acetic acid and a neutral, fully saturated phospholipid component (see, e.g., U.S. Pat. Appl. Publ. No. US20130129636).

[3366] In one embodiment, the nanoparticles which can be used in the present disclosure are formed by the methods described in U.S. Pat. Appl. Publ. No. US20130130348.

[3367] The nanoparticles of the present disclosure can further include nutrients such as, but not limited to, those which deficiencies can lead to health hazards from anemia to neural tube defects. See, e.g, the nanoparticles described in International Patent Publication No WO2013072929; see also, U.S. Pat. Appl. Publ. No. US20150224035, which is herein incorporated by reference in its entirety. As a non-limiting example, the nutrient is iron in the form of ferrous, ferric salts or elemental iron, iodine, folic acid, vitamins or micronutrients.

[3368] In one embodiment, a polynucleotide of any of the combination therapies disclosed herein, e.g., an mRNA encoding an immune response primer polypeptide, an mRNA encoding an immune response co-stimulatory signal polypeptide, an mRNA encoding a checkpoint inhibitor polypeptide, or a combination thereof, can be formulated in a swellable nanoparticle. The swellable nanoparticle can be, but is not limited to, those described in U.S. Pat. No. 8,440,231. As a non-limiting embodiment, the swellable nanoparticle is used for delivery of the polynucleotides of the present disclosure to the pulmonary system (see, e.g., U.S. Pat. No. 8,440,231).

[3369] In one embodiments, a polynucleotide of any of the combination therapies disclosed herein, e.g., an mRNA encoding an immune response primer polypeptide, an mRNA encoding an immune response co-stimulatory signal polypeptide, an mRNA encoding a checkpoint inhibitor polypeptide, or a combination thereof, can be formulated in polyanhydride nanoparticles such as, but not limited to, those described in U.S. Pat. No. 8,449,916.

[3370] The nanoparticles and microparticles of the present disclosure can be geometrically engineered to modulate macrophage and/or the immune response. In one aspect, the geometrically engineered particles can have varied shapes, sizes and/or surface charges in order to incorporated the polynucleotides of the present disclosure for targeted delivery such as, but not limited to, pulmonary delivery (see, e.g., International Publication No WO2013082111). Other physical features the geometrically engineering particles can have include, but are not limited to, fenestrations, angled arms, asymmetry and surface roughness, charge which can alter the interactions with cells and tissues. As a non-limiting example, nanoparticles of the present disclosure are made by the methods described in International Publication No WO2013082111 (see also U.S. Pat. Appl. Publ. No. US20150037428).

[3371] In one embodiment, the nanoparticles of the present disclosure are water soluble nanoparticles such as, but not limited to, those described in International Publication No. WO2013090601 (see also, U.S. Pat. Appl. Publ. No. US20130184444). The nanoparticles can be inorganic nanoparticles which have a compact and zwitterionic ligand in order to exhibit good water solubility. The nanoparticles can also have small hydrodynamic diameters (HD), stability with respect to time, pH, and salinity and a low level of non-specific protein binding.

[3372] In one embodiment, the nanoparticles of the present disclosure are developed by the methods described in U.S. Patent Appl. Publ. No. US20130172406.

[3373] In one embodiment, the nanoparticles of the present disclosure are stealth nanoparticles or target-specific stealth nanoparticles such as, but not limited to, those described in U.S. Patent Appl. Publ. No. US20130172406. The nanoparticles of the present disclosure can be made by the methods described in U.S. Patent Appl. Publ. No. US20130172406.

[3374] In another embodiment, the stealth or target-specific stealth nanoparticles comprise a polymeric matrix. The polymeric matrix can comprise two or more polymers such as, but not limited to, polyethylenes, polycarbonates, polyanhydrides, polyhydroxyacids, polypropylfumerates, polycaprolactones, polyamides, polyacetals, polyethers, polyesters, poly(orthoesters), polycyanoacrylates, polyvinyl alcohols, polyurethanes, polyphosphazenes, polyacrylates, polymethacrylates, polycyanoacrylates, polyureas, polystyrenes, polyamines, polyesters, polyanhydrides, polyethers, polyurethanes, polymethacrylates, polyacrylates, polycyanoacrylates or combinations thereof.

[3375] In one embodiment, the nanoparticle is a nanoparticle-nucleic acid hybrid structure having a high density nucleic acid layer. As a non-limiting example, the nanoparticle-nucleic acid hybrid structure is made by the methods described in US Patent Appl. Publ. No. US20130171646. The nanoparticle can comprise a nucleic acid such as, but not limited to, polynucleotides described herein and/or known in the art.

[3376] At least one of the nanoparticles of the present disclosure can be embedded in in the core a nanostructure or coated with a low density porous 3-D structure or coating which is capable of carrying or associating with at least one payload within or on the surface of the nanostructure. Non-limiting examples of the nanostructures comprising at least one nanoparticle are described in International Patent Publication No. WO2013123523. See also U.S. Patent Appl. Publ. No. US20150037249, which is herein incorporated by reference in its entirety.

### Hyaluronidase

[3377] The intramuscular, intratumoral, or subcutaneous localized injection of a polynucleotide of any of the combination therapies disclosed herein, e.g., an mRNA encoding an immune response primer polypeptide, an mRNA encoding an immune response co-stimulatory signal polypeptide, an mRNA encoding a checkpoint inhibitor polypeptide, or a combination thereof, can include hyaluronidase, which catalyzes the hydrolysis of hyaluronan.

[3378] By catalyzing the hydrolysis of hyaluronan, a constituent of the interstitial barrier, hyaluronidase lowers the viscosity of hyaluronan, thereby increasing tissue permeability (Frost, Expert Opin. Drug Deliv. (2007) 4:427-440). It is useful to speed their dispersion and systemic distribution of encoded proteins produced by transfected cells. Alternatively, the hyaluronidase can be used to increase the number of cells exposed to a polynucleotide of the disclosure administered intramuscularly, intratumorally, or subcutaneously.

### Nanoparticle Mimics

[3379] A polynucleotide of any of the combination therapies disclosed herein, e.g., an mRNA encoding an immune response primer polypeptide, an mRNA encoding an immune response co-stimulatory signal polypeptide, an mRNA encoding a checkpoint inhibitor polypeptide, or a combination thereof, can be encapsulated within and/or absorbed to a nanoparticle mimic. A nanoparticle mimic can mimic the delivery function organisms or particles such as, but not limited to, pathogens, viruses, bacteria, fungus, parasites, prions and cells. As a non-limiting example the polynucleotides of the disclosure can be encapsulated in a non-virion particle which can mimic the delivery function of a virus (see International Pub. No. WO2012006376 and U.S. Patent Appl. Publ. Nos. US20130171241 and US20130195968).

### Nanotubes

[3380] A polynucleotide of any of the combination therapies disclosed herein, e.g., an mRNA encoding an immune response primer polypeptide, an mRNA encoding an immune response co-stimulatory signal polypeptide, an mRNA encoding a checkpoint inhibitor polypeptide, or a combination thereof, can be attached or otherwise bound to at least one nanotube such as, but not limited to, rosette nanotubes, rosette nanotubes having twin bases with a linker, carbon nanotubes and/or single-walled carbon nanotubes. The polynucleotides can be bound to the nanotubes through forces such as, but not limited to, steric, ionic, covalent and/or other forces. Nanotubes and nanotube formulations comprising polynucleotides are described in International Patent Application No. PCT/US2014/027077 (published as WO2014152211).

### Self-Assembled Nanoparticles

[3381] A polynucleotide of any of the combination therapies disclosed herein, e.g., an mRNA encoding an immune response primer polypeptide, an mRNA encoding an immune response co-stimulatory signal polypeptide, an mRNA encoding a checkpoint inhibitor polypeptide, or a combination thereof, can be formulated in self-assembled nanoparticles. Nucleic acid self-assembled nanoparticles are described in International Patent Application No. PCT/US2014/027077 (published as WO201415221 1), such as in paragraphs [000740]-[000743]. Polymer-based self-assembled nanoparticles are described in International Patent Application No. PCT/US2014/027077. See also U.S. Patent Appl. Publ. No. US20160038612, which is herein incorporated by reference in its entirety.

### Self-Assembled Macromolecules

[3382] A polynucleotide of any of the combination therapies disclosed herein, e.g., an mRNA encoding an immune response primer polypeptide, an mRNA encoding an immune response co-stimulatory signal polypeptide, an mRNA encoding a checkpoint inhibitor polypeptide, or a combination thereof, can be formulated in amphiphilic macromolecules (AMs) for delivery. AMs comprise biocompatible amphiphilic polymers which have an alkylated sugar backbone covalently linked to poly(ethylene glycol). In aqueous solution, the AMs self-assemble to form micelles. Non-limiting examples of methods of forming AMs and AMs are described in U.S. Patent Appl. Publ. No. US20130217753.

### Inorganic Nanoparticles

[3383] A polynucleotide of any of the combination therapies disclosed herein, e.g., an mRNA encoding an immune response primer polypeptide, an mRNA encoding an immune response co-stimulatory signal polypeptide, an mRNA encoding a checkpoint inhibitor polypeptide, or a combination thereof, can be formulated in inorganic nanoparticles (U.S. Pat. No. 8,257,745). The inorganic nanoparticles can include, but are not limited to, clay substances that are water swellable. As a non-limiting example, the inorganic nanoparticle include synthetic smectite clays which are made from simple silicates (See e.g., U.S. Pat. Nos. 5,585,108 and 8,257,745).

[3384] In some embodiments, the inorganic nanoparticles comprises a core of the polynucleotides disclosed herein and a polymer shell. The polymer shell can be any of the polymers described herein and are known in the art. In an additional embodiment, the polymer shell can be used to protect the polynucleotides in the core.

### Semi-conductive and Metallic Nanoparticles

[3385] A polynucleotide of any of the combination therapies disclosed herein, e.g., an mRNA encoding an immune response primer polypeptide, an mRNA encoding an immune response co-stimulatory signal polypeptide, an mRNA encoding a checkpoint inhibitor polypeptide, or a combination thereof, can be formulated in water-dispersible nanoparticle comprising a semiconductive or metallic material (U.S. Patent Appl. Publ. No. US20120228565) or formed in a magnetic nanoparticle (U.S. Patent Appl. Publ. No. US20120265001 and US20120283503). The water-dispersible nanoparticles can be hydrophobic nanoparticles or hydrophilic nanoparticles.

[3386] In some embodiments, the semi-conductive and/or metallic nanoparticles can comprise a core of the polynucleotides disclosed herein and a polymer shell. The polymer shell can be any of the polymers described herein and are known in the art. In an additional embodiment, the polymer shell can be used to protect the polynucleotides in the core.

### Surgical Sealants: Gels and Hydrogels

[3387] A polynucleotide of any of the combination therapies disclosed herein, e.g., an mRNA encoding an immune response primer polypeptide, an mRNA encoding an immune response co-stimulatory signal polypeptide, an mRNA encoding a checkpoint inhibitor polypeptide, or a combination thereof, are encapsulated into any hydrogel known in the art which forms a gel when injected into a subject. Surgical sealants such as gels and hydrogels are described in International Patent Application No. PCT/US2014/027077.

### Suspension Formulations

[3388] In some embodiments, suspension formulations are provided comprising polynucleotides, water immiscible oil depots, surfactants and/or co-surfactants and/or co-solvents. Combinations of oils and surfactants can enable suspension formulation with polynucleotides. Delivery of polynucleotides in a water immiscible depot can be used to improve bioavailability through sustained release of mRNA from the depot to the surrounding physiologic environment and prevent polynucleotides degradation by nucleases.

[3389] In some embodiments, suspension formulations of mRNA are prepared using combinations of polynucleotides, oil-based solutions and surfactants. Such formulations can be prepared as a two-part system comprising an aqueous phase comprising polynucleotides and an oil-based phase comprising oil and surfactants. Exemplary oils for suspension formulations can include, but are not limited to sesame oil and Miglyol (comprising esters of saturated coconut and palm kernel oil-derived caprylic and capric fatty acids and glycerin or propylene glycol), corn oil, soybean oil, peanut oil, beeswax and/or palm seed oil. Exemplary surfactants can include, but are not limited to Cremophor, polysorbate 20, polysorbate 80, polyethylene glycol, transcutol, CAPMUL®, labrasol, isopropyl myristate, and/or Span 80. In some embodiments, suspensions can comprise co-solvents including, but not limited to ethanol, glycerol and/or propylene glycol.

[3390] Suspensions can be formed by first preparing polynucleotides formulation comprising an aqueous solution of polynucleotide and an oil-based phase comprising one or more surfactants. Suspension formation occurs as a result of mixing the two phases (aqueous and oil-based). In some embodiments, such a suspension can be delivered to an aqueous phase to form an oil-in-water emulsion. In some embodiments, delivery of a suspension to an aqueous phase results in the formation of an oil-in-water emulsion in which the oil-based phase comprising polynucleotides forms droplets that can range in size from nanometer-sized droplets to micrometer-sized droplets. In some embodiments, specific combinations of oils, surfactants, cosurfactants and/or co-solvents can be utilized to suspend polynucleotides in the oil phase and/or to form oil-in-water emulsions upon delivery into an aqueous environment.

[3391] In some embodiments, suspensions provide modulation of the release of polynucleotides into the surrounding environment. In such embodiments, polynucleotides release can be modulated by diffusion from a water immiscible depot followed by resolubilization into a surrounding environment (e.g. an aqueous environment).

[3392] In some embodiments, polynucleotides within a water immiscible depot (e.g. suspended within an oil phase) result in altered polynucleotides stability (e.g. altered degradation by nucleases).

[3393] In some embodiments, a polynucleotide of any of the combination therapies disclosed herein, e.g., an mRNA encoding an immune response primer polypeptide, an mRNA encoding an immune response co-stimulatory signal polypeptide, an mRNA encoding a checkpoint inhibitor polypeptide, or a combination thereof, can be formulated such that upon injection, an emulsion forms spontaneously (e.g. when delivered to an aqueous phase). Such particle formation can provide a high surface area to volume ratio for release of polynucleotides from an oil phase to an aqueous phase.

[3394] In some embodiments, a polynucleotide of any of the combination therapies disclosed herein, e.g., an mRNA encoding an immune response primer polypeptide, an mRNA encoding an immune response co-stimulatory signal polypeptide, an mRNA encoding a checkpoint inhibitor polypeptide, or a combination thereof, can be formulated in a nanoemulsion such as, but not limited to, the nanoemulsions described in U.S. Pat. No. 8,496,945. The nanoemulsions can comprise nanoparticles described herein. As a non-limiting example, the nanoparticles can comprise a liquid hydrophobic core which can be surrounded or coated with a lipid or surfactant layer. The lipid or surfactant layer can comprise at least one membrane-integrating peptide and can also comprise a targeting ligand (see, e.g., U.S. Pat. No. 8,496,945).

### Cations and Anions

[3395] Formulations of a polynucleotide of any of the combination therapies disclosed herein, e.g., an mRNA encoding an immune response primer polypeptide, an mRNA encoding an immune response co-stimulatory signal polypeptide, an mRNA encoding a checkpoint inhibitor polypeptide, or a combination thereof, can include cations or anions. In some embodiments, the formulations include metal cations such as, but not limited to, Zn²⁺, Ca²⁺, Cu²⁺, Mg²⁺ and combinations thereof. As a non-limiting example, formulations include polymers and a polynucleotides complexed with a metal cation (see, e.g., U.S. Pat. Nos. 6,265,389 and 6,555,525).

[3396] In some embodiments, cationic nanoparticles comprising combinations of divalent and monovalent cations are formulated with polynucleotides. Such nanoparticles can form spontaneously in solution over a given period (e.g. hours, days, etc). Such nanoparticles do not form in the presence of divalent cations alone or in the presence of monovalent cations alone. The delivery of polynucleotides in cationic nanoparticles or in one or more depot comprising cationic nanoparticles can improve polynucleotide bioavailability by acting as a long-acting depot and/or reducing the rate of degradation by nucleases.

### Molded Nanoparticles and Microparticles

[3397] a polynucleotide of any of the combination therapies disclosed herein, e.g., an mRNA encoding an immune response primer polypeptide, an mRNA encoding an immune response co-stimulatory signal polypeptide, an mRNA encoding a checkpoint inhibitor polypeptide, or a combination thereof, can be formulated in nanoparticles and/or microparticles. As an example, the nanoparticles and/or microparticles can be made using the PRINT® technology by LIQUIDA TECHNOLOGIES® (Morrisville, NC) (see, e.g., International Pub. No. WO2007024323).

[3398] In some embodiments, the nanoparticles comprise a core of the polynucleotides disclosed herein and a polymer shell. The polymer shell can be any of the polymers described herein and are known in the art. In an additional embodiment, the polymer shell can be used to protect the polynucleotides in the core.

[3399] In some embodiments, a polynucleotide of any of the combination therapies disclosed herein, e.g., an mRNA encoding an immune response primer polypeptide, an mRNA encoding an immune response co-stimulatory signal polypeptide, an mRNA encoding a checkpoint inhibitor polypeptide, or a combination thereof, can be formulated in microparticles. The microparticles can contain a core of the polynucleotides and a cortex of a biocompatible and/or biodegradable polymer. As a non-limiting example, the microparticles which can be used with the present disclosure can be those described in U.S. Pat. No. 8,460,709, U.S. Patent Appl. Publ. No. US20130129830 and International Patent Publication No WO2013075068. As another non-limiting example, the microparticles can be designed to extend the release of the polynucleotides of the present disclosure over a desired period of time (see e.g, extended release of a therapeutic protein in U.S. Patent Appl. Publ. No. US20130129830).

### NanoJackets and NanoLiposomes

[3400] A polynucleotide of any of the combination therapies disclosed herein, e.g., an mRNA encoding an immune response primer polypeptide, an mRNA encoding an immune response co-stimulatory signal polypeptide, an mRNA encoding a checkpoint inhibitor polypeptide, or a combination thereof, can be formulated in NanoJackets and NanoLiposomes by Keystone Nano (State College, PA). NanoJackets are made of compounds that are naturally found in the body including calcium, phosphate and can also include a small amount of silicates. Nanojackets can range in size from 5 to 50 nm and can be used to deliver hydrophilic and hydrophobic compounds such as, but not limited to, polynucleotides.

[3401] NanoLiposomes are made of lipids such as, but not limited to, lipids which naturally occur in the body. NanoLiposomes can range in size from 60-80 nm and can be used to deliver hydrophilic and hydrophobic compounds such as, but not limited to, polynucleotides. In one aspect, a polynucleotide of any of the combination therapies disclosed herein, e.g., an mRNA encoding an immune response primer polypeptide, an mRNA encoding an immune response co-stimulatory signal polypeptide, an mRNA encoding a checkpoint inhibitor polypeptide, or a combination thereof, can be formulated in a NanoLiposome such as, but not limited to, Ceramide NanoLiposomes.

### Minicells

[3402] In one aspect, a polynucleotide of any of the combination therapies disclosed herein, e.g., an mRNA encoding an immune response primer polypeptide, an mRNA encoding an immune response co-stimulatory signal polypeptide, an mRNA encoding a checkpoint inhibitor polypeptide, or a combination thereof, can be formulated in bacterial minicells. As a non-limiting example, bacterial minicells are those described in International Publication No. WO2013088250 or U.S. Patent Publication No. US20130177499. The bacterial minicells comprising therapeutic agents such as polynucleotides described herein can be used to deliver the therapeutic agents to brain tumors.

### Semi-solid Compositions

[3403] In some embodiments, a polynucleotide of any of the combination therapies disclosed herein, e.g., an mRNA encoding an immune response primer polypeptide, an mRNA encoding an immune response co-stimulatory signal polypeptide, an mRNA encoding a checkpoint inhibitor polypeptide, or a combination thereof, can be formulated with a hydrophobic matrix to form a semi-solid composition. As a non-limiting example, the semi-solid composition or paste-like composition is made by the methods described in International Patent Publication No. WO201307604. The semi-solid composition can be a sustained release formulation as described in International Patent Publication No. WO201307604.

[3404] In another embodiment, the semi-solid composition further has a micro-porous membrane or a biodegradable polymer formed around the composition (see e.g., International Patent Publication No. WO201307604).

[3405] The semi-solid composition using a polynucleotide of any of the combination therapies disclosed herein, e.g., an mRNA encoding an immune response primer polypeptide, an mRNA encoding an immune response co-stimulatory signal polypeptide, an mRNA encoding a checkpoint inhibitor polypeptide, or a combination thereof, can have the characteristics of the semi-solid mixture as described in International Patent Publication No WO201307604 (e.g., a modulus of elasticity of at least 10-4 N mm-2, and/or a viscosity of at least 100mPa s).

### Exosomes

[3406] In some embodiments, a polynucleotide of any of the combination therapies disclosed herein, e.g., an mRNA encoding an immune response primer polypeptide, an mRNA encoding an immune response co-stimulatory signal polypeptide, an mRNA encoding a checkpoint inhibitor polypeptide, or a combination thereof, can be formulated in exosomes. The exosomes can be loaded with at least one polynucleotide and delivered to cells, tissues and/or organisms. As a non-limiting example, a polynucleotide of any of the combination therapies disclosed herein, e.g., an mRNA encoding an immune response primer polypeptide, an mRNA encoding an immune response co-stimulatory signal polypeptide, an mRNA encoding a checkpoint inhibitor polypeptide, or a combination thereof, can be loaded in the exosomes described in International Publication No. WO2013084000.

### Silk-Based Delivery

[3407] In some embodiments, a polynucleotide of any of the combination therapies disclosed herein, e.g., an mRNA encoding an immune response primer polypeptide, an mRNA encoding an immune response co-stimulatory signal polypeptide, an mRNA encoding a checkpoint inhibitor polypeptide, or a combination thereof, can be formulated in a sustained release silk-based delivery system. The silk-based delivery system can be formed by contacting a silk fibroin solution with a therapeutic agent such as, but not limited to, a polynucleotide of any of the combination therapies disclosed herein, e.g., an mRNA encoding an immune response primer polypeptide, an mRNA encoding an immune response co-stimulatory signal polypeptide, an mRNA encoding a checkpoint inhibitor polypeptide, or a combination thereof. As a non-limiting example, the sustained release silk-based delivery system which can be used in the present disclosure and methods of making such system are described in U.S. Patent Publication No. 20130177611.

### Microparticles

[3408] In some embodiments, formulations comprising a polynucleotide of any of the combination therapies disclosed herein, e.g., an mRNA encoding an immune response primer polypeptide, an mRNA encoding an immune response co-stimulatory signal polypeptide, an mRNA encoding a checkpoint inhibitor polypeptide, or a combination thereof, comprise microparticles. The microparticles can comprise a polymer described herein and/or known in the art such as, but not limited to, poly(u-hydroxy acid), a polyhydroxy butyric acid, a polycaprolactone, a polyorthoester and a polyanhydride. The microparticle can have adsorbent surfaces to adsorb biologically active molecules such as polynucleotides. As a non-limiting example microparticles for use with the present disclosure and methods of making microparticles are described in U.S. Patent Publication No. US2013195923 and US20130195898 and U.S. Pat. Nos. 8,309,139 and 8,206,749.

[3409] In another embodiment, the formulation is a microemulsion comprising microparticles and polynucleotides. As a non-limiting example, microemulsions comprising microparticles are described in U.S. Patent Publication Nos. 2013195923 and 20130195898 and U.S. Pat. Nos. 8,309,139 and 8,206,749.

### Amino Acid Lipids

[3410] In some embodiments, a polynucleotide of any of the combination therapies disclosed herein, e.g., an mRNA encoding an immune response primer polypeptide, an mRNA encoding an immune response co-stimulatory signal polypeptide, an mRNA encoding a checkpoint inhibitor polypeptide, or a combination thereof, can be formulated in amino acid lipids. Amino acid lipids are lipophilic compounds comprising an amino acid residue and one or more lipophilic tails. Non-limiting examples of amino acid lipids and methods of making amino acid lipids are described in U.S. Pat. No. 8,501,824.

[3411] In some embodiments, the amino acid lipids have a hydrophilic portion and a lipophilic portion. The hydrophilic portion can be an amino acid residue and a lipophilic portion can comprise at least one lipophilic tail.

[3412] In some embodiments, the amino acid lipid formulations are used to deliver the polynucleotides to a subject.

[3413] In another embodiment, the amino acid lipid formulations deliver a polynucleotide in releasable form which comprises an amino acid lipid that binds and releases the polynucleotides. As a non-limiting example, the release of the polynucleotides can be provided by an acid-labile linker such as, but not limited to, those described in U.S. Pat. Nos. 7,098,032, 6,897,196, 6,426,086, 7,138,382, 5,563,250, and 5,505,931. Microvesicles

[3414] In some embodiments, a polynucleotide of any of the combination therapies disclosed herein, e.g., an mRNA encoding an immune response primer polypeptide, an mRNA encoding an immune response co-stimulatory signal polypeptide, an mRNA encoding a checkpoint inhibitor polypeptide, or a combination thereof, can be formulated in microvesicles. Non-limiting examples of microvesicles include those described in US20130209544.

[3415] In some embodiments, the microvesicle is an ARRDC1-mediated microvesicles (ARMMs). Non-limiting examples of ARMMs and methods of making ARMMs are described in International Patent Publication No. WO2013119602.

### Interpolyelectrolyte Complexes

[3416] In some embodiments, a polynucleotide of any of the combination therapies disclosed herein, e.g., an mRNA encoding an immune response primer polypeptide, an mRNA encoding an immune response co-stimulatory signal polypeptide, an mRNA encoding a checkpoint inhibitor polypeptide, or a combination thereof, can be formulated in an interpolyelectrolyte complex. Interpolyelectrolyte complexes are formed when charge-dynamic polymers are complexed with one or more anionic molecules. Non-limiting examples of charge-dynamic polymers and interpolyelectrolyte complexes and methods of making interpolyelectrolyte complexes are described in U.S. Pat. No. 8,524,368.

### Crystalline Polymeric Systems

[3417] In some embodiments, a polynucleotide of any of the combination therapies disclosed herein, e.g., an mRNA encoding an immune response primer polypeptide, an mRNA encoding an immune response co-stimulatory signal polypeptide, an mRNA encoding a checkpoint inhibitor polypeptide, or a combination thereof, can be formulated a crystalline polymeric system.

[3418] Crystalline polymeric systems are polymers with crystalline moieties and/or terminal units comprising crystalline moieties. Non-limiting examples of polymers with crystalline moieties and/or terminal units comprising crystalline moieties termed “CYC polymers,” crystalline polymer systems and methods of making such polymers and systems are described in U.S. Pat. No. 8,524,259. Excipients

[3419] Pharmaceutical formulations can additionally comprise a pharmaceutically acceptable excipient, which, as used herein, includes, but are not limited to, any and all solvents, dispersion media, diluents, or other liquid vehicles, dispersion or suspension aids, surface active agents, isotonic agents, thickening or emulsifying agents, preservatives, solid binders, lubricants, flavoring agents, stabilizers, antioxidants, osmolality adjusting agents, pH adjusting agents and the like, as suited to the particular dosage form desired. Various excipients for formulating pharmaceutical compositions and techniques for preparing the composition are known in the art (see Remington: The Science and Practice of Pharmacy, 21st Edition, A. R. Gennaro (Lippincott, Williams & Wilkins, Baltimore, M D, 2006). The use of a conventional excipient medium can be contemplated within the scope of the present disclosure, except insofar as any conventional excipient medium is incompatible with a substance or its derivatives, such as by producing any undesirable biological effect or otherwise interacting in a deleterious manner with any other component(s) of the pharmaceutical composition, its use is contemplated to be within the scope of this disclosure.

[3420] In some embodiments, a pharmaceutically acceptable excipient is at least 95%, at least 96%, at least 97%, at least 98%, at least 99%, or 100% pure. In some embodiments, an excipient is approved for use for humans and for veterinary use. In some embodiments, an excipient can be approved by United States Food and Drug Administration. In some embodiments, an excipient can be of pharmaceutical grade. In some embodiments, an excipient can meet the standards of the United States Pharmacopoeia (USP), the European Pharmacopoeia (EP), the British Pharmacopoeia, and/or the International Pharmacopoeia.

[3421] Pharmaceutically acceptable excipients used in the manufacture of pharmaceutical compositions include, but are not limited to, inert diluents, dispersing and/or granulating agents, surface active agents and/or emulsifiers, disintegrating agents, binding agents, preservatives, buffering agents, lubricating agents, and/or oils. Such excipients can optionally be included in pharmaceutical compositions. The composition can also include excipients such as cocoa butter and suppository waxes, coloring agents, coating agents, sweetening, flavoring, and/or perfuming agents.

[3422] Exemplary diluents include, but are not limited to, calcium carbonate, sodium carbonate, calcium phosphate, dicalcium phosphate, calcium sulfate, calcium hydrogen phosphate, sodium phosphate lactose, sucrose, cellulose, microcrystalline cellulose, kaolin, mannitol, sorbitol, inositol, sodium chloride, dry starch, cornstarch, powdered sugar, etc., and/or combinations thereof.

[3423] Exemplary granulating and/or dispersing agents include, but are not limited to, potato starch, corn starch, tapioca starch, sodium starch glycolate, clays, alginic acid, guar gum, citrus pulp, agar, bentonite, cellulose and wood products, natural sponge, cation-exchange resins, calcium carbonate, silicates, sodium carbonate, cross-linked poly(vinyl-pyrrolidone) (crospovidone), sodium carboxymethyl starch (sodium starch glycolate), carboxymethyl cellulose, cross-linked sodium carboxymethyl cellulose (croscarmellose), methylcellulose, pregelatinized starch (starch 1500), microcrystalline starch, water insoluble starch, calcium carboxymethyl cellulose, magnesium aluminum silicate (VEEGUM®), sodium lauryl sulfate, quaternary ammonium compounds, etc., and/or combinations thereof.

[3424] Exemplary surface active agents and/or emulsifiers include, but are not limited to, natural emulsifiers (e.g. acacia, agar, alginic acid, sodium alginate, tragacanth, chondrux, cholesterol, xanthan, pectin, gelatin, egg yolk, casein, wool fat, cholesterol, wax, and lecithin), colloidal clays (e.g. bentonite [aluminum silicate] and VEEGUM® [magnesium aluminum silicate]), long chain amino acid derivatives, high molecular weight alcohols (e.g. stearyl alcohol, cetyl alcohol, oleyl alcohol, triacetin monostearate, ethylene glycol distearate, glyceryl monostearate, and propylene glycol monostearate, polyvinyl alcohol), carbomers (e.g. carboxy polymethylene, polyacrylic acid, acrylic acid polymer, and carboxyvinyl polymer), carrageenan, cellulosic derivatives (e.g. carboxymethylcellulose sodium, powdered cellulose, hydroxymethyl cellulose, hydroxypropyl cellulose, hydroxypropyl methylcellulose, methylcellulose), sorbitan fatty acid esters (e.g. polyoxyethylene sorbitan monolaurate [TWEEN®20], polyoxyethylene sorbitan [TWEEN®60], polyoxyethylene sorbitan monooleate [TWEEN®80], sorbitan monopalmitate [SPAN®40], sorbitan monostearate [SPAN®60], sorbitan tristearate [SPAN®65], glyceryl monooleate, sorbitan monooleate [SPAN®80]), polyoxyethylene esters (e.g. polyoxyethylene monostearate [MYRJ®45], polyoxyethylene hydrogenated castor oil, polyethoxylated castor oil, polyoxymethylene stearate, and SOLUTOL®), sucrose fatty acid esters, polyethylene glycol fatty acid esters (e.g. CREMOPHOR®), polyoxyethylene ethers, (e.g. polyoxyethylene lauryl ether [BRIJ®30]), poly(vinyl-pyrrolidone), diethylene glycol monolaurate, triethanolamine oleate, sodium oleate, potassium oleate, ethyl oleate, oleic acid, ethyl laurate, sodium lauryl sulfate, PLUORINC® F 68, POLOXAMER®188, cetrimonium bromide, cetylpyridinium chloride, benzalkonium chloride, docusate sodium, etc. and/or combinations thereof.

[3425] Exemplary binding agents include, but are not limited to, starch (e.g. cornstarch and starch paste); gelatin; sugars (e.g. sucrose, glucose, dextrose, dextrin, molasses, lactose, lactitol, mannitol); amino acids (e.g., glycine); natural and synthetic gums (e.g. acacia, sodium alginate, extract of Irish moss, panwar gum, ghatti gum, mucilage of isapol husks, carboxymethylcellulose, methylcellulose, ethylcellulose, hydroxyethylcellulose, hydroxypropyl cellulose, hydroxypropyl methylcellulose, microcrystalline cellulose, cellulose acetate, poly(vinyl-pyrrolidone), magnesium aluminum silicate (VEEGUM®), and larch arabogalactan); alginates; polyethylene oxide; polyethylene glycol; inorganic calcium salts; silicic acid; polymethacrylates; waxes; water; alcohol; etc.; and combinations thereof.

[3426] Exemplary preservatives can include, but are not limited to, antioxidants, chelating agents, antimicrobial preservatives, antifungal preservatives, alcohol preservatives, acidic preservatives, and/or other preservatives. Oxidation is a potential degradation pathway for mRNA, especially for liquid mRNA formulations. In order to prevent oxidation, antioxidants can be added to the formulation. Exemplary antioxidants include, but are not limited to, alpha tocopherol, ascorbic acid, acorbyl palmitate, benzyl alcohol, butylated hydroxyanisole, EDTA, m-cresol, methionine, butylated hydroxytoluene, monothioglycerol, potassium metabisulfite, propionic acid, propyl gallate, sodium ascorbate, sodium bisulfite, sodium metabisulfite, thioglycerol and/or sodium sulfite. Exemplary chelating agents include ethylenediaminetetraacetic acid (EDTA), citric acid monohydrate, disodium edetate, dipotassium edetate, edetic acid, fumaric acid, malic acid, phosphoric acid, sodium edetate, tartaric acid, and/or trisodium edetate. Exemplary antimicrobial preservatives include, but are not limited to, benzalkonium chloride, benzethonium chloride, benzyl alcohol, bronopol, cetrimide, cetylpyridinium chloride, chlor hexidine, chlorobutanol, chlorocresol, chloroxylenol, cresol, ethyl alcohol, glycerin, hexetidine, imidurea, phenol, phenoxyethanol, phenylethyl alcohol, phenylmercuric nitrate, propylene glycol, and/or thimerosal. Exemplary antifungal preservatives include, but are not limited to, butyl paraben, methyl paraben, ethyl paraben, propyl paraben, benzoic acid, hydroxybenzoic acid, potassium benzoate, potassium sorbate, sodium benzoate, sodium propionate, and/or sorbic acid. Exemplary alcohol preservatives include, but are not limited to, ethanol, polyethylene glycol, phenol, phenolic compounds, bisphenol, chlorobutanol, hydroxybenzoate, and/or phenylethyl alcohol. Exemplary acidic preservatives include, but are not limited to, vitamin A, vitamin C, vitamin E, beta-carotene, citric acid, acetic acid, dehydroacetic acid, ascorbic acid, sorbic acid, and/or phytic acid. Other preservatives include, but are not limited to, tocopherol, tocopherol acetate, deteroxime mesylate, cetrimide, butylated hydroxyanisol (BHA), butylated hydroxytoluened (BHT), ethylenediamine, sodium lauryl sulfate (SLS), sodium lauryl ether sulfate (SLES), sodium bisulfite, sodium metabisulfite, potassium sulfite, potassium metabisulfite, GLYDANT PLUS®, PHENONIP®, methylparaben, GERMALL®115, GERMABEN®II, NEOLONE™, KATHON™, and/or EUXYL®.

[3427] In some embodiments, the pH of polynucleotide solutions is maintained between pH 5 and pH 8 to improve stability. Exemplary buffers to control pH can include, but are not limited to sodium phosphate, sodium citrate, sodium succinate, histidine (or histidine-HCl), sodium carbonate, and/or sodium malate. In another embodiment, the exemplary buffers listed above can be used with additional monovalent counterions (including, but not limited to potassium). Divalent cations can also be used as buffer counterions; however, these are not preferred due to complex formation and/or mRNA degradation.

[3428] Exemplary buffering agents can also include, but are not limited to, citrate buffer solutions, acetate buffer solutions, phosphate buffer solutions, ammonium chloride, calcium carbonate, calcium chloride, calcium citrate, calcium glubionate, calcium gluceptate, calcium gluconate, D-gluconic acid, calcium glycerophosphate, calcium lactate, propanoic acid, calcium levulinate, pentanoic acid, dibasic calcium phosphate, phosphoric acid, tribasic calcium phosphate, calcium hydroxide phosphate, potassium acetate, potassium chloride, potassium gluconate, potassium mixtures, dibasic potassium phosphate, monobasic potassium phosphate, potassium phosphate mixtures, sodium acetate, sodium bicarbonate, sodium chloride, sodium citrate, sodium lactate, dibasic sodium phosphate, monobasic sodium phosphate, sodium phosphate mixtures, tromethamine, magnesium hydroxide, aluminum hydroxide, alginic acid, pyrogen-free water, isotonic saline, Ringer's solution, ethyl alcohol, etc., and/or combinations thereof.

[3429] Exemplary lubricating agents include, but are not limited to, magnesium stearate, calcium stearate, stearic acid, silica, talc, malt, glyceryl behanate, hydrogenated vegetable oils, polyethylene glycol, sodium benzoate, sodium acetate, sodium chloride, leucine, magnesium lauryl sulfate, sodium lauryl sulfate, etc., and combinations thereof.

[3430] Exemplary oils include, but are not limited to, almond, apricot kernel, avocado, babassu, bergamot, black current seed, borage, cade, camomile, canola, caraway, carnauba, castor, cinnamon, cocoa butter, coconut, cod liver, coffee, corn, cotton seed, emu, eucalyptus, evening primrose, fish, flaxseed, geraniol, gourd, grape seed, hazel nut, hyssop, isopropyl myristate, jojoba, kukui nut, lavandin, lavender, lemon, litsea cubeba, macademia nut, mallow, mango seed, meadowfoam seed, mink, nutmeg, olive, orange, orange roughy, palm, palm kernel, peach kernel, peanut, poppy seed, pumpkin seed, rapeseed, rice bran, rosemary, safflower, sandalwood, sasquana, savoury, sea buckthorn, sesame, shea butter, silicone, soybean, sunflower, tea tree, thistle, tsubaki, vetiver, walnut, and wheat germ oils. Exemplary oils include, but are not limited to, butyl stearate, caprylic triglyceride, capric triglyceride, cyclomethicone, diethyl sebacate, dimethicone 360, isopropyl myristate, mineral oil, octyldodecanol, oleyl alcohol, silicone oil, and/or combinations thereof.

[3431] Excipients such as cocoa butter and suppository waxes, coloring agents, coating agents, sweetening, flavoring, and/or perfuming agents can be present in the composition, according to the judgment of the formulator.

[3432] Exemplary additives include physiologically biocompatible buffers (e.g., trimethylamine hydrochloride), addition of chelants (such as, for example, DTPA or DTPA-bisamide) or calcium chelate complexes (as for example calcium DTPA, CaNaDTPA-bisamide), or, optionally, additions of calcium or sodium salts (for example, calcium chloride, calcium ascorbate, calcium gluconate or calcium lactate). In addition, antioxidants and suspending agents can be used.

Cryoprotectants for mRNA

[3433] In some embodiments, the polynucleotide formulations comprise cryoprotectants. As used herein, the term “cryoprotectant” refers to one or more agent that when combined with a given substance, helps to reduce or eliminate damage to that substance that occurs upon freezing. In some embodiments, cryoprotectants are combined with polynucleotides in order to stabilize them during freezing. Frozen storage of mRNA between −20° C. and −80° C. can be advantageous for long term (e.g. 36 months) stability of polynucleotide. In some embodiments, cryoprotectants are included in polynucleotide formulations to stabilize polynucleotide through freeze/thaw cycles and under frozen storage conditions. Cryoprotectants of the present disclosure can include, but are not limited to sucrose, trehalose, lactose, glycerol, dextrose, raffinose and/or mannitol. Trehalose is listed by the Food and Drug Administration as being generally regarded as safe (GRAS) and is commonly used in commercial pharmaceutical formulations.

### Bulking Agents

[3434] In some embodiments, the polynucleotide formulations comprise bulking agents. As used herein, the term “bulking agent” refers to one or more agents included in formulations to impart a desired consistency to the formulation and/or stabilization of formulation components. In some embodiments, bulking agents are included in lyophilized polynucleotide formulations to yield a “pharmaceutically elegant” cake, stabilizing the lyophilized polynucleotides during long term (e.g. 36 month) storage. Bulking agents of the present disclosure can include, but are not limited to sucrose, trehalose, mannitol, glycine, lactose and/or raffinose. In some embodiments, combinations of cryoprotectants and bulking agents (for example, sucrose/glycine or trehalose/mannitol) can be included to both stabilize polynucleotides during freezing and provide a bulking agent for lyophilization.

[3435] Non-limiting examples of formulations and methods for formulating the polynucleotides of the present disclosure are also provided in International Publication No WO2013090648 filed Dec. 14, 2012.

### Naked Delivery

[3436] A polynucleotide of any of the combination therapies disclosed herein, e.g., an mRNA encoding an immune response primer polypeptide, an mRNA encoding an immune response co-stimulatory signal polypeptide, an mRNA encoding a checkpoint inhibitor polypeptide, or a combination thereof, can be delivered to a cell (e.g., to a tumor cell) naked. As used herein in, “naked” refers to delivering polynucleotides free from agents which promote transfection. For example, the polynucleotides delivered to the cell, e.g., tumor cell, can contain no modifications.

[3437] The naked polynucleotides comprising a polynucleotide of any of the combination therapies disclosed herein, e.g., an mRNA encoding an immune response primer polypeptide, an mRNA encoding an immune response co-stimulatory signal polypeptide, an mRNA encoding a checkpoint inhibitor polypeptide, or a combination thereof, can be delivered to the tumor cell using routes of administration known in the art, e.g., intratumoral administration, and described herein.

### Parenteral and Injectable Administration

[3438] Liquid dosage forms for parenteral administration, e.g. intratumoral, include, but are not limited to, pharmaceutically acceptable emulsions, microemulsions, solutions, suspensions, syrups, and/or elixirs. In addition to active ingredients, liquid dosage forms can comprise inert diluents commonly used in the art such as, for example, water or other solvents, solubilizing agents and emulsifiers such as ethyl alcohol, isopropyl alcohol, ethyl carbonate, ethyl acetate, benzyl alcohol, benzyl benzoate, propylene glycol, 1,3-butylene glycol, dimethylformamide, oils (in particular, cottonseed, groundnut, corn, germ, olive, castor, and sesame oils), glycerol, tetrahydrofurfuryl alcohol, polyethylene glycols and fatty acid esters of sorbitan, and mixtures thereof. Besides inert diluents, oral compositions can include adjuvants such as wetting agents, emulsifying and suspending agents, sweetening, flavoring, and/or perfuming agents. In certain embodiments for parenteral administration, compositions are mixed with solubilizing agents such as CREMOPHOR®, alcohols, oils, modified oils, glycols, polysorbates, cyclodextrins, polymers, and/or combinations thereof.

[3439] A pharmaceutical composition for parenteral administration, e.g., intratumoral administration, can comprise at least one inactive ingredient. Any or none of the inactive ingredients used can have been approved by the US Food and Drug Administration (FDA). A non-exhaustive list of inactive ingredients for use in pharmaceutical compositions for parenteral administration includes hydrochloric acid, mannitol, nitrogen, sodium acetate, sodium chloride and sodium hydroxide.

[3440] Injectable preparations, for example, sterile injectable aqueous or oleaginous suspensions can be formulated according to the known art using suitable dispersing agents, wetting agents, and/or suspending agents. Sterile injectable preparations can be sterile injectable solutions, suspensions, and/or emulsions in nontoxic parenterally acceptable diluents and/or solvents, for example, as a solution in 1,3-butanediol. Among the acceptable vehicles and solvents that can be employed are water, Ringer's solution, U.S.P., and isotonic sodium chloride solution. Sterile, fixed oils are conventionally employed as a solvent or suspending medium. For this purpose any bland fixed oil can be employed including synthetic mono- or diglycerides. Fatty acids such as oleic acid can be used in the preparation of injectables. The sterile formulation can also comprise adjuvants such as local anesthetics, preservatives and buffering agents.

[3441] Injectable formulations, e.g., intratumoral, can be sterilized, for example, by filtration through a bacterial-retaining filter, and/or by incorporating sterilizing agents in the form of sterile solid compositions which can be dissolved or dispersed in sterile water or other sterile injectable medium prior to use.

[3442] Injectable formulations, e.g., intratumoral, can be for direct injection into a region of a tissue, organ and/or subject, e.g., tumor.

[3443] In order to prolong the effect of an active ingredient, it is often desirable to slow the absorption of the active ingredient from intratumoral injection. This can be accomplished by the use of a liquid suspension of crystalline or amorphous material with poor water solubility. The rate of absorption of the drug then depends upon its rate of dissolution which, in turn, can depend upon crystal size and crystalline form. Alternatively, delayed absorption of a parenterally administered drug form is accomplished by dissolving or suspending the drug in an oil vehicle. Injectable depot forms are made by forming microencapsule matrices of the drug in biodegradable polymers such as polylactide-polyglycolide. Depending upon the ratio of drug to polymer and the nature of the particular polymer employed, the rate of drug release can be controlled. Examples of other biodegradable polymers include poly(orthoesters) and poly(anhydrides). Depot injectable formulations are prepared by entrapping the drug in liposomes or microemulsions which are compatible with body tissues.

### Dosage Forms

[3444] A pharmaceutical composition described herein can be formulated into a dosage form described herein, such as a topical, intranasal, intratracheal, or injectable (e.g., intravenous, intratumoral, intraocular, intravitreal, intramuscular, intracardiac, intraperitoneal, subcutaneous).

### Liquid Dosage Forms

[3445] Liquid dosage forms for parenteral administration (e.g., intratumoral) include, but are not limited to, pharmaceutically acceptable emulsions, microemulsions, solutions, suspensions, syrups, and/or elixirs. In addition to active ingredients, liquid dosage forms can comprise inert diluents commonly used in the art including, but not limited to, water or other solvents, solubilizing agents and emulsifiers such as ethyl alcohol, isopropyl alcohol, ethyl carbonate, ethyl acetate, benzyl alcohol, benzyl benzoate, propylene glycol, 1,3-butylene glycol, dimethylformamide, oils (in particular, cottonseed, groundnut, corn, germ, olive, castor, and sesame oils), glycerol, tetrahydrofurfuryl alcohol, polyethylene glycols and fatty acid esters of sorbitan, and mixtures thereof. In certain embodiments for parenteral administration, compositions can be mixed with solubilizing agents such as CREMOPHOR®, alcohols, oils, modified oils, glycols, polysorbates, cyclodextrins, polymers, and/or combinations thereof.

### Injectable

[3446] Injectable preparations (e.g., intratumoral), for example, sterile injectable aqueous or oleaginous suspensions can be formulated according to the known art and can include suitable dispersing agents, wetting agents, and/or suspending agents. Sterile injectable preparations can be sterile injectable solutions, suspensions, and/or emulsions in nontoxic parenterally acceptable diluents and/or solvents, for example, a solution in 1,3-butanediol. Among the acceptable vehicles and solvents that can be employed include, but are not limited to, water, Ringer's solution, U.S.P., and isotonic sodium chloride solution. Sterile, fixed oils are conventionally employed as a solvent or suspending medium. For this purpose any bland fixed oil can be employed including synthetic mono- or diglycerides. Fatty acids such as oleic acid can be used in the preparation of injectables.

[3447] Injectable formulations can be sterilized, for example, by filtration through a bacterial-retaining filter, and/or by incorporating sterilizing agents in the form of sterile solid compositions which can be dissolved or dispersed in sterile water or other sterile injectable medium prior to use.

[3448] In order to prolong the effect of an active ingredient, it can be desirable to slow the absorption of the active ingredient from subcutaneous or intramuscular injection. This can be accomplished by the use of a liquid suspension of crystalline or amorphous material with poor water solubility. The rate of absorption of the polynucleotides then depends upon its rate of dissolution which, in turn, can depend upon crystal size and crystalline form. Alternatively, delayed absorption of a parenterally administered polynucleotides can be accomplished by dissolving or suspending the polynucleotides in an oil vehicle. Injectable depot forms are made by forming microencapsule matrices of the polynucleotides in biodegradable polymers such as polylactide-polyglycolide. Depending upon the ratio of polynucleotides to polymer and the nature of the particular polymer employed, the rate of polynucleotides release can be controlled. Examples of other biodegradable polymers include, but are not limited to, poly(orthoesters) and poly(anhydrides). Depot injectable formulations can be prepared by entrapping the polynucleotides in liposomes or microemulsions which are compatible with body tissues.

### Methods of Intratumoral Delivery

[3449] The pharmaceutical compositions disclosed herein are suitable for administration to tumors. The term “tumor” is used herein in a broad sense and refers to any abnormal new growth of tissue that possesses no physiological function and arises from uncontrolled usually rapid cellular proliferation. The term “tumor” as used herein relates to both benign tumors and to malignant tumors.

[3450] In certain embodiments, the disclosure provides a method of delivering a polynucleotide of any of the combination therapies disclosed herein, e.g., an mRNA encoding an immune response primer polypeptide, an mRNA encoding an immune response co-stimulatory signal polypeptide, an mRNA encoding a checkpoint inhibitor polypeptide, or a combination thereof, to a tumor comprising formulating the polynucleotide in the pharmaceutical composition described herein, e.g., in lipid nanoparticle form, and administering the pharmaceutical composition to a tumor. The administration of the pharmaceutical composition to the tumor can be performed using any method known in the art (e.g., bolus injection, perfusion, surgical implantation, etc.).

[3451] The delivery of a polynucleotide of any of the combination therapies disclosed herein, e.g., an mRNA encoding an immune response primer polypeptide, an mRNA encoding an immune response co-stimulatory signal polypeptide, an mRNA encoding a checkpoint inhibitor polypeptide, or a combination thereof, alone or in combination, to a tumor using a pharmaceutical compositions for intratumoral administration disclosed herein can:
[3452] (i) increase the retention of the polynucleotide in the tumor;
[3453] (ii) increase the levels of expressed polypeptide in the tumor compared to the levels of expressed polypeptide in peritumoral tissue;
[3454] (iii) decrease leakage of the polynucleotide or expressed product to off-target tissue (e.g., peritumoral tissue, or to distant locations, e.g., liver tissue); or,
[3455] (iv) any combination thereof, wherein the increase or decrease observed for a certain property is relative to a corresponding reference composition (e.g., composition in which compounds of formula (I) are not present or have been substituted by another ionizable amino lipid, e.g., MC3).

[3456] In one embodiment, a decrease in leakage can be quantified as increase in the ratio of polypeptide expression in the tumor to polypeptide expression in non-tumor tissues, such as peritumoral tissue or to another tissue or organ, e.g., liver tissue.

[3457] Delivery of a polynucleotide of any of the combination therapies disclosed herein, e.g., an mRNA encoding an immune response primer polypeptide, an mRNA encoding an immune response co-stimulatory signal polypeptide, an mRNA encoding a checkpoint inhibitor polypeptide, or a combination thereof, to a tumor involves administering a pharmaceutical composition disclosed herein, e.g., in nanoparticle form, including the polynucleotide or combination thereof to a subject, where administration of the pharmaceutical composition involves contacting the tumor with the composition.

[3458] In the instance that the polynucleotide of any of the combination therapies disclosed herein (e.g., an mRNA encoding an immune response primer polypeptide, an mRNA encoding an immune response co-stimulatory signal polypeptide, an mRNA encoding a checkpoint inhibitor polypeptide, or a combination thereof) is an mRNA or a combination thereof, upon contacting a cell in the tumor with the pharmaceutical composition, a translatable mRNA (or translatable mRNAs) can be translated in the cell to produce a polypeptide (or polypeptides) of interest. However, mRNAs that are substantially not translatable may also be delivered to tumors. Substantially non-translatable mRNAs may be useful as vaccines and/or may sequester translational components of a cell to reduce expression of other species in the cell.

[3459] The pharmaceutical compositions disclosed herein can increase specific delivery. As used herein, the term “specific delivery,” means delivery of more (e.g., at least 1.5 fold more, at least 2-fold more, at least 3-fold more, at least 4-fold more, at least 5-fold more, at least 6-fold more, at least 7-fold more, at least 8-fold more, at least 9-fold more, at least 10-fold more) of a polynucleotide of any of the combination therapies disclosed herein, e.g., an mRNA encoding an immune response primer polypeptide, an mRNA encoding an immune response co-stimulatory signal polypeptide, an mRNA encoding a checkpoint inhibitor polypeptide, or a combination thereof, by pharmaceutical composition disclosed herein (e.g., in nanoparticle form) to a target tissue of interest (e.g., a tumor) compared to an off-target tissue (e.g., mammalian liver).

[3460] The level of delivery of a nanoparticle to a particular tissue may be measured, for example, by comparing
[3461] (i) the amount of protein expressed from a polynucleotide of any of the combination therapies disclosed herein, e.g., an mRNA encoding an immune response primer polypeptide, an mRNA encoding an immune response co-stimulatory signal polypeptide, an mRNA encoding a checkpoint inhibitor polypeptide, or a combination thereof, in a tissue to the weight of said tissue;
[3462] (ii) comparing the amount of the polynucleotide in a tissue to the weight of said tissue; or
[3463] (iii) comparing the amount of protein expressed from a polynucleotide of any of the combination therapies disclosed herein, e.g., an mRNA encoding an immune response primer polypeptide, an mRNA encoding an immune response co-stimulatory signal polypeptide, an mRNA encoding a checkpoint inhibitor polypeptide, or a combination thereof, in a tissue to the amount of total protein in said tissue.

[3464] Specific delivery to a tumor or a particular class of cells in the tumor implies that a higher proportion of pharmaceutical composition including a polynucleotide of any of the combination therapies disclosed herein, e.g., an mRNA encoding an immune response primer polypeptide, an mRNA encoding an immune response co-stimulatory signal polypeptide, an mRNA encoding a checkpoint inhibitor polypeptide, or a combination thereof, is delivered to the target destination (e.g., target tissue) relative to other off-target destinations upon administration of a pharmaceutical composition to a subject. Methods for Improved Intratumoral Delivery

[3465] The present disclosure also provides methods to achieve improved intratumoral delivery of a polynucleotide of any of the combination therapies disclosed herein, e.g., an mRNA encoding an immune response primer polypeptide, an mRNA encoding an immune response co-stimulatory signal polypeptide, an mRNA encoding a checkpoint inhibitor polypeptide, or a combination thereof, when a pharmaceutical composition disclosed herein (e.g., in nanoparticle form) is administered to a tumor. The improvement in delivery can be due, for example, to
[3466] (i) increased retention of a polynucleotide of any of the combination therapies disclosed herein, e.g., an mRNA encoding an immune response primer polypeptide, an mRNA encoding an immune response co-stimulatory signal polypeptide, an mRNA encoding a checkpoint inhibitor polypeptide, or a combination thereof, in the tumor;
[3467] (ii) increased levels of expressed polypeptide (e.g., immune response primer polypeptide, immune response co-stimulatory signal polypeptide, checkpoint inhibitor polypeptide, or a combination thereof) in the tumor compared to the levels of expressed polypeptide in peritumoral tissue;
[3468] (iii) decreased leakage of the polynucleotide or expressed product of to off-target tissue (e.g., peritumoral tissue, or to distant locations, e.g., liver tissue); or,
[3469] (iv) any combination thereof, wherein the increase or decrease observed for a certain property is relative to a corresponding reference composition (e.g., composition in which compounds of formula (I) are not present or have been substituted by another ionizable amino lipid, e.g., MC3).

[3470] In one embodiment, a decrease in leakage can be quantified as increase in the ratio of polypeptide expression in the tumor to polypeptide expression in non-tumor tissues, such as peritumoral tissue or to another tissue or organ, e.g., liver tissue.

[3471] Another improvement in delivery caused as a result of using the pharmaceutical compositions disclosed herein is a reduction in immune response with respect to the immune response observed when other lipid components are used to deliver the same a therapeutic agent or polynucleotide encoding a therapeutic agent.

[3472] Accordingly, the present disclosure provides a method of increasing retention of a therapeutic agent (e.g., a polypeptide administered as part of the pharmaceutical composition) in a tumor tissue in a subject, comprising administering intratumorally to the tumor tissue a pharmaceutical composition disclosed herein, wherein the retention of the therapeutic agent in the tumor tissue is increased compared to the retention of the therapeutic agent in the tumor tissue after administering a corresponding reference composition.

[3473] Also provided is a method of increasing retention of a polynucleotide in a tumor tissue in a subject, comprising administering intratumorally to the tumor tissue a pharmaceutical composition disclosed herein, wherein the retention of the polynucleotide in the tumor tissue is increased compared to the retention of the polynucleotide in the tumor tissue after administering a corresponding reference composition.

[3474] Also provided is a method of increasing retention of an expressed polypeptide in a tumor tissue in a subject, comprising administering to the tumor tissue a pharmaceutical composition disclosed herein, wherein the pharmaceutical composition comprises a polynucleotide encoding the expressed polypeptide, and wherein the retention of the expressed polypeptide in the tumor tissue is increased compared to the retention of the polypeptide in the tumor tissue after administering a corresponding reference composition.

[3475] The present disclosure also provides a method of decreasing expression leakage of a polynucleotide administered intratumorally to a subject in need thereof, comprising administering said polynucleotide intratumorally to the tumor tissue as a pharmaceutical composition disclosed herein, wherein the expression level of the polypeptide in non-tumor tissue is decreased compared to the expression level of the polypeptide in non-tumor tissue after administering a corresponding reference composition.

[3476] Also provided is a method of decreasing expression leakage of a therapeutic agent (e.g., a polypeptide administered as part of the pharmaceutical composition) administered intratumorally to a subject in need thereof, comprising administering said therapeutic agent intratumorally to the tumor tissue as a pharmaceutical composition disclosed herein, wherein the amount of therapeutic agent in non-tumor tissue is decreased compared to the amount of therapeutic in non-tumor tissue after administering a corresponding reference composition.

[3477] Also provided is a method of decreasing expression leakage of an expressed polypeptide in a tumor in a subject, comprising administering to the tumor tissue a pharmaceutical composition disclosed herein, wherein the pharmaceutical composition comprises a polynucleotide encoding the expressed polypeptide, and wherein the amount of expressed polypeptide in non-tumor tissue is decreased compared to the amount of expressed polypeptide in non-tumor tissue after administering a corresponding reference composition.

[3478] In some embodiments, the non-tumoral tissue is peritumoral tissue. In other embodiments, the non-tumoral tissue is liver tissue.

[3479] The present disclosure also provided a method to reduce or prevent the immune response caused by the intratumoral administration of a pharmaceutical composition, e.g., a pharmaceutical composition comprising lipids known in the art, by replacing one or all the lipids in such composition with a compound of Formula (I). For example, the immune response caused by the administration of a polynucleotide of any of the combination therapies disclosed herein, e.g., an mRNA encoding an immune response primer polypeptide, an mRNA encoding an immune response co-stimulatory signal polypeptide, an mRNA encoding a checkpoint inhibitor polypeptide, or a combination thereof, in a pharmaceutical composition comprising MC3 (or other lipids known in the art) can be prevented (avoided) or ameliorated by replacing MC3 with a compound of Formula (I), e.g., Compound 18.

[3480] In some embodiments, the immune response observed after a polynucleotide of any of the combination therapies disclosed herein, e.g., an mRNA encoding an immune response primer polypeptide, an mRNA encoding an immune response co-stimulatory signal polypeptide, an mRNA encoding a checkpoint inhibitor polypeptide, or a combination thereof, is administered in a pharmaceutical composition disclosed herein is not elevated compared to the immune response observed when the therapeutic agent or polynucleotide of any of the combination therapies disclosed herein, e.g., an mRNA encoding an immune response primer polypeptide, an mRNA encoding an immune response co-stimulatory signal polypeptide, an mRNA encoding a checkpoint inhibitor polypeptide, or a combination thereof, is administered in phosphate buffered saline (PBS) or another physiological buffer solution (e.g., Ringer's solution, Tyrode's solution, Hank's balanced salt solution, etc.).

[3481] In some embodiments, the immune response observed after a therapeutic agent or a polynucleotide of any of the combination therapies disclosed herein, e.g., an mRNA encoding an immune response primer polypeptide, an mRNA encoding an immune response co-stimulatory signal polypeptide, an mRNA encoding a checkpoint inhibitor polypeptide, or a combination thereof, is administered in a pharmaceutical composition disclosed herein is not elevated compared to the immune response observed when PBS or another physiological buffer solution is administered alone.

[3482] In some embodiments, no immune response is observed when a pharmaceutical composition disclosed herein is administered intratumorally to a subject.

[3483] Accordingly, the present disclosure also provides a method of delivering a therapeutic agent or a polynucleotide of any of the combination therapies disclosed herein, e.g., an mRNA encoding an immune response primer polypeptide, an mRNA encoding an immune response co-stimulatory signal polypeptide, an mRNA encoding a checkpoint inhibitor polypeptide, or a combination thereof, to a subject in need thereof, comprising administering intratumorally to the subject a pharmaceutical composition disclosed herein, wherein the immune response caused by the administration of the pharmaceutical composition is not elevated compared to the immune response caused by the intratumoral administration of
[3484] (i) PBS alone, or another physiological buffer solution (e.g., Ringer's solution, Tyrode's solution, Hank's balanced salt solution, etc.);
[3485] (ii) the therapeutic agent or a polynucleotide of any of the combination therapies disclosed herein, e.g., an mRNA encoding an immune response primer polypeptide, an mRNA encoding an immune response co-stimulatory signal polypeptide, an mRNA encoding a checkpoint inhibitor polypeptide, or a combination thereof, in PBS or another physiological buffer solution; or the therapeutic agent or a polynucleotide of any of the combination therapies disclosed herein, e.g., an mRNA encoding an immune response primer polypeptide, an mRNA encoding an immune response co-stimulatory signal polypeptide, an mRNA encoding a checkpoint inhibitor polypeptide, or a combination thereof in PBS or another physiological buffer solution; or,
[3486] (iii) a corresponding reference composition, i.e., the same pharmaceutical composition in which the compound of Formula (I) is substituted by another ionizable amino lipid, e.g., MC3.

### XII. Kits and Devices

### Kits

[3487] The disclosure provides a variety of kits for conveniently and/or effectively carrying out methods or compositions of the present disclosure. Typically kits will comprise sufficient amounts and/or numbers of components to allow a user to perform multiple treatments of a subject(s) and/or to perform multiple experiments.

[3488] In one aspect, the present disclosure provides kits comprising the polynucleotides of the disclosure. In some embodiments, the kit comprises one or more polynucleotides.

[3489] The kits can be for protein production, comprising a polynucleotide of any of the combination therapies disclosed herein, e.g., an mRNA encoding an immune response primer polypeptide, an mRNA encoding an immune response co-stimulatory signal polypeptide, an mRNA encoding a checkpoint inhibitor polypeptide, or a combination thereof. The kit can further comprise packaging and instructions and/or a delivery agent to form a formulation composition. The delivery agent can comprise a saline, a buffered solution, a lipidoid or any delivery agent disclosed herein.

[3490] In some embodiments, the buffer solution includes sodium chloride, calcium chloride, phosphate and/or EDTA. In another embodiment, the buffer solution includes, but is not limited to, saline, saline with 2 mM calcium, 5% sucrose, 5% sucrose with 2mMVI calcium, 5% mannitol, 5% mannitol with 2 mM calcium, Ringer's lactate, sodium chloride, sodium chloride with 2 mM calcium and mannose (See e.g., U.S. Pub. No. 20120258046). In a further embodiment, the buffer solutions is precipitated or it is lyophilized. The amount of each component can be varied to enable consistent, reproducible higher concentration saline or simple buffer formulations. The components can also be varied in order to increase the stability of modified RNA in the buffer solution over a period of time and/or under a variety of conditions. In one aspect, the present disclosure provides kits for protein production, comprising: a polynucleotide comprising a translatable region, provided in an amount effective to produce a desired amount of a protein encoded by the translatable region when introduced into a target cell; a second polynucleotide comprising an inhibitory nucleic acid, provided in an amount effective to substantially inhibit the innate immune response of the cell; and packaging and instructions.

[3491] In one aspect, the present disclosure provides kits for protein production, comprising a polynucleotide of any of the combination therapies disclosed herein, e.g., an mRNA encoding an immune response primer polypeptide, an mRNA encoding an immune response co-stimulatory signal polypeptide, an mRNA encoding a checkpoint inhibitor polypeptide, or a combination thereof, wherein the polynucleotides exhibits reduced degradation by a cellular nuclease, and packaging and instructions.

### Devices

[3492] The present disclosure provides for devices which can incorporate a polynucleotide of any of the combination therapies disclosed herein, e.g., an mRNA encoding an immune response primer polypeptide, an mRNA encoding an immune response co-stimulatory signal polypeptide, an mRNA encoding a checkpoint inhibitor polypeptide, or a combination thereof. For example, the device can incorporate a polynucleotide comprising an mRNA encoding an immune response primer polypeptide, a polynucleotide comprising an mRNA encoding an immune response co-stimulatory signal polypeptide, a polynucleotide comprising an mRNA encoding a checkpoint inhibitor polypeptide, or any combination thereof. These devices contain in a stable formulation the reagents to synthesize a polynucleotide in a formulation available to be immediately delivered to a subject in need thereof, such as a human patient.

[3493] Devices for administration can be employed to deliver a polynucleotide of any of the combination therapies disclosed herein, e.g., an mRNA encoding an immune response primer polypeptide, an mRNA encoding an immune response co-stimulatory signal polypeptide, an mRNA encoding a checkpoint inhibitor polypeptide, or a combination thereof according to single, multi- or split-dosing regimens taught herein. Such devices are taught in, for example, International Publication No. WO 2013151666 A2.

[3494] Method and devices known in the art for multi-administration to cells, organs and tissues are contemplated for use in conjunction with the methods and compositions disclosed herein as embodiments of the present disclosure. These include, for example, those methods and devices having multiple needles, hybrid devices employing for example lumens or catheters as well as devices utilizing heat, electric current or radiation driven mechanisms.

[3495] According to the present disclosure, these multi-administration devices can be utilized to deliver the single, multi- or split doses contemplated herein. Such devices are taught for example in, International Publication No. WO 2013151666 A2.

### XIII. Equivalents and Scope

[3496] Those skilled in the art will recognize, or be able to ascertain using no more than routine experimentation, many equivalents to the specific embodiments in accordance with the disclosure described herein. The scope of the present disclosure is not intended to be limited to the above Description, but rather is as set forth in the appended claims.

[3497] In the claims, articles such as “a,” “an,” and “the” may mean one or more than one unless indicated to the contrary or otherwise evident from the context. Claims or descriptions that include “or” between one or more members of a group are considered satisfied if one, more than one, or all of the group members are present in, employed in, or otherwise relevant to a given product or process unless indicated to the contrary or otherwise evident from the context. The disclosure includes embodiments in which exactly one member of the group is present in, employed in, or otherwise relevant to a given product or process. The disclosure includes embodiments in which more than one, or all of the group members are present in, employed in, or otherwise relevant to a given product or process.

[3498] It is also noted that the term “comprising” is intended to be open and permits but does not require the inclusion of additional elements or steps. When the term “comprising” is used herein, the term “consisting of” is thus also encompassed and disclosed.

[3499] Where ranges are given, endpoints are included. Furthermore, it is to be understood that unless otherwise indicated or otherwise evident from the context and understanding of one of ordinary skill in the art, values that are expressed as ranges can assume any specific value or subrange within the stated ranges in different embodiments of the disclosure, to the tenth of the unit of the lower limit of the range, unless the context clearly dictates otherwise.

[3500] In addition, it is to be understood that any particular embodiment of the present disclosure that falls within the prior art can be explicitly excluded from any one or more of the claims. Since such embodiments are deemed to be known to one of ordinary skill in the art, they can be excluded even if the exclusion is not set forth explicitly herein. Any particular embodiment of the compositions of the disclosure (e.g., any nucleic acid or protein encoded thereby; any method of production; any method of use; etc.) can be excluded from any one or more claims, for any reason, whether or not related to the existence of prior art.

[3501] All cited sources, for example, references, publications, databases, database entries, and art cited herein, are incorporated into this application by reference, even if not expressly stated in the citation. In case of conflicting statements of a cited source and the instant application, the statement in the instant application shall control.

[3502] Section and table headings are not intended to be limiting.

### EXAMPLES

### Example 1

### Synthesis of Compounds According to Formula (I)

### A. General Considerations

[3503] All solvents and reagents used were obtained commercially and used as such unless noted otherwise. ¹H NMR spectra were recorded in CDCl₃, at 300 K using a Bruker Ultrashield 300 MHz instrument. Chemical shifts are reported as parts per million (ppm) relative to TMS (0.00) for ¹H. Silica gel chromatographies were performed on ISCO CombiFlash Rf+ Lumen Instruments using ISCO RediSep Rf Gold Flash Cartridges (particle size: 20-40 microns). Reverse phase chromatographies were performed on ISCO CombiFlash Rf+ Lumen Instruments using RediSep Rf Gold C18 High Performance columns. All final compounds were determined to be greater than 85% pure via analysis by reverse phase UPLC-MS (retention times, RT, in minutes) using Waters Acquity UPLC instrument with DAD and ELSD and a ZORBAX Rapid Resolution High Definition (RRHD) SB-C18 LC column, 2.1 mm, 50 mm, 1.8 μm, and a gradient of 65 to 100% acetonitrile in water with 0.10% TFA over 5 minutes at 1.2 mL/min. Injection volume was 5 μL and the column temperature was 80° C. Detection was based on electrospray ionization (ESI) in positive mode using Waters SQD mass spectrometer (Milford, MA, USA) and evaporative light scattering detector.

[3504] The representative procedures described below are useful in the synthesis of Compounds 1-147.

### THE FOLLOWING ABBREVIATIONS ARE EMPLOYED HEREIN

[3505] THF: Tetrahydrofuran
[3506] DMAP: 4-Dimethylaminopyridine
[3507] LDA: Lithium Diisopropylamide
[3508] rt: Room Temperature
[3509] DME: 1,2-Dimethoxyethane
[3510] n-BuLi: n-Butyllithium
   B. Compound 2: Heptadecan-9-yl 8-((2-hydroxyethyl)(tetradecyl)amino) octanoate Representative Procedure 1:

[chemical structure]

[3511] Heptadecan-9-yl 8-bromooctanoate (Method A)

[chemical structure]

[3512] To a solution of 8-bromooctanoic acid (1.04 g, 4.6 mmol) and heptadecan-9-ol (1.5 g, 5.8 mmol) in dichloromethane (20 mL) was added N-(3-dimethylaminopropyl)-N′-ethylcarbodiimide hydrochloride (1.1 g, 5.8 mmol), N,N-diisopropylethylamine (3.3 mL, 18.7 mmol) and DMAP (114 mg, 0.9 mmol). The reaction was allowed to stir at rt for 18 h. The reaction was diluted with dichloromethane and washed with saturated sodium bicarbonate. The organic layer was separated and washed with brine, and dried over MgSO₄. The organic layer was filtered and evaporated in vacuo. The residue was purified by silica gel chromatography (0-10% ethyl acetate in hexanes) to obtain heptadecan-9-yl 8-bromooctanoate (875 mg, 1.9 mmol, 41%).

[3513] ¹H NMR (300 MHz, CDCl₃) δ: ppm 4.89 (m, 1H); 3.42 (m, 2H); 2.31 (m, 2H); 1.89 (m, 2H); 1.73-1.18 (br. m, 36H); 0.88 (m, 6H).

[3514] Heptadecan-9-yl 8-((2-hydroxyethyl)amino)octanoate (Method B)

[chemical structure]

[3515] A solution of heptadecan-9-yl 8-bromooctanoate (3.8 g, 8.2 mmol) and 2-aminoethan-1-ol (15 mL, 248 mmol) in ethanol (3 mL) was allowed to stir at 62° C. for 18 h. The reaction mixture was concentrated in vacuo and the residue was taken-up in ethyl acetate and water. The organic layer was separated and washed with water, brine and dried over Na₂SO₄. The mixture was filtered and evaporated in vacuo. The residue was purified by silica gel chromatography (0-100% (mixture of 1% NH₄OH, 20% MeOH in dichloromethane) in dichloromethane) to obtain heptadecan-9-yl 8-((2-hydroxyethyl)amino)octanoate (3.1 g, 7 mmol, 85%). UPLC/ELSD: RT=2.67 min. MS (ES): m z (MH⁺) 442.68 for C₂₇H₅₅NO₃

[3516] ¹H NMR (300 MHz, CDCl₃) δ: ppm 4.89 (p, 1H); 3.67 (t, 2H); 2.81 (t, 2H); 2.65 (t, 2H); 2.30 (t, 2H); 2.05 (br. m, 2H); 1.72-1.41 (br. m, 8H); 1.40-1.20 (br. m, 30H); 0.88 (m, 6H).

[3517] Heptadecan-9-yl 8-((2-hydroxyethyl)(tetradecyl)amino)octanoate (Method C)

[chemical structure]

[3518] Chemical Formula: C₄₁H₈₃NO₃-Molecular Weight: 638.12

[3519] A solution of heptadecan-9-yl 8-((2-hydroxyethyl)amino)octanoate (125 mg, 0.28 mmol), 1-bromotetradecane (94 mg, 0.34 mmol) and N,N-diisopropylethylamine (44 mg, 0.34 mmol) in ethanol was allowed to stir at 65° C. for 18 h. The reaction was cooled to room temperature and solvents were evaporated in vacuo. The residue was taken-up in ethyl acetate and saturated sodium bicarbonate. The organic layer was separated, dried over Na₂SO₄ and evaporated in vacuo. The residue was purified by silica gel chromatography (0-100% (mixture of 1% NH₄OH, 20% MeOH in dichloromethane) in dichloromethane) to obtain heptadecan-9-yl 8-((2-hydroxyethyl)(tetradecyl)amino)octanoate (89 mg, 0.14 mmol, 50%). UPLC/ELSD: RT=3.61 min. MS (ES): m z (MH⁺) 638.91 for C₄₁H₈₃NO₃. ¹H NMR (300 MHz, CDCl₃) δ: ppm 4.86 (p, 1H); 3.72-3.47 (br. m, 2H); 2.78-2.40 (br. m, 5H); 2.28 (t, 2H); 1.70-1.40 (m, 10H); 1.38-1.17 (br. m, 54H); 0.88 (m, 9H).

### Synthesis of Intermediates

[3520] Intermediate A: 2-Octyldecanoic acid

[chemical structure]

[3521] A solution of diisopropylamine (2.92 mL, 20.8 mmol) in THF (10 mL) was cooled to −78° C. and a solution of n-BuLi (7.5 mL, 18.9 mmol, 2.5 M in hexanes) was added. The reaction was allowed to warm to 0° C. To a solution of decanoic acid (2.96 g, 17.2 mmol) and NaH (754 mg, 18.9 mmol, 60% w/w) in THF (20 mL) at 0° C. was added the solution of LDA and the mixture was allowed to stir at rt for 30 min. After this time 1-iodooctane (5 g, 20.8 mmol) was added and the reaction mixture was heated at 45° C. for 6 h. The reaction was quenched with 1N HCl (10 mL). The organic layer was dried over MgSO₄, filtered and evaporated in vacuo. The residue was purified by silica gel chromatography (0-20% ethyl acetate in hexanes) to yield 2-octyldecanoic acid (1.9 g, 6.6 mmol, 38%). ¹H NMR (300 MHz, CDCl₃) δ: ppm 2.38 (br. m, 1H); 1.74-1.03 (br. m, 28H); 0.91 (m, 6H).

[3522] Intermediate B: 7-Bromoheptyl 2-octyldecanoate

[chemical structure]

[3523] 7-bromoheptyl 2-octyldecanoate was synthesized using Method A from 2-octyldecanoic acid and 7-bromoheptan-1-ol. ¹H NMR (300 MHz, CDCl₃) δ: ppm 4.09 (br. m, 2H); 3.43 (br. m, 2H); 2.48-2.25 (br. m, 1H); 1.89 (br. m, 2H); 1.74-1.16 (br. m, 36H); 0.90 (m, 6H).

[3524] Intermediate C: (2-Hexylcyclopropyl)methanol

[chemical structure]

[3525] A solution of diethyl zinc (20 mL, 20 mmol, 1 M in hexanes), in dichloromethane (20 mL) was allowed to cool to −40° C. for 5 min. Then a solution of diiodomethane (3.22 mL, 40 mmol) in dichloromethane (10 mL) was added dropwise. After the reaction was allowed to stir for 1 h at −40° C., a solution of trichloro-acetic acid (327 mg, 2 mmol) and DME (1 mL, 9.6 mmol) in dichloromethane (10 mL) was added. The reaction was allowed to warm to −15° C. and stir at this temperature for 1 h. A solution of (Z)-non-2-en-1-ol (1.42 g, 10 mmol) in dichloromethane (10 mL) was then added to the −15° C. solution. The reaction was then slowly allowed to warm to rt and stir for 18 h. After this time saturated NH₄Cl (200 mL) was added and the reaction was extracted with dichloromethane (3X), washed with brine, and dried over Na₂SO₄. The organic layer was filtered, evaporated in vacuo and the residue was purified by silica gel chromatography (0-50% ethyl acetate in hexanes) to yield (2-hexylcyclopropyl)methanol (1.43 g, 9.2 mmol, 92%). ¹H NMR (300 MHz, CDCl₃) δ: ppm 3.64 (m, 2H); 1.57-1.02 (m, 12H); 0.99-0.80 (m, 4H); 0.72 (m, 1H), 0.00 (m, 1H).

C. Compound 18: Heptadecan-9-yl 8-((2-hydroxyethyl)(8-(nonyloxy)-8-oxooctyl)amino) octanoate

[chemical structure]

[3526] Chemical Formula: C₄₄H₈₇NO₅-Molecular Weight: 710.18

[3527] Compound 18 was synthesized according to the general procedure and Representative Procedure 1 described above.

[3528] UPLC/ELSD: RT=3.59 min. MS (ES): m z (MH⁺) 710.89 for C₄₄H₈₇NO₅. ¹H NMR (300 MHz, CDCl₃) δ: ppm 4.86 (m, 1H); 4.05 (t, 2H); 3.53 (br. m, 2H); 2.83-2.36 (br. m, 5H); 2.29 (m, 4H); 0.96-1.71 (m, 64H); 0.88 (m, 9H).

D. Compound 136: Nonyl 8-((2-hydroxyethyl)((9Z,12Z)-octadeca-9,12-dien-1-yl)amino)octanoate

### Representative Procedure 2:

[3529] Nonyl 8-bromooctanoate (Method A)

[chemical structure]

[3530] To a solution of 8-bromooctanoic acid (5 g, 22 mmol) and nonan-1-ol (6.46 g, 45 mmol) in dichloromethane (100 mL) were added N-(3-Dimethylaminopropyl)-N-ethylcarbodiimide hydrochloride (4.3 g, 22 mmol) and DMAP (547 mg, 4.5 mmol). The reaction was allowed to stir at rt for 18 h. The reaction was diluted with dichloromethane and washed with saturated sodium bicarbonate. The organic layer was separated and washed with brine, dried over MgSO₄. The organic layer was filtered and evaporated under vacuum. The residue was purified by silica gel chromatography (0-10% ethyl acetate in hexanes) to obtain nonyl 8-bromooctanoate (6.1 g, 17 mmol, 77%).

[3531] ¹H NMR (300 MHz, CDCl₃) δ: ppm 4.06 (t, 2H); 3.40 (t, 2H); 2.29 (t, 2H); 1.85 (m, 2H); 1.72-0.97 (m, 22H); 0.88 (m, 3H).

[3532] Nonyl 8-((2-hydroxyethyl)amino)octanoate

[chemical structure]

[3533] A solution of nonyl 8-bromooctanoate (1.2 g, 3.4 mmol) and 2-aminoethan-1-ol (5 mL, 83 mmol) in ethanol (2 mL) was allowed to stir at 62° C. for 18 h. The reaction mixture was concentrated in vacuum and the residue was extracted with ethyl acetate and water. The organic layer was separated and washed with water, brine and dried over Na₂SO₄. The organic layer was filtered and evaporated in vacuo. The residue was purified by silica gel chromatography (0-100% (mixture of 1% NH₄OH, 20% MeOH in dichloromethane) in dichloromethane) to obtain nonyl 8-((2-hydroxyethyl)amino)octanoate (295 mg, 0.9 mmol, 26%).

[3534] UPLC/ELSD: RT=1.29 min. MS (ES): m z (MH⁺) 330.42 for C₁₉H₃₉NO₃

[3535] ¹H NMR (300 MHz, CDCl₃) δ: ppm 4.07 (t, 2H); 3.65 (t, 2H); 2.78 (t, 2H); 2.63 (t, 2H); 2.32-2.19 (m, 4H); 1.73-1.20 (m, 24H); 0.89 (m, 3H)

[3536] Nonyl 8-((2-hydroxyethyl)((9Z,12Z)-octadeca-9,12-dien-1-yl)amino)octanoate

[chemical structure]

[3537] Chemical Formula: C₃₇H₇₁NO₃-Molecular Weight: 577.98

[3538] A solution of nonyl 8-((2-hydroxyethyl)amino)octanoate (150 mg, 0.46 mmol), (6Z,9Z)-18-bromooctadeca-6,9-diene (165 mg, 0.5 mmol) and N,N-diisopropylethylamine (65 mg, 0.5 mmol) in ethanol (2 mL) was allowed to stir at reflux for 48 h. The reaction was allowed to cool to rt and solvents were evaporated under vacuum. The residue was purified by silica gel chromatography (0-10% MeOH in dichloromethane) to obtain nonyl 8-((2-hydroxyethyl)((9Z,12Z)-octadeca-9,12-dien-1-yl)amino)octanoate (81 mg, 0.14 mmol, 30%) as a HBr salt.

[3539] UPLC/ELSD: RT=3.24 min. MS (ES): m z (MH⁺) 578.64 for C₃₇H₇₁NO₃

[3540] ¹H NMR (300 MHz, CDCl₃) δ: ppm 10.71 (br., 1H); 5.36 (br. m, 4H); 4.04 (m, 4H); 3.22-2.96 (br. m, 5H); 2.77 (m, 2H); 2.29 (m, 2H); 2.04 (br. m, 4H); 1.86 (br. m, 4H); 1.66-1.17 (br. m, 40H); 0.89 (m, 6H)

E. Compound 138: Dinonyl 8,8′-((2-hydroxyethyl)azanediyl)dioctanoate

### Representative Procedure 3:

[3541] Dinonyl 8,8′-((2-hydroxyethyl)azanediyl)dioctanoate

[chemical structure]

[3542] Chemical Formula: C₃₆H₇₁NO₅-Molecular Weight: 597.97

[3543] A solution of nonyl 8-bromooctanoate (200 mg, 0.6 mmol) and 2-aminoethan-1-ol (16 mg, 0.3 mmol) and N, N-diisopropylethylamine (74 mg, 0.6 mmol) in THF/CH₃CN (1:1) (3 mL) was allowed to stir at 63° C. for 72 h. The reaction was cooled to rt and solvents were evaporated under vacuum. The residue was extracted with ethyl acetate and saturated sodium bicarbonate. The organic layer was separated, dried over Na₂SO₄ and evaporated under vacuum. The residue was purified by silica gel chromatography (0-10% MeOH in dichloromethane) to obtain dinonyl 8,8′-((2-hydroxyethyl)azanediyl)dioctanoate (80 mg, 0.13 mmol, 43%).

[3544] UPLC/ELSD: RT=3.09 min. MS (ES): m z (MH⁺) 598.85 for C₃₆H₇₁NO₅

[3545] ¹H NMR (300 MHz, CDCl₃) δ: ppm 4.05 (m, 4H); 3.57 (br. m, 2H); 2.71-2.38 (br. m, 6H); 2.29 (m, 4H), 1.71-1.01 (br. m, 49H), 0.88 (m, 6H).

[3546] All other compounds of formula (I) of this disclosure can be obtained by a method analogous to Representative Procedures 1-3 as described above.

### Example 2

### Production of Nanoparticle Compositions

### A. Production of Nanoparticle Compositions

[3547] Nanoparticles can be made with mixing processes such as microfluidics and T-junction mixing of two fluid streams, one of which contains the polynucleotide and the other has the lipid components.

[3548] Lipid compositions are prepared by combining a lipid according to Formula (I), a phospholipid (such as DOPE or DSPC, obtainable from Avanti Polar Lipids, Alabaster, AL), a PEG lipid (such as 1,2-dimyristoyl-sn-glycerol methoxypolyethylene glycol, also known as PEG-DMG, obtainable from Avanti Polar Lipids, Alabaster, AL), and a structural lipid (such as cholesterol, obtainable from Sigma-Aldrich, Taufkirchen, Germany, or a corticosteroid (such as prednisolone, dexamethasone, prednisone, and hydrocortisone), or a combination thereof) at concentrations of about 50 mM in ethanol. Solutions should be refrigerated for storage at, for example, −20° C. Lipids are combined to yield desired molar ratios and diluted with water and ethanol to a final lipid concentration of between about 5.5 mM and about 25 mM.

[3549] Nanoparticle compositions including a polynucleotide and a lipid composition are prepared by combining the lipid solution with a solution including the a polynucleotide at lipid composition to polynucleotide wt:wt ratios between about 5:1 and about 50:1. The lipid solution is rapidly injected using a NanoAssemblr microfluidic based system at flow rates between about 10 ml/min and about 18 ml/min into the polynucleotide solution to produce a suspension with a water to ethanol ratio between about 1:1 and about 4:1.

[3550] For nanoparticle compositions including an RNA, solutions of the RNA at concentrations of 0.1 mg/ml in deionized water are diluted in 50 mM sodium citrate buffer at a pH between 3 and 4 to form a stock solution.

[3551] Nanoparticle compositions can be processed by dialysis to remove ethanol and achieve buffer exchange. Formulations are dialyzed twice against phosphate buffered saline (PBS), pH 7.4, at volumes 200 times that of the primary product using Slide-A-Lyzer cassettes (Thermo Fisher Scientific Inc., Rockford, IL) with a molecular weight cutoff of 10 kD. The first dialysis is carried out at room temperature for 3 hours. The formulations are then dialyzed overnight at 4° C. The resulting nanoparticle suspension is filtered through 0.2 μm sterile filters (Sarstedt, Numbrecht, Germany) into glass vials and sealed with crimp closures. Nanoparticle composition solutions of 0.01 mg/ml to 0.10 mg/ml are generally obtained.

[3552] The method described above induces nano-precipitation and particle formation. Alternative processes including, but not limited to, T-junction and direct injection, may be used to achieve the same nano-precipitation.

B. Characterization of nanoparticle compositions

[3553] A Zetasizer Nano ZS (Malvern Instruments Ltd, Malvern, Worcestershire, UK) can be used to determine the particle size, the polydispersity index (PDI) and the zeta potential of the nanoparticle compositions in 1×PBS in determining particle size and 15 mM PBS in determining zeta potential.

[3554] Ultraviolet-visible spectroscopy can be used to determine the concentration of a polynucleotide (e.g., RNA) in nanoparticle compositions. 100 μL of the diluted formulation in 1×PBS is added to 900 μL of a 4:1 (v/v) mixture of methanol and chloroform. After mixing, the absorbance spectrum of the solution is recorded, for example, between 230 nm and 330 nm on a DU 800 spectrophotometer (Beckman Coulter, Beckman Coulter, Inc., Brea, CA). The concentration of polynucleotide in the nanoparticle composition can be calculated based on the extinction coefficient of the polynucleotideused in the composition and on the difference between the absorbance at a wavelength of, for example, 260 nm and the baseline value at a wavelength of, for example, 330 nm.

[3555] For nanoparticle compositions including an RNA, a QUANT-IT™ RIBOGREEN® RNA assay (Invitrogen Corporation Carlsbad, CA) can be used to evaluate the encapsulation of an RNA by the nanoparticle composition. The samples are diluted to a concentration of approximately 5 μg/mL in a TE buffer solution (10 mM Tris-HCl, 1 mM EDTA, pH 7.5). 50 μL of the diluted samples are transferred to a polystyrene 96 well plate and either 50 μL of TE buffer or 50 μL of a 2% Triton X-100 solution is added to the wells. The plate is incubated at a temperature of 370° C. for 15 minutes. The RIBOGREEN® reagent is diluted 1:100 in TE buffer, and 100 μL of this solution is added to each well. The fluorescence intensity can be measured using a fluorescence plate reader (Wallac Victor 1420 Multilablel Counter; Perkin Elmer, Waltham, MA) at an excitation wavelength of, for example, about 480 nm and an emission wavelength of, for example, about 520 nm. The fluorescence values of the reagent blank are subtracted from that of each of the samples and the percentage of free RNA is determined by dividing the fluorescence intensity of the intact sample (without addition of Triton X-100) by the fluorescence value of the disrupted sample (caused by the addition of Triton X-100).

[3556] Exemplary formulations of the nanoparticle compositions are presented in TABLE E1 below.

TABLE E1
Exemplary formulations of nanopoarticle compositions

| Composition (mol %) | Components |
|---|---|
| 40:20:38.5:1.5 | Compound:Phospholipid:Chol:PEG-DMG |
| 45:15:38.5:1.5 | Compound:Phospholipid:Chol:PEG-DMG |
| 50:10:38.5:1.5 | Compound:Phospholipid:Chol:PEG-DMG |
| 55:5:38.5:1.5 | Compound:Phospholipid:Chol:PEG-DMG |
| 60:5:33.5:1.5 | Compound:Phospholipid:Chol:PEG-DMG |
| 45:20:33.5:1.5 | Compound:Phospholipid:Chol:PEG-DMG |
| 50:20:28.5:1.5 | Compound:Phospholipid:Chol:PEG-DMG |
| 55:20:23.5:1.5 | Compound:Phospholipid:Chol:PEG-DMG |
| 60:20:18.5:1.5 | Compound:Phospholipid:Chol:PEG-DMG |
| 40:15:43.5:1.5 | Compound:Phospholipid:Chol:PEG-DMG |
| 50:15:33.5:1.5 | Compound:Phospholipid:Chol:PEG-DMG |
| 55:15:28.5:1.5 | Compound:Phospholipid:Chol:PEG-DMG |
| 60:15:23.5:1.5 | Compound:Phospholipid:Chol:PEG-DMG |
| 40:10:48.5:1.5 | Compound:Phospholipid:Chol:PEG-DMG |
| 45:10:43.5:1.5 | Compound:Phospholipid:Chol:PEG-DMG |
| 55:10:33.5:1.5 | Compound:Phospholipid:Chol:PEG-DMG |
| 60:10:28.5:1.5 | Compound:Phospholipid:Chol:PEG-DMG |
| 40:5:53.5:1.5 | Compound:Phospholipid:Chol:PEG-DMG |
| 45:5:48.5:1.5 | Compound:Phospholipid:Chol:PEG-DMG |
| 50:5:43.5:1.5 | Compound:Phospholipid:Chol:PEG-DMG |
| 40:20:40:0 | Compound:Phospholipid:Chol:PEG-DMG |
| 45:20:35:0 | Compound:Phospholipid:Chol:PEG-DMG |
| 50:20:30:0 | Compound:Phospholipid:Chol:PEG-DMG |
| 55:20:25:0 | Compound:Phospholipid:Chol:PEG-DMG |
| 60:20:20:0 | Compound:Phospholipid:Chol:PEG-DMG |
| 40:15:45:0 | Compound:Phospholipid:Chol:PEG-DMG |
| 45:15:40:0 | Compound:Phospholipid:Chol:PEG-DMG |
| 50:15:35:0 | Compound:Phospholipid:Chol:PEG-DMG |
| 55:15:30:0 | Compound:Phospholipid:Chol:PEG-DMG |
| 60:15:25:0 | Compound:Phospholipid:Chol:PEG-DMG |
| 40:10:50:0 | Compound:Phospholipid:Chol:PEG-DMG |
| 45:10:45:0 | Compound:Phospholipid:Chol:PEG-DMG |
| 50:10:40:0 | Compound:Phospholipid:Chol:PEG-DMG |
| 55:10:35:0 | Compound:Phospholipid:Chol:PEG-DMG |
| 60:10:30:0 | Compound:Phospholipid:Chol:PEG-DMG |

### Example 3

### Characterization of mRNA-encoded Therapeutic Antibodies

[3557] 1.1 Design of IgG mRNA molecules

[3558] Checkpoint inhibitor antibodies have been the focus on much recent attention in the scientific and medical communities given their widely-reported efficacy in cancer immunotherapy. The anti-CTLA-4 antibodies, ipilimumab and tremelimumab, have achieved considerable success in the clinic. In 2011, ipilimumab was approved for the treatment of late-stage melanoma that cannot be removed by surgery. In April 2015, tremelimumab was granted Orphan Drug Designation by US FDA for treatment of malignant mesothelioma. Despite its potential for fatal immune-mediated adverse reactions and unusual severe side effects, ipilimumab has more recently (October 2015) been approved for use as adjuvant therapy in stage III melanoma patients who are at high risk of melanoma recurrence following surgical intervention.

[3559] CTLA-4 is a negative regulatory surface molecule on T cells that competitively inhibits the CD28 co-stimulatory pathway by binding to the costimulatory molecules B7-1 and B7-2. Anti-CTLA-4 antibodies block this inhibitory signaling mechanism and allow T lymphocytes to destroy cancer cells.

[3560] The concept of using anti-CTLA-4 antibodies to treat cancer was first developed by James Allison and colleagues at the University of California, Berkeley. Much of this seminal work featured the CTLA-4 antagonist antibody 9D9 which was demonstrated to induce rejection of several tumor types in different mouse strains. The effectiveness of this CTLA-4 blockade was shown to correlate with the inherent immunogenicity of the tumor. These data led investigators to hypothesize that removing the “brakes” on a T cell response via CTLA-4 blockade would effectively allow the immune system to eliminate cancer cells and induce long-lasting anti-tumor immunity.

[3561] The efficacy of mRNA-produced 9D9 antibodies was tested in a widely employed in vivo model of cancer, the syngeneic colon cancer CT26 model. We designed mRNAs encoding both the 9D9 (IgG2b isotype) antibody and an IgG2a variant of 9D9 (termed “9D92a” or “9D92a^{a}”). mRNA sequences were generated encoding the full IgG antibody molecules, i.e., mRNAs encoding both the full heavy chain (HC) and full light chain (LC) of these antibodies.

[3562] The mRNA for these sequences was designed by adding proprietary 5′ and 3′ Untranslated Regions (UTRs) to the Open Reading Frames (ORF), which encoded the amino acid sequence of either the HC or the LC of the antibodies. The resulting HC and LC sequences were synthesized by In Vitro Transcription (IVT), using proprietary chemically modified nucleotides and formulated in Lipofectamine 2000 or Lipid Nanoparticles (LNP) using DLin-MC3-DMA (MC3) LNPs (Jayaraman et al., 2012) for in vitro and in vivo studies, respectively.

[3563] 1.2 Confirmation of Anti-Tumor Efficacy of 9D9 Antibodies in the Mouse CT26 Cancer Model:

[3564] The efficacy of systemically administered recombinant 9D9 antibodies was tested in the mouse CT26 tumor model. Murine CT26 cells, developed in 1975 by exposing BALB/c mice to N-nitroso-N-methylurethane (NMU), result in a rapid-growing carcinoma that is easily implanted and readily metastasizes (Griswold and Corbett, Cancer 36:2441-2444 (1975)).

[3565] CT26 is one of the most extensively studied syngeneic mouse tumor models, used in the screening for and evaluation of small molecule cytotoxic agents and biological response modifiers for use in cancer immunotherapy. Unlike conventional xenograft models, which lack relevance due to the animals' immunocompromised status, this syngeneic mouse model provides an effective approach for studying how cancer therapies perform in the presence of a functional immune system.

[3566] For in vivo treatment studies, BALB/c mice were injected in the flank with 10′ tumor cells subcutaneously (SC) to establish SC tumors. Mice (n=14) were administered 5 mg/kg anti-CTLA-4 9D9 antibody at day 3, 6 and 9 following induction of tumors. Negative control mice (n=14) received no treatment. Mice were followed for several weeks and tumor burden and long-term survival were monitored. Mice were euthanized when tumors reached 2000 mm³.

[3567] Clear activity, i.e., 90% survival, was seen in mice treated with 5 mg/kg dose of 9D9 (IgG2b) antibody as compared to 0% survival in untreated, control mice confirming the efficacy of these anti-CTLA-4 antibodies when systemically administered in the CT26 mouse cancer model.

1.3 In Vitro Characterization of mRNA-encoded anti-CTLA-4 Antibodies

[3568] The following mRNAs encoding anti-CTLA-4 antibody heavy and light chains (HC and LC mRNAs) were designed and assayed for expression by measuring both CTLA-4-bound antibody and total IgG produced (FIG. 1): (1) 9D9 VH:mIgG2a (IgG2aa allele) plus 9D9 VL:mIgGk; and (2) 9D9 VH:mIgG2b plus 9D9 VL:mIgGk. HeLa cells were transfected in 6-well plates with mRNA formulated in Lipofectamine 2000. Cell supernatants were harvested at 18 hours post transfection. Supernatants were assayed for binding to CTLA-4-coated plates (mCTLA-4-His (Life Technologies)) and detection was with HRP-Goat anti-mouse IgG Fc, 1:10000 (JIR). Purified 9D9 antibody (BioXcell) was used for the standard curve in the CTLA-4-binding ELISA. The Mouse IgG total ELISA Ready-SET-Go® assay (eBioscience) was used for quantitating total mouse IgG, with a mouse IgG internal standard.

[3569] The data show significant expression and antigen-binding of both IgG2a and IgG2b forms of 9D9 antibody in HeLa cells transfected with IVT mRNAs encoding full LC and HC. Moreover, the data demonstrated higher 9D9 expression/activity when mRNAs are delivered at a molar ratio of 1:1 (HC:LC).

[3570] Experimental data also showed that full sequence antibodies expressed better than scFv's. Anti CTLA-4 antibodies 9D9 IgG2a (HC and LC mRNAs at a molar ration of 1:1) and IgG2b (HC and LC mRNAs at a molar ratio of 1:1) were transfected into cells in 6-well plates using 3 mg mRNA and 4.5 mg L2K per well. Supernatants were harvested after 24 h. Active antibody levels were 657 ng/well for 9D9 IgG2a and 1161 ng/well for 9D9 IgG2b. In contrast, expression of active antibodies after transfection with 3 different scFv constructs under the same experimental condition resulted in expression levels of 6.2 ng/well, 0 ng/well, and 94 ng/well, respectively.

### Example 4

### Therapeutic Efficacy of mRNA-encoded CTLA-4 Antibodies

[3571] 2.1 Therapeutic efficacy of mRNA-encoded 9D9 antibodies in a CT26 mouse colon carcinoma model

[3572] To evidence the therapeutic efficacy of the mRNA-encoded anti-CTLA-4 antibodies described supra, we studied these molecules in BALB/c mice challenged with subcutaneous (SC) tumors. The mRNAs were formulated in MC3 LNPs by mixing mRNAs encoding the HC and the LC at a molar ratio of 1:1, prior to encapsulation. LNPs routinely had a mean particle diameter of -65-85 nM, a polydispersity index (PDI) of ˜0.02-0.2 and an encapsulation efficiency (EE) of >95%.

### 2.1.1 Study Design

[3573] Animals were distributed into treatment groups according to body weight such that the mean body weight in each group was within 10% of the overall mean. Tumor cells were implanted subcutaneously in the low flank (between the right hip and sacral region) at Day 0. Mice were dosed individually by body weight on the day of treatment as described above. Intravenous (IV) dosing (0.5 mg mRNA per kg) was -1.75 mass excess of HC mRNA compared to LC mRNA (i.e., 1:1 molar ratio) co-formulated in MC3 lipid nanoparticles (LNPs) (DLin-MC3-DMA:Cholesterol:DSPC:PEG-DMG-50:38.5:10:1.5 molar ratios).

[3574] Animals were evaluated for volume, body weight and general health assessments. The defined end point to sacrifice animals due to excessive tumor burden was a tumor volume≥2,000 mm³. The monitoring of tumor growth delay/inhibition and survival were incorporated into the study design.

[3575] Recombinant 9D9 antibody was included as an internal control. Whole blood was isolated and serum samples were retained for further analysis. An overview of the study design is set forth in TABLE E2.

TABLE E2
Overview of the Therapeutic anti-CTLA-4 Study Design

| | # | | | | Dose |
|---|---|---|---|---|---|
| Group | Animals | Compound | Route | Schedule | (mg/kg/inj) |
| 1 | 14 | Untreated Control | NA | NA | NA |
| 2 | 14 | anti-CTLA-4 protein | IP | D3, 6, 9 | 5 |
| | | (BioXcell; IgG2b) | | | |
| 3 | 14 | 9D9 IgG2b | IV | D3 | 0.5 |
| 4 | 14 | 9D9 IgG2b | IV | D3, 9 | 0.5 |
| 5 | 14 | 9D9 IgG2b | IV | D3, 6, 9 | 0.5 |
| 6 | 14 | 9D9 IgG2a^{a} | IV | D3 | 0.5 |
| 7 | 14 | 9D9 IgG2a^{a} | IV | D3, 9 | 0.5 |
| 8 | 14 | 9D9 IgG2a^{a} | IV | D3, 6, 9 | 0.5 |
| 9 | 14 | NST (non-start) FIX | IV | D3 | 0.5 |
| 10 | 14 | NST (non-start) FIX | IV | D3, 9 | 0.5 |
| 11 | 14 | NST (non-start) FIX | IV | D3, 6, 9 | 0.5 |
| 12 | 14 | PBS | IV | D3 | 5 ml/kg |
| 13 | 14 | PBS | IV | D3, 9 | 5 ml/kg |
| 14 | 14 | PBS | IV | D3, 6, 9 | 5 ml/kg |

### 2.1.2 Results

[3576] 2.1.2.1 Efficacy of anti-CTLA-4 protein control treatment

[3577] Mice treated with three doses of recombinant anti-CTLA-4 antibody (5 mg/kg at 3, 6 and 9 days post implantation) were assayed for tumor growth as described supra. Data are depicted for 24 days post-implantation (FIG. 2A-C). Control animals receiving negative control mRNA (i.e., mRNA encoding non-translated (“non-start”) Factor IX (“NST FIX”) (FIG. 2C) developed tumors at a similar rate as compared to untreated controls (FIG. 2A), as expected.

[3578] As previously demonstrated, tumor growth is delayed in animals treated with therapeutic dosing of anti-CTLA-4 antibodies (FIG. 2B) as compared to untreated animals or animals treated with negative-control mRNA. 2.1.2.2 Efficacy of treatment with mRNAs designed to encode anti-CTLA antibodies

[3579] To demonstrate the therapeutic efficacy of mRNAs encoding 9D9 anti-CTLA-4 antibodies, mRNAs encoding the IgG2b and IgG2a^{a} variant 9D9 antibodies were administered following implantation and tumor growth was evaluated as compared to animals receiving negative control (NST-FIX) mRNA treatment described supra. Animals received a single dose or multiple doses of mRNA encoding 9D9 IgG2b (FIG. 3A-3F) or 9D9 IgG2a^{a} (FIG. 4A-4F) (single dose=dosing at day 3; two doses=dosing at day 3 and day 9; three doses=dosing at days 3, 6 and 9). Negative control data for animals receiving 3 doses of negative control mRNA are as depicted supra and are reproduced for comparison purposes.

[3580] These data demonstrate a reduction in tumor burden in mice treated with mRNA encoding 9D9 (IgG2b) with mice receiving two systemic doses of MC3-LNP-formulated mRNA (0.5 mg/kg per dose) showing detectable reduction in tumor growth, and mice receiving three doses of mRNA exhibiting significant reduction in tumor growth, at 24 days post tumor induction.

[3581] Mice treated with only a single systemic (IV) dose of MC3-LNP-formulated mRNA encoding 9D9 (IgG2a) showed almost complete inhibition of tumor growth at 24 days post induction and mice receiving two or three doses of this mRNA exhibited complete inhibition of tumor growth.

[3582] All treatments (as well as each treatment regimen) were well-tolerated resulting in no overall morbidity or mortality. Each treatment was associated with an overall mean body weight gain.

### 2.1.3 Conclusions

[3583] This study was conducted to assess the activity of mRNAs encoding anti-CTLA-4 antibodies when administered systemically in a CT26 mouse carcinoma model. The studies presented herein demonstrate the therapeutic efficacy of mRNAs encoding two variants of the anti-CTLA-4 antibody 9D9 against lethal challenge with CT26 tumors in mice. Tumor burden, survival rates, changes in body weight and clinically relevant disease signs were investigated.

[3584] Mice treated with mRNA encoding 9D9 antibodies exhibited significant inhibition of tumor growth, with near complete inhibition of tumor growth observed at 24 days post tumor induction in mice receiving just a single dose (0.5 mg/kg of mRNA formulated in MC3) of mRNA encoding 9D9 (IgG2a) as well as in mice receiving multiple doses of mRNA encoding 9D9 (IgG2b) as compared to untreated mice and to mice receiving placebo (PBS) or non-translated mRNA treatment.

[3585] These data demonstrate a significant therapeutic effect for mRNA-encoded anti-CTLA-4 antibodies when mRNA is systemically administered at doses as low as 0.5 mg/kg in an in vivo CT26 mouse carcinoma model.

[3586] The studies presented herein utilize MC3-based LNPs. These LNPs have significant pre-clinical and clinical documentation and have been found to be acceptable for use in clinical trials by Alnylam for their ALN-TTR02 program (Coelho et al., 2013). LNPs in general have been shown to be very useful for mRNA delivery across several parenteral administration routes including intravenous (IV), intramuscular (IM), and subcutaneous (SC).

[3587] MC3-based LNPs have documented toxicity profiles across various species and may require pre-dosing and/or co-administration with anti-inflammatory (anti-histamines, acetaminophen, and dexamethasone) treatment. The majority of research with LNP formulated drugs has utilized IV administration although some SC and intradermal (ID) work has been reported. LNP-encapsulated mRNA-encoded antagonistic antibodies (administered systemically (IV)) have shown sufficient expression of two active IgG antibodies (9D9 IgG2b and 9D9 IgG2a), a therapeutic response as demonstrated by a reduction in growth of tumor tissue, and in addition survival against lethal induction of tumors with carcinoma cells (in this case, highly tumorigenic CT26 colon carcinoma cells).

### Example 5

### Extended Therapeutic Efficacy of mRNA-encoded CTLA-4 Antibodies

[3588] The study described in TABLE E2 was followed out for more than 60 days.

[3589] Mice treated with three doses of recombinant anti-CTLA-4 antibody (5 mg/kg at 3, 6 and 9 days post implantation) were assayed for tumor growth as described supra. The data shown in FIG. 5A-5B shows tumor growth in control animals (FIG. 5A), in which survival was 0%, compared to the tumor growth in animals treated with 3 doses (administered at days 3, 6 and 9) of 9D9 IgG2b antibody protein (FIG. 5B), which had a survival rate of 90%. Thus, as previously demonstrated, tumor growth was delayed in animals treated with therapeutic dosing of anti-CTLA-4 antibodies as compared to untreated animals.

[3590] When plasma levels of anti-CTLA-4 antibody were measured after administration of either anti-CTLA-4 antibody (protein) or mRNA encoding an anti-CTLA-4 antibody, it was noticeable that the serum levels of anti-CTLA-4 antibody were much higher after the administration of the anti-CTLA-4 antibody (protein). The administration of 5 mg/kg of anti-CTLA-4 protein resulted in serum levels of approximately 50 μg/mL. Serum protein levels of injected antibody protein remained more or less constant at the 24 hours, 48 hours, and 72 hours timepoints after administration.

[3591] In contrast, the administration of 0.5 mg/kg mRNA encoding anti-CTLA-4 antibodies resulted in serum levels as low as 0.5 μg/mL (see FIG. 6). Serum levels of 9D9 2a antibody expressed after mRNA injection decreased from approximately 3.3 μg/mL at the 24 hours timepoint to approximately 2.8 μg/mL at the 48 hours timepoint. At the 72 hours timepoint the serum concentration had further decreased to approximately 1.7 μg/mL, and at the 7 day timepoint the serum concentration was approximately 0.5 μg/mL. Expression levels for 9D9 2b were considerably lower than the expression levels observed for the 9D9 2a antibody, e.g., at the 24 hours timepoint the total expression level of 9D9 IgG2b was approximately 0.5 μg/mL. See FIG. 6.

[3592] When measurements as described above were taken through Day 69 post cancer cell implantation/disease induction, there were only 2 animals remaining (“on study”) that appeared to have actively growing tumors. The mRNA encoding the 9D9 2a variant appeared to have yielded a 93-100% apparent complete response (CR) rate (depending on dose regimen). This is compared to a 57% apparent complete response rate after 3 doses of the 9D9 2b antibody protein, and a 21% complete response rate after 3 doses of the 9D9 2b mRNA.

[3593] The measurements as described above in were also taken through Day 90 (post cancer cell implantation). FIG. 7A shows individual growth curves of the untreated arm of the study and FIG. 7B shows the negative control NST mRNA/LNP arm of the study. None of the untreated controls (0/14) survived to day 90. Only one of the NSP mRNA/LNP controls (1/14, i.e., 7% rate) survived to Day 90. However, when anti-CTLA-4 9D9 native antibody was administered in protein form in three 5 mg/kg doses at post-implantation days 3, 6 and 9, eight out of 14 animals survived to Day 90, i.e., the survival rate was 57%. See FIG. 8.

[3594] When mRNA encoding the anti-CTLA-4 9D9 2b antibody was administered in three 0.5 mg mRNA/kg doses at post-implantation days 3, 6, and 9, three out of 14 animals survived to Day 90, i.e., their survival rate was 21%. Note, however, that whereas none of the control animals survived past Day 40, three of the mRNA-treated animals survived past Day 40. See FIG. 9.

[3595] When mRNA encoding the anti-CTLA-4 9D9 2b was administered under the same experimental conditions, 100% of the animals survived to Day 90. See FIG. 10. The same survival rate was observed when only two doses of mRNA were administered at day 3 and 9 of the study. See FIG. 11B and it control in FIG. 11A. Even when the mRNA administration was reduced to a single dose (see FIG. 12A and FIG. 12B), the survival rate was still 93% (13 out of 14). Survival curves showing the rates of survival after 1, 2 or 3 administrations are shown in FIG. 13.

[3596] When comparing response rates after administration of anti-CTLA-4 9D9 protein or mRNA form, it is important to note that the serum antibody concentration following protein administration was approximately 50 μg/ml, whereas the antibody concentration following mRNA administration was -0.5-1.0 μg/mL (9B9 2a). Thus, even at serum antibody concentrations 50-100-fold lower, the efficacy for the mRNA-encoded antibody was far superior.

[3597] Again, these data demonstrate that a significant therapeutic effect for mRNA-encoded anti-CTLA-4 antibodies is achieved when mRNA is systemically administered at doses as low as 0.5 mg/kg in an in vivo CT26 mouse carcinoma model, and the such therapeutic effect when serum concentrations as low as 0.5 μg/mL.

[3598] These results indicate that targeting of CTLA-4 using mRNA-encoded antagonistic antibodies provides for effective immune responses against tumor cells and provides significant therapeutic benefit in combatting tumor growth.

### Example 6

### In Vivo Efficacy of a CD80Fc Chimera in a Colon Cancer Model

[3599] Prior studies of CD80Fc chimeric polypeptides have demonstrated the effectiveness of those polypeptides in treating mouse models of cancer. These data have been reported in studies such as Liu et al., Clin. Cancer Res. 11:8492-8502 (2005), hereby incorporated by reference in its entirety. Relevant methods and results from Liu et al. are summarized below in this Example.

### A. Colon 26 Mouse Model of Melanoma

[3600] Colon 26 cells (5×10⁶ cells) were implanted into the left flank of 6-week old C57BL/6J mice to establish a colon cancer model. Treatment was started when tumors reached 0.5 cm in diameter. At 5, 6, 7, 8, and 9 days post implantation, chimeric polypeptides or isotype control antibodies were introduced intravenously as a 0.1 mL inoculum. For each tested polypeptide and polypeptide concentration, 5 mice were treated and the tumor volume was measured daily for 19 days after implantation. FIG. 14 presents the structure of the tested chimeric CD80Fc construct. FIG. 15 presents the average tumor volume for each group.

### B. Results

[3601] Wang et al. tested six different CD80Fc concentrations' effectiveness in the Colon 26 mouse model of melanoma described above: 40 μg (open square); 20 μg (closed triangle); 10 μg (open triangle); 5 μg (closed circle); 1 μg (open circle); and 0.5 μg (ex mark). For comparison, mice were also treated with an isotype control antibody (closed square). As shown in FIG. 15, concentrations of CD80Fc above 5 μg significantly reduced tumor volume. Mice treaded with 40 μg CD80Fc showed a complete regression of implanted tumors. These data indicate that, once a signaling threshold has been reached, CD80 signaling facilitates significant anti-tumor activity against colon cancer.

### Example 7

### In Vitro Expression and Binding Capability of CD80Fc

[3602] Expression of chimeric CD80Fc polypeptides were measured in cancer cells following transfection with polynucleotides comprising a modified mRNA encoding a murine or human chimeric polypeptide. Polynucleotides used in this example comprised mRNAs encoding: (1) murine CD80's extracellular domain linked to murine IgG2Aa Fc domain (“mCD80-mIgG2Aa Fc”), (2) murine CD80's extracellular domain linked to murine IgG1 Fc domain with the D265A mutation (“mCD80-mIgG1 Fc D265A”), or (3) human CD80 linked to human IgG1 Fc domain (“HuCD80-hIgG1 Fc”). To measure expression, HeLa cells were seeded in 6-well plates and transfected with mCD80-mIgG2Aa Fc, mCD80-mIgG1 Fc D265A, or HuCD80-hIgG1 Fc. Control HeLa cells were mock-treated to mimic transfection. Following transfection, expression of chimeric CD80Fc constructs was determined. As illustrated in FIG. 16, all chimeric CD80Fc constructs were expressed at greater than 2000 ng/mL.

[3603] The ability of the CD80Fc polypeptides to interact with mouse CTLA-4 receptor was also determined. As shown in FIG. 17, both human and mouse CD80Fc polypeptides were able to specifically interact with CTLA-4.

### Example 8

### Costimulation of Jurkat IL-2 Production by CD80Fc

[3604] To measure the ability of chimeric CD80Fc polypeptides to provide costimulatory signal in cells, IL-2 production was measured in Jurkat cells after treatment with the CD80Fc polypeptides. Jurkat cells were first treated with PHA to provide primary T cell receptor signaling. Cells were then either mock treated or treated with a specific concentration of CD80Fc polypeptide that had been expressed from modified mRNA. Polynucleotides used in this example comprised mRNAs encoding (1) murine CD80's extracellular domain linked to murine IgG2Aa Fc domain (“mCD80-IgG2Aa Fc”) or (2) human CD80 linked to human IgG1 Fc domain encoding “huCD80 Fc” and “rhuCD80Fc” respectively). Each chimeric polypeptide was administered at a range of concentrations including 62.5 ng/mL, 125 ng/mL, 250 ng/mL, 500 ng/mL, and 1000 ng/mL.

[3605] Each chimeric CD80Fc construct stimulated IL-2 secretion in a dose-dependent manner (see FIG. 18). Both mCD80-IgG2Aa Fc and rhuCD80Fc stimulated release of high levels of IL-2, with the mouse protein being slightly more potent. While the IL-2 secretion in response to huCD80Fc was less than the other chimeric CD80Fc polypeptides, huCD80Fc still showed a significant increase in IL-2 secretion relative to mock treated cells.

### Example 9

### In Vivo Efficacy of Modified mRNAs Encoding CD80Fc Polypeptides

[3606] In Vivo Efficacies of mRNAs Encoding CD80Fc Polypeptides were Assessed in a B-Cell Lymphoma Model.

A. Preparation of CD80Fc modified mRNA

[3607] Each polynucleotide comprising a modified mRNA encoding a CD80Fc polypeptide was prepared as described above (CD80Fc IgG1 (D265A) and CD80Fc IgG2a). A negative control mRNA was also prepared (non-translatable version of the Factor IX mRNA containing multiple stop codons; NST-FIX). Both modified mRNAs were formulated in the same manner (Cap1, G5 RP mRNA in 1.5 mol % DMG MC3 LNP).

### B. A20 B-Cell Lymphoma Tumor Model

[3608] B-cell lymphoma tumors were established subcutaneously in BALB/c mice. Mouse B-cell lymphoma cells (A20, ATCC No. TIB-208; ATCC, Manassas, VA) were cultured according to the vendor's instructions. Cells were inoculated subcutaneously in BALB/c mice to generate subcutaneous tumors. Tumor were monitored for size and palpability.

[3609] Once the tumors reached a mean size of approximately 100 mm³, animals were separated into three groups of 12 mice each. Group I (control) was treated with a 12.5 μg dose of negative control mRNA, NST-FIX at each treatment time point. Group II was treated with repeated intratumoral doses of CD80Fc IgG1 (D265A) mRNA at a dose of 12.5 μg mRNA. Group III was treated with repeated intratumoral doses of CD80Fc IgG2a mRNA at a dose of 12.5 μg mRNA. Animals were dosed on Days 18, 25 and 32. Results are shown in FIGS. 19A, 19B, and 19C as a plot of tumor volume over time.

[3610] The study was carried out through Day 38. Otherwise, endpoints in the study were either death of the animal or a tumor volume reaching 2000 mm³.

### C. Results

[3611] FIG. 19A shows individual tumor growth in animals treated with control NST-FIX mRNA. FIG. 19B shows individual tumor growth in animals treated with CD80Fc IgG1 (D265A) mRNA. FIG. 19C shows individual tumor growth in animals treated with CD80Fc IgG2a mRNA. Multiple doses of the control modified mRNA had little effect on the tumor volume. In contrast, multiple doses of CD80Fc IgG2a mRNA reduced or decreased the size of tumors in some animals and inhibited the growth of tumors in some animals. Of the 12 mice given CD80Fc IgG2a mRNA, 7 mice had tumors whose size remained below 500 mm³ at the study endpoint (see FIG. 19C, shaded area). In contrast, 11 of the 12 mice in the control group had tumors whose size was larger than 500 mm³ at the study endpoint (see FIG. 19A). Treatment with CD80Fc IgG1 (D265A) mRNA had little effect on tumor volume, though one animal treated with CD80Fc IgG1 (D265A) mRNA had a complete response (i.e., tumor elimination). These data indicate that chimeric CD80Fc mRNA treatment reduces tumor growth and facilitates tumor elimination in a B-cell lymphoma model of cancer, particularly when paired with IgG2a Fc.

### Example 10

### mRNA Encoding Constitutively Active TLR4

[3612] mRNAs encoding constitutively active TLR4 (“caTLR4”) were prepared from wild type human or mouse TLR4 sequences. The sequence encoding the wild type TLR4 signal peptide was replaced with a sequence encoding a human lysosome-associated membrane protein 1 (“hLAMPT”) or mouse immunoglobulin kappa variable (“mIgk”) signal peptide. The sequence encoding the TLR4 extracellular leucine-rich repeat domain (“LRR”) domain was deleted and replaced with a sequence encoding a FLAG epitope having the motif DYKDDDDK (SEQ ID NO: 1258). Sequences encoding the TLR4 transmembrane domain (“TM”) and intracellular toll/interleukin-1 receptor-like domain (“TIR”) were retained in the mRNAs. Some of the mRNAs encoding caTLR4 were also prepared with a miR122 target site. Example mRNA and corresponding amino acid sequences are shown below.

[3613] FIG. 20 shows the structure of caTLR4 encoded by the mRNAs as compared to wild type TLR4.

### Example 11

### In Vitro Expression and Bioactivity of caTLR4 mRNA

[3614] Expression of caTLR4 mRNAs was confirmed by cell-free translation by QC. As shown in FIG. 21, human caTLR4 was expressed from an mRNA without any microRNA (“miR”) target sites (“Hs caTLR4 miRless”) as well as from an mRNA containing a miR122 target site (“Hs caTLR4 miR122”). Mouse caTLR4 was also expressed from an mRNA containing a miR122 target site (“Mm caTLR4 miR122”).

[3615] The activity of the caTLR4 mRNAs was confirmed in vitro in THP1-BluemNF-κB cells (InvivoGen, San Diego, California). THP1-Blue™ NF-κB cells have a stably integrated NF-κB-inducible secreted embryonic alkaline phosphatase (SEAP) construct. Expression of caTLR4 in these cells leads to activation of NF-κB and induction of SEAP expression, with SEAP levels in cell culture supernatant determined with QUANTI-Bluerm (InvivoGen, San Diego, California) detection reagent and spectrophotometry at 620-655 nm according to manufacturer protocols.

[3616] Briefly, THP1-Blue™ NF-κB cells were transfected with control mRNA, HS caTLR4 miRless, Hs caTLR4 miR122, or Mm caTLR4 miR122. Additional THP1-Blue™ NF-κB cells were infected with Listeria monocytogenes or were exposed to lipopolysaccharide (LPS). Alkaline phosphatase activity was then determined at different times after transfection with mRNA, infection with Listeria, or exposure to LPS. As shown in FIG. 11, expression of caTLR4 mRNAs induced alkaline phosphatase activity within 6 hours after transfection versus minimal levels observed with control mRNA transfection, Listeria infection, and LPS exposure. A continued response associated with transfection of caTLR4 mRNAs was observed at 18 hours (FIG. 22) and 30 hours (data not shown).

### Example 12

### In Vivo Activity of caTLR4 mRNA in Cancer Models

[3617] A mouse model of B-cell lymphoma was utilized to determine the in vivo effect of caTLR4 mRNA expression on tumor volume.

[3618] Mouse B-cell lymphoma cells (A20, ATCC No. TIB-208; ATCC, Manassas, VA) were cultured according to the vendor's instructions. Cells were inoculated subcutaneously in BALB/c mice to generate subcutaneous B-cell lymphoma tumors. Tumors were measured for size (mm³) over 30-40 days. Following implantation, mice were injected with intratumoral doses of either: (1) 12.5 μg of mRNA encoding NST FIX at 18, 25, and 32 days, (2) 12.5 μg of mRNA encoding mouse caTLR4 and containing a miR122 target site at 18, 25, and 32 days, (3) 3 μg of mRNA encoding NST 2001, (4) 0.5 μg of interleukin-12 and 2.5 μg of mRNA encoding NST FIX, or (5) 0.5 μg of interleukin-12 and 2.5 μg of mRNA encoding caTLR4. Results are shown in FIGS. 23A, 23B, and 24A-24C.

### Example 13

### In Vitro Cell Surface Expression of an OX40L Polypeptide

[3619] Expression of an OX40L polypeptide was measured on the surface of cancer cells following treatment with a polynucleotide comprising an mRNA encoding an OX40L polypeptide.

A. Formulation of mOX40L_miR122

[3620] A polynucleotide comprising an mRNA encoding an OX40L polypeptide (murine OX40L) and further comprising a miRNA binding site (miR-122) was used in this example (mOX40L_miR122; SEQ ID NO: 1207). The OX40L modified mRNA was formulated in lipid nanoparticles (LNP) as described herein. (Modema Therapeutics, Cambridge, MA).

### B. Analysis of OX40L Cell-Surface Expression

[3621] Mouse melanoma cells (B16F10, ATCC No. CRL-6475; ATCC, Manassas, VA) were seeded in 12-well plates at a density of 140,000 cells per well. Increasing doses of mOX40L_miR122 (SEQ ID NO: 1207; see FIG. 25) formulated in LNPs were added to each well directly after seeding the cells. Doses of mOX40L_miR122 included 6.3 ng, 12.5 ng, 25 ng, or 50 ng mRNA per well. Control cells were either mock-treated or treated with negative control mRNA (non-translatable version of the same mRNA containing multiple stop codons).

[3622] Following treatment, cell surface expression of OX40L was detected using flow cytometry. Cells were harvested by transferring the supernatants to a 96-well Pro-Bind U-bottom plate (Beckton Dickinson GmbH, Heidelberg, Germany). Cells from each well were then lifted with trypsin-free chelating solution, and stained with PE-conjugated anti-mouse OX40L antibody (R&D Systems, Minneapolis, MN) and visualized by flow cytometry. The results are shown in FIG. 26.

### C. Results

[3623] FIG. 26 shows a dose-dependent expression of OX40L on the surface of B16F10 cancer cells after treatment with OX40L modified mRNA. All four doses of mOX40L_miR122 generated significant OX40L expression on the cell surface compared to control samples.

[3624] These results show that administering an OX40L modified mRNA results in expression of an OX40L polypeptide on the surface of target cells.

### Example 14

### In Vitro Expression Kinetics of OX40L on Cell Surface

[3625] In this example, expression levels of an OX40L polypeptide on the surface of cancer cells were measured over time. Quantitation of OX40L protein expression was also measured.

A. Formulation of mOX40L_miR122

[3626] A polynucleotide comprising an mRNA encoding an OX40L polypeptide (murine OX40L or human OX40L) and further comprising a miRNA binding site (miR-122) was used in this example (mOX40L_miR122, SEQ ID NO: 1207; hOX40L_miR122, SEQ ID NO: 1206). The OX40L modified mRNA was formulated in either lipid nanoparticles (LNP) as described above in Example 1 or formulated in LIPOFECTAMINE 2000 (L2K) (ThermoFisher Scientific, Waltham, MA) according to the manufacturer's instructions.

### B. Cell Lines

[3627] Human cervical carcinoma cells (HeLa, ATCC No. CCL-2; ATCC, Manassas, VA) were seeded at a density of 250,000 cells per well in 6-well plates. 24-hours post-seeding, L2K-formulated mOX40L_miR122 or hOX40L_miR122 containing 3 μg of mRNA was added to each well. The cells were treated with mOX40L_miR122 or hOX40L_miR122 in the presence or absence of 50 μg/ml mitomycin C 24 hours post-transfection.

[3628] Mouse colon adenocarcinoma cells (MC-38; Rosenberg et al., Science 233(4770):1318-21 (1986)) were seeded at a density of 300,000 cells per well in 6-well plates. LNP-formulated mOX40L_miR122 containing 3 μg of mRNA was added to each well 24 hours after seeding the cells. The MC-38 cells were treated with mOX40L_miR122 in the presence or absence of 25 μg/ml mitomycin C.

[3629] Control cells were mock-treated. Cell surface expression of OX40L was measured on Days 1, 2, 3, 5, and 7 following treatment with mOX40L_miR122 and Days 1, 2, 3, 4, and 5 following treatment with hOX40L_miR122. Cells were harvested and analyzed by flow cytometry as described above. The results for cells treated with mOX40L_miR122 are shown in FIG. 27A-27D; the results for cells treated with hOX40L_miR122 are shown in FIG. 27E. Cell lysates and cell culture supernatants were also harvested and analyzed for OX40L protein expression (quantitated in nanograms per well). The results for mouse and human OX40L protein quantitation following treatments are shown in FIGS. 27F and 27G, respectively. C. Results

[3630] FIG. 27A-27D shows that OX40L was detected on the surface of HeLa cells out to at least Day 7 after treatment with mOX40L_miR122. FIG. 27A-27D also shows that cell surface expression of OX40L on MC-38 cells treated with mOX40L_miR122 returned to baseline by Day 5 after treatment. In both cell lines, the gradual reduction in cell surface expression levels of OX40L over time was blocked by the presence of mitomycin C. FIG. 27E shows that human OX40L expression was detected on the surface of HeLa cells out to at least Day 5 after treatment with hOX40L_miR122.

[3631] No significant shedding of the OX40L polypeptide was detected in culture supernatants. This suggests that the OX40L expressed from mRNA was not actively shed from the cell surface, which was confirmed in FIGS. 27F and 27G. Twenty-four hours after treatment with mOX40L_miR122, hOX40L_miR122, or mock treatment, cell lysates were prepared using standard cell lysis buffers and methods for protein analysis. FIG. 27F and FIG. 27G show that both mOX40L_miR122 (FIG. 27F) and hOX40L_miR122 (FIG. 27G) produced proteins that were recognized by commercially available ELISAs. The majority of the expressed protein was associated with the cell lysate, with only approximately 0.10% of the produced protein detected in the supernatant of transfected cells.

[3632] These results show that treatment of cells with an OX40L modified mRNA results in expression of an OX40L polypeptide on the surface of target cells. These results also show that only minor amounts of protein are shed from transfected cells.

### Example 15

### In Vitro Biological Activity of OX40L

[3633] T-cell activation involves two concurrent cell signaling events: a primary signal from the T-cell receptor complex (e.g., CD3 stimulation) and a second signal from a costimulatory ligand-receptor interaction (e.g., OX40L/OX40R interaction). Kober et al., European Journal of Immunology 38:2678-2688 (2008). In this example, the costimulatory biological activity of OX40L expressed on the surface of cells treated with mOX40L_miR122 or hOX40L_miR122 was assessed.

### A. Preparation of OX40L-Expressing Cells

[3634] Mouse melanoma cells (B16F10, ATCC No. CRL-6475; ATCC, Manassas, VA) were seeded in 6-well plates at a density of 300,000 cells per well. Human cervical carcinoma cells (HeLa) were seeded in 6-well plates as described above. A polynucleotide comprising an mRNA encoding an OX40L polypeptide and further comprising a miR-122 binding site (mouse OX40L, mOX40L_miR122, SEQ ID NO: 1207; human OX40L, hOX40L_miR122, SEQ ID NO: 1206) was formulated in L2K as described above. 24 hours after seeding the cells, formulations containing 3 μg of mOX40L_miR122 or hOX40L_miR122 mRNA were added to each well. Control cells were either mock-treated or treated with negative control mRNA (non-translatable version of the same mRNA except with no initiating codons). The cells were incubated for 24 hours at 37° C.

### B. Preparation of Naïve CD4+ T-cells

[3635] Spleens from C57BL/6 mice were removed and processed using standard techniques in the art to generate single cell suspensions of spleenocytes. Total CD4+ T-cells were isolated from the spleenocyte suspensions using a mouse CD4 T cell isolation kit (Miltenyi, San Diego, CA). Naïve human CD4+ T-cells were isolated from human peripheral blood mononuclear cells (PBMCs) by depleting non-CD4 cells using a commercially available magnetic bead T cell isolation kit.

### C. T-cell Activation Assay

[3636] 200,000 T-cells were added to each well of transfected B16F10 cells or HeLa cells in the presence of agonistic anti-mouse CD3 antibody (R&D Systems, Minneapolis, MN) or agonistic anti-human CD3 antibody and soluble anti-human CD28; and the cells were co-cultured for 72 hours (mouse) or 120 hours (human). A schematic of the assays is shown in FIG. 28A.

[3637] After co-culture with T-cells, mouse IL-2 production was measured using a mouse IL-2 ELISA. (mouse IL-2 DuoSet ELISA, R&D Systems, Minneapolis, MN). The amount of IL-2 produced by the CD4+ T-cells serves as an indicator of T-cell activation. Results are shown in FIG. 28B. Human IL-2 production was measured using a human IL-2 ELISA (human IL-2 DuoSet ELISA, R&D Systems, Minneapolis, MN). Results are shown in FIGS. 28C, 28D, and 28E.

### D. Results

[3638] FIG. 28B shows that OX40L expression on the surface of B16F10 cells treated with mOX40L_miR122 elicits a T-cell IL-2 response in vitro. The mOX40L_miR122 mRNA induced about 12 ng/ml of IL2. B16F10 cells treated with non-translated negative control mRNA showed baseline levels of T-cell activation comparable to mock-treated cells (i.e., about 6 ng/ml of IL2). Therefore, the mOX40L_miR122 mRNA induced about two fold higher IL2 expression compared to a control (mock treated or non-translated mRNA).

[3639] FIGS. 28C and 28D show that, in the presence of plate-coated anti-human CD3 antibody and soluble anti-human CD28 as the primary T-cell activators, co-culture with the OX40L mRNA transfected HeLa cells greatly enhanced IL-2 production. Without OX40L expression, little to no IL-2 production was detected. FIG. 28E shows a similar level of increased human IL-2 production when the same experiment was performed with pre-stimulated (i.e., non-naïve) CD4+ T-cells.

[3640] These results show that the OX40L polypeptide is biologically active as a costimulatory molecule.

### Example 16

### In Vivo Expression Levels of OX40L Modified mRNA

[3641] To investigate in vivo expression levels of a polynucleotide comprising modified mRNA, a polynucleotide comprising an mRNA encoding luciferase and further comprising a miR-122 binding site was prepared (SEQ ID NO: 1210). The luciferase modified mRNA was formulated in MC3 LNP. (US Publication no. US20100324120).

### A. MC-38 Colon Adenocarcinoma Mouse Model

[3642] MC-38 colon adenocarcinoma tumors were established subcutaneously in C57BL/6 mice. (Rosenberg et al., Science 233(4770):1318-21 (1986)).

B. Treatment with Luciferase Modified mRNA

[3643] Once the MC-38 tumors reached approximately 200 mm³, mice were treated with a single intratumoral dose of 3.125 μg, 6.25 μg, 12.5 μg, 25 μg, or 50 μg of luciferase modified mRNA (SEQ ID NO: 1210; Cap1, G5 RP mRNA in 1.5% DMG MC3 LNP). Control animals were treated with intratumoral dose of PBS. 24 hours post-treatment, animals were anesthetized, injected with the luciferase substrate D-luciferin and the bioluminescence imaging (BLI) from living animals was evaluated in an IVIS imager 15 minutes later. Signals from tumor tissue were obtained and compared with signals from liver tissue in the same animal. Results are shown in FIG. 29.

### C. Results

[3644] FIG. 29 shows that the luciferase signal in tumor tissue was detected out to 48 hours post-dosing. FIG. 29 also shows that the three highest doses of modified mRNA (50 μg, 25 μg, and 12.5 μg) yielded comparable luciferase signals in tumor tissue. The 12.5 μg dose of modified mRNA yielded a high tumor signal with a lower liver (normal tissue) signal in the MC-38 colon carcinoma mouse model.

[3645] These results show that administration of a polynucleotide comprising a modified mRNA and a miRNA binding site preferentially targets tumor tissues over normal tissues.

### Example 17

[3646] In vivo Dose-Dependent Expression of OX40L in B16F10 tumors

[3647] In vivo expression of OX40L was assessed in a B16F10 tumor model.

A. Preparation of OX40L modified mRNA

[3648] A polynucleotide comprising an mRNA encoding an OX40L polypeptide (murine OX40L) and further comprising a miRNA binding site (miR-122) was prepared (mOX40L_miR122; SEQ ID NO: 1207). The OX40L modified mRNA was formulated in MC3 LNP as described in US20100324120. Negative control mRNA was also prepared (OX40L_NST, SEQ ID NO: 1209; a non-translatable version of the same mRNA except no initiating codons).

### B. Mouse Melanoma B16F10 Tumor Model

[3649] Subcutaneous B16F10 tumors were established in C57BL/6 mice. (Overwijk et al. Current Protocols in Immunology Ch. 20, Unit 20.1 (2001)).

[3650] Once the tumor size reached approximately 200 mm³, animals were treated with a single intratumoral dose of mOX40L_miR122 (CapI, G5 RP mRNA in 0.5 mol % DMG MC3 LNP) at a dose of 5 μg mRNA (approximately 0.25 mg/kg) or 15 μg mRNA (approximately 0.75 mg/kg). Control animals were treated with equivalent doses of negative control mRNA, OX40L_NST. Additional control animals were treated with PBS.

### C. Measurement of OX40L in Tumor Tissue

[3651] Animals were sacrificed 8 hours and 24 hours after dosing. Tumor tissue was harvested and analyzed for expression of OX40L using a mouse OX40L ELISA assay (R&D Systems, Minneapolis, MN). Results are shown in FIG. 30 as the amount of OX40L present per gram of tumor tissue.

### D. Results

[3652] FIG. 30 shows that a single intratumoral dose of 5 μg mOX40L_miR122 resulted in over 200 ng OX40 L/g tumor tissue at both 8 hours and 24 hours post dosing. FIG. 30 also shows that a single intratumoral dose of 15 μg mOX40L_miR122 resulted in over 500 ng OX40 L/g tumor tissue at both 8 hours and 24 hours post-dosing.

[3653] In contrast, less than 100 ng OX40L was detectable in the liver of animals treated with the higher 15 μg dose of mOX40L_miR122.

[3654] These data show that administration of mOX40L_miR122 results in significant levels of OX40L polypeptide expression in the tumor tissue.

### Example 18

### In Vivo Expression of OX40L in MC-38 Tumors

[3655] In vivo expression of OX40L was assessed in a MC-38 tumor model.

A. Preparation of OX40L modified mRNA

[3656] A polynucleotide comprising an mRNA encoding an OX40L polypeptide (murine OX40L) and further comprising a miRNA binding site (miR-122) was prepared (mOX40L_miR122; SEQ ID NO: 1207). The OX40L modified mRNA was formulated in MC3 LNP as described above. A negative control mRNA was also prepared (non-translatable version of the same mRNA containing multiple stop codons; OX40L_NST; SEQ ID NO: 1209).

### B. MC-38 Colon Adenocarcinoma Mouse Model

[3657] MC-38 colon adenocarcinoma tumors were established subcutaneously in C57BL/6 mice. (Rosenberg et al., Science 233(4770):1318-21 (1986)).

[3658] Once the tumors reached a mean size of approximately 100 mm³, animals were treated with a single intratumoral dose of mOX40L_miR122 (Cap1, G5 RP mRNA in 1.5 mol % DMG MC3 LNP) at a dose of 12.5 μg mRNA. Control animals were treated with an equivalent dose of negative control mRNA, OX40L_NST. Additional control animals were left untreated (“NT”). For dose-response experiments, animals were administered an intratumoral injection of 3.125, 6.25, or 12.5 μg mOX40L_miR122; control animals were left untreated or treated with 12.5 μg negative control mRNA.

### C. Measurement of OX40L in Tumor Tissue

[3659] To measure OX40L expression over time, animals were sacrificed 3, 6, 24, 48, 72, and 168 hours after dosing. Tumor tissue was harvested and analyzed for expression of OX40L using ELISA (R&D Systems, Minneapolis, MN), as described above in Example 5. Results are shown in FIG. 31A as the amount of OX40L present per gram of tumor tissue.

[3660] To measure OX40L expression as a function of dose-response, animals were sacrificed 24 hours after dosing and tumor tissue was harvested for analysis as described above. Tumor tissue, liver tissue, and spleen tissue were analyzed for quantity of OX40L protein (FIG. 31B-31D, upper) and mRNA (FIG. 31B-31D, lower).

[3661] Tumor cells were also analyzed for expression of OX40L on the cell surface using flow cytometry (data not shown). Tumor tissue was minced and processed through cell strainers to prepare single cell suspensions. Cell suspensions were stained with PE-conjugated anti-mouse OX40L antibody (R&D Systems, Minneapolis, MN), and visualized by flow cytometry.

### D. Results

[3662] FIG. 31A shows that a single intratumoral dose of 12.5 μg mOX40L_miR122 resulted in up to 1200 ng OX40 L/g tumor tissue at 24 hours post dosing. The optical densities for two of the 24-hour OX40L-treated samples were above the standard range, resulting in underestimated values shown in FIG. 31A. FIG. 31A also shows OX40L expression was detectable in tumor tissue out to 168 hours (7 days) post dosing. In contrast, control treated animals showed no detectable OX40L in tumor tissue at any time point. FIG. 31B shows a dose-dependent increase in OX40L protein (upper) and mRNA (lower) in tumor tissue. FIGS. 31C and 31D show the presence of OX40L protein and mRNA in liver and spleen (respectively) are lower than the amounts present in the tumor tissue.

[3663] Flow cytometry results showed that approximately 6.5% of all live, tumor-associated cells were positive for OX40L expression (data not shown).

[3664] These data show that administration of mOX40L_miR122 results in significant levels of OX40L polypeptide expression in the tumor tissue.

### Example 19

### In Vivo Efficacy of OX40L Modified mRNA in a Colon Adenocarcinoma Model

[3665] In Vivo Efficacy of a Polynucleotide Comprising an mRNA Encoding an OX40L Polypeptide was Assessed.

A. Preparation of OX40L modified mRNA

[3666] A polynucleotide comprising an mRNA encoding an OX40L polypeptide (murine OX40L) and further comprising a miRNA binding site (miR-122) was prepared as described above (mOX40L_miR122; SEQ ID NO: 1207). A negative control mRNA was also prepared (non-translatable version of the same mRNA containing multiple stop codons; NT OX40L_miR122; SEQ ID NO: 1209). Both modified mRNAs were formulated in MC3 LNP as described above.

### B. MC-38 Colon Adenocarcinoma Mouse Model

[3667] MC-38 colon adenocarcinoma tumors were established subcutaneously in C57BL/6 mice as described above.

[3668] Fourteen days after tumor cell inoculation, animals were treated twice weekly for three weeks with an intratumoral dose of MC3 LNP-formulated modified mRNA (15 μg mRNA per dose). Control animals were treated with an equivalent dose and regimen of negative control mRNA, NT OX40L_miR122 (SEQ ID NO: 1209).

[3669] Tumor volume was measured at the indicated time points using manual calipers. Tumor volume was recorded in cubic millimeters.

[3670] The in vivo efficacy study was carried out through Day 42 post-dosing. At the completion of the study, the full data sets were analyzed and presented in FIG. 32A and 32B. Final Kaplan-Meier survival curves were prepared and are shown in FIG. 32C. Endpoints in the study were either death of the animal or a tumor volume reaching 1500 mm³.

### C. Results

[3671] FIG. 32A shows that administering a control modified mRNA had little effect on the tumor volume, as assessed at the study completion (Day 42 after the first dose). FIG. 32B shows that administering mOX40L_miR122 to the mice inhibited or slowed tumor growth in some animals and reduced or decreased the size of the tumor in some animals, as assessed at study completion (Day 42).

[3672] FIG. 32C shows that animals receiving mOX40L_miR122 had longer survival times as measured on Day 42 compared to control animals.

[3673] These data show that mOX40L_miR122 polynucleotides have anti-tumor efficacy when administered in vivo.

### Example 20

### In Vivo Expression of OX40L in A20 Tumors

[3674] Mouse models of B-cell lymphoma using the A20 cell line are useful for analyzing a tumor microenvironment. (Kim et al., Journal of Immunology 122(2):549-554 (1979); Donnou et al., Advances in Hematology 2012:701704 (2012)). Therefore, in vivo expression of OX40L and the tumor microenvironment were assessed in an A20 B-cell lymphoma tumor model.

A. Preparation of OX40L modified mRNA

[3675] A polynucleotide comprising an mRNA encoding an OX40L polypeptide (murine OX40L) and further comprising a miRNA binding site (miR-122) was prepared as described above (mOX40L_miR122; SEQ ID NO: 1207). The OX40L modified mRNA was formulated in MC3 LNP as described above. A negative control mRNA was also prepared (non-translatable version of the same mRNA containing multiple stop codons; NT OX40L; SEQ ID NO: 1209).

### B. A20 B-Cell Lymphoma Tumor Model

[3676] B-cell lymphoma tumors were established subcutaneously in BALB/c mice. Mouse B-cell lymphoma cells (A20, ATCC No. TIB-208; ATCC, Manassas, VA) were cultured according to the vendor's instructions. Cells were inoculated subcutaneously in BALB/c mice to generate subcutaneous tumors. Tumor were monitored for size and palpability.

[3677] Once the tumors reached a mean size of approximately 1300 mm³, animals were separated into two groups. Group I was treated with a single intratumoral dose of mOX40L_miR122 (Cap1, G5 RP mRNA in 0.5 mol % DMG MC3 LNP) at a dose of 15 μg mRNA. Group II (controls) was treated with an equivalent dose of negative control mRNA, NT OX40L.

### C. Measurement of OX40L in Tumor Tissue

[3678] Tumor tissue was harvested 24 hours after dosing and analyzed for expression of OX40L using ELISA (R&D Systems, Minneapolis, MN), as described above. Results are shown in FIG. 33A as the amount of OX40L present per gram of tumor tissue.

[3679] A20 tumor cells were also analyzed for cell surface expression of OX40L. Tumor tissue was minced and processed through cell strainers to prepare single cell suspensions. Cells were stained with anti-mouse OX40L antibody (goat IgG polyclonal, PE conjugated; R&D Systems, Minneapolis, MN) and anti-mouse CD45 antibody (clone 30-F11, PE-Cy5 conjugated; eBioscience, San Diego, CA) to identify leukocytes (i.e., A20 cancer cells and infiltrating immune cells). The cells were subsequently analyzed by flow cytometry. Results are shown in FIGS. 33B and 33C.

### D. Results

[3680] FIG. 33A shows that a single intratumoral dose of 15 μg mOX40L_miR122 resulted in up to 250 ng OX40 L/g tumor tissue at 24 hours after dosing. In contrast, control treated animals showed less than 100 ng OX40L in tumor tissue 24 hours after dosing.

[3681] FIG. 33B shows that approximately 3% of all live, CD45+ cells (i.e., tumor cells) expressed OX40L on the cell surface. In a similar experiment, approximately 15.8% total live cells from the tumor were found to express introduced OX40L, compared to less than 0.5% OX40L-positive live cells in tumors treated with the negative control mRNA (FIG. 33C).

[3682] These data show that administration of mOX40L_miR122 results in significant levels of OX40L polypeptide expression in the tumor tissue.

### Example 21

### In Vivo Pharmacodynamic Effects of OX40L

[3683] The ability of mOX40L_miR122 mediated OX40L expression to recruit natural killer (NK) cells to the tumor site was assessed.

### A. A20 B-Cell Lymphoma Tumor Model

[3684] The B-cell lymphoma tumors described above in Example 8 were also assessed for NK cell infiltration following treatment. As described above, mice were treated with a single intratumoral dose of either mOX40L_miR122 or control NT OX40L mRNA (15 μg dose; Cap1, G5 RP mRNA in 0.5 mol % DMG MC3 LNP). 24 hours after dosing, tumors were harvested as described above and processed through cell strainers to prepare single cell suspensions.

### B. Natural Killer Cell Infiltration

[3685] Single cell suspensions were incubated with anti-mouse NKp46 antibody (clone 29A1.4, PerCP-eFluor® 710 conjugated; eBioscience, San Diego, CA), which is specific to the NK cell marker p46 (CD335), and anti-mouse CD3 antibody (clone 145-2C₁₁, FITC conjugated; BioLegend, San Diego, CA), which is specific to T-cells. The cells were analyzed based on CD45+ expression for leukocyte, as well as NKp46 and CD3E expression using flow cytometry. NK cells are p46* and CD3-. Results are shown in FIGS. 34A and 34B.

### C. Results

[3686] FIG. 34A shows that animals treated with mOX40L_miR122 exhibited approximately 5-fold increase in the relative number of NK cells within A20 tumors 24 hours after dosing. FIG. 34B shows the individual animal data from the same study.

[3687] These results show that treatment with a polynucleotide comprising an mRNA encoding an OX40L polypeptide increased the number of NK cells within the tumor microenvironment.

### Example 22

### In Vivo Efficacy of OX40L Modified mRNA in a B-Cell Lymphoma Model

[3688] In vivo efficacy of mOX40L_miR122 was assessed in a B-cell lymphoma model.

A. Preparation of OX40L modified mRNA

[3689] A polynucleotide comprising an mRNA encoding an OX40L polypeptide (murine OX40L) and further comprising a miRNA binding site (miR-122) was prepared as described above (mOX40L_miR122; SEQ ID NO: 1207). A negative control mRNA was also prepared (non-translatable version of the Factor IX mRNA containing multiple stop codons; NST-FIX, SEQ ID NO: 1208). Both modified mRNAs were formulated in the same manner (Cap1, G5 RP mRNA in 1.5 mol % DMG MC3 LNP).

### B. A20 B-Cell Lymphoma Tumor Model

[3690] B-cell lymphoma tumors were established subcutaneously in BALB/c mice. Mouse B-cell lymphoma cells (A20, ATCC No. TIB-208; ATCC, Manassas, VA) were cultured according to the vendor's instructions. Cells were inoculated subcutaneously in BALB/c mice to generate subcutaneous tumors. Tumor were monitored for size and palpability.

[3691] Once the tumors reached a mean size of approximately 100 mm³, animals were separated into two groups. Group I was treated with repeated intratumoral doses of mOX40L_miR122 (Cap1, G5 RP mRNA in 1.5 mol % DMG MC3 LNP) at a dose of 12.5 μg mRNA. Group II (control) was treated with an equivalent dose of negative control mRNA, NST-FIX. Animals were dosed on Days 20, 23, 27, 30, 34, 37, 41, 44, 48, and 51. Results are shown in FIGS. 35A, 35B, 35C, and 35D.

[3692] The study was carried out through Day 57. Final Kaplan-Meier survival curves were prepared and are shown in FIG. 35D. Endpoints in the study were either death of the animal or a tumor volume reaching 2000 mm³.

### C. Results

[3693] FIG. 35A shows individual tumor growth in animals treated with control NST-FIX mRNA. FIG. 35B shows individual tumor growth in animals treated with mOX40L_miR122. Arrows represent dosing days. Multiple doses of a control modified mRNA had little effect on the tumor volume. In contrast, multiple doses of mOX40L_miR122 reduced or decreased the size of tumors in some animals or inhibited the growth of tumors in some animals.

[3694] FIG. 35C shows the average tumor size for each group as assessed at Day 35 of the study. These data show that administering mOX40L_miR122 reduced or inhibited tumor growth compared to treatment with control mRNA. The following formula was used to calculate the percentage of tumor growth inhibition (TGI) at Day 34 compared to Day 19:

TGI %=[(Vc-Vt)/Vc-Vo)]×100

[3695] Using the formula above and the data shown in FIG. 35C, the TGI % for mOX40L_miR122 was 57%. In other words, animals treated with mOX40L_miR122 showed 57% tumor growth inhibition between Days 19 and 34 compared to control treated animals.

[3696] FIG. 35D shows that animals receiving mOX40L_miR122 had longer survival times as measured on Day 42 compared to control animals.

[3697] These data show that mOX40L_miR122 polynucleotides have anti-tumor efficacy when administered in vivo.

### Example 23

### In Vivo Memory Immune Response

[3698] mOX40L_miR122 was assessed for its ability to induce an adaptive (memory) immune response in the MC-38 adenocarcinoma model.

### A. Preparation of OX40L Modified mRNA

[3699] A polynucleotide comprising an mRNA encoding an OX40L polypeptide (murine OX40L) and further comprising a miRNA binding site (miR-122) was prepared as described above (mOX40L_miR122; SEQ ID NO: 1207). A negative control mRNA was also prepared (non-translatable version of the OX40L mRNA containing multiple stop codons; NST-OX40L, SEQ ID NO: 1209). Both modified mRNAs were formulated in the same manner (Cap1, G5 RP mRNA in 1.5 mol % DMG MC3 LNP).

### B. MC-38 Colon Adenocarcinoma Model

[3700] MC-38 colon adenocarcinoma tumors were established subcutaneously in C57BL/6 mice as described above.

[3701] Seven days after tumor cell inoculation, animals were treated every three days (Q3D) for a maximum of 10 intratumoral doses of MC3 LNP-formulated modified mRNA (12.5 μg mRNA per dose). Control animals were treated with an equivalent dose and regimen of negative control mRNA, NT OX40L_miR122.

[3702] Tumor volume was measured at the indicated time points using manual calipers. Tumor volume was recorded in cubic millimeters. At Day 60 post-tumor inoculation, six apparent complete responder animals (CR) from the mOX40L_miR122 group were re-challenged with 5×10⁵ MC-38 tumor cells; as a control, six naïve animals were also inoculated with 5×10⁵ MC-38 cells. The results of the analysis are shown in FIGS. 36A and 36B.

### C. Results

[3703] FIG. 36A shows individual tumor growth in animals treated with control NST-OX40L mRNA, mOX40L_miR122, or PBS. FIG. 36A shows that 6 out of 15 animals administered mOX40L_miR122 (40%) exhibited a complete response with no significant tumor growth as measured on Day 60. In comparison, animals administered the negative control mRNA construct or PBS showed significant tumor growth through Day 60. (FIG. 36A). These results show that administering an mRNA encoding an OX40L polypeptide reduces or decreases the size of a tumor or inhibits the growth of a tumor.

[3704] At Day 60, six complete responders (“CR”) from the mOX40L_miR122 group and six naïve control animals were re-challenged with MC-38 cells. FIG. 36B shows individual tumor growth in animals re-challenged with MC-38 cells. Animals previously administered mOX40L_miR122 showed no tumor growth (0/6 animals) for 23 days after re-challenge with tumor cells. In comparison, 67% (6/9 animals) of the animals in the naïve control group showed tumor growth at Day 23. These results show that administering an mRNA encoding an OX40L polypeptide induces a memory immune response with anti-tumor effects.

### Example 24

### Sustained In Vivo Expression of OX40L in A20 Tumors

[3705] In vivo expression of OX40L in the tumor microenvironment was assessed in an A20 B-cell lymphoma tumor model at various timepoints after one and/or two doses of a polynucleotide comprising an mRNA encoding an OX40L polypeptide.

A. Preparation of OX40L modified mRNA

[3706] A polynucleotide comprising an mRNA encoding an OX40L polypeptide (murine OX40L) and further comprising a miRNA binding site (miR-122) was prepared as described above (mOX40L_miR122; SEQ ID NO: 1207). The OX40L modified mRNA was formulated in MC3 LNP as described above. A negative control mRNA was also prepared (non-translatable version of the same mRNA containing multiple stop codons; NST-OX40L; SEQ ID NO: 1209).

### B. A20 B-Cell Lymphoma Tumor Model

[3707] B-cell lymphoma tumors were established as described above. Once the tumors reached a mean size of approximately 1300 mm³, animals were separated into three groups. Group I was treated with a single intratumoral dose of mOX40L_miR122 (Cap1, G5 RP mRNA in 0.5 mol % DMG MC3 LNP) at a dose of 15 μg mRNA. Group II (control) was treated with an equivalent dose of negative control mRNA, NT OX40L. Group III was treated with an intratumoral injection of PBS. Each group also comprised a sub-group of animals that received a second dose of mRNA or PBS 7 days after the first dose.

C. Measurement of OX40L expression

[3708] Live cells from A20 tumor cells were analyzed for cell surface expression of OX40L. Tumor tissue was minced and processed through cell strainers to prepare single cell suspensions. Live cells were stained with anti-mouse OX40L antibody (goat IgG polyclonal, PE conjugated; R&D Systems, Minneapolis, MN). The cells were subsequently analyzed by flow cytometry. Results are shown in FIG. 37.

### D. Results

[3709] FIG. 37 shows statistically significant OX40L expression at 24 hours, 72 hours, and 7 days after a single dose of mOX40L_miR122. In particular, FIG. 37 shows that OX40L expression in A20 tumors is sustained at 72 hours and 7 days after a single dose of mOX40L_miR122. These data In animals receiving a second dose, statistically significant OX40L expression was detected 24 hours after the second dose of mOX40L_miR122.

[3710] These data show that administration of mOX40L_miR122 results in significant, sustained levels of OX40L polypeptide expression in the tumor tissue.

### Example 25

### Identity of Cell Types Expressing OX40L after mRNA Treatment

[3711] The identity of cell types expressing OX40L post-mRNA treatment within A20 and MC38 tumors was evaluated. A polynucleotide comprising an mRNA encoding an OX40L polypeptide (murine OX40L) and further comprising a miRNA binding site (miR-122) was prepared as described above. Mouse models of A20 tumors and MC38 tumors were established as described above.

A. Cell differentiation by flow cytometry

[3712] Cells within A20 tumors were differentiated by CD19 and CD45 antibodies, which identify CD19-expressing B-lymphoma A20 cancer cells (CD19+, CD45+) from the non-cancer immune infiltrates (CD19⁻, CD45⁺) and the non-cancer/nonimmune cells (CD19⁻, CD45⁻), respectively. Results are shown in FIG. 38A. Cells within MC38 tumors were differentiated by CD45 marker to differentiate infiltrating host immune cells (CD45+) from cancer cells and non-immune host cells (CD45⁻). Results are shown in FIG. 38B. Immune infiltrate cells were differentiated with CD11b antibody. CD11b+ immune infiltrate cells were separately analyzed for OX40L expression. Results are shown in FIG. 38C.

### B. Results

[3713] FIG. 38A shows that in A20 tumors treated with mOX40L_miR122, 76% of the OX40L expressing cell population were the A20 tumor cells themselves, whereas approximately 19% of the OX40L positive cell population were infiltrating immune cells within the A20 tumors. The population of OX40L expressing host immune cells was shown to be predominantly myeloid lineage cells, as determined by positive staining for CD11b. Of the CD11b+ myeloid lineage cells in the A20 tumors, an average of 25.4% were positive for OX40L expression (FIG. 38C).

[3714] FIG. 38B shows that in MC38 tumors, the majority of OX40L positive cells were cancer cells (an average of 57.3%), while 35.6% of the positive cells were immune infiltrates, again primarily derived from myeloid lineage (CD45+, CD11b+).

[3715] These data show that administration of mOX40L_miR122 results in OX40L expression in a significant percentage of the tumor environment post-intratumoral mRNA administration, and that a majority of OX40L-expressing cells were cancer cells followed by myeloid immune cell infiltrates.

### Example 26

### Modulation of Immune Cell Populations within Tumors Treated with OX40L mRNA

[3716] Given the demonstrated activity of OX40L on innate immune natural killer (NK) cells and adaptive CD4+/CD8+ T cells, the objective of the following studies was to evaluate the pharmacodynamic effects of OX40L intratumoral treatment on tumor-associated immune cell populations. Mouse A20 and MC38 tumor models were established as described above.

### A. Cell Differentiation by Flow Cytometry

[3717] A20 tumors were treated with a single 12.5 μg dose of mOX40L_miR122 or control mRNA (RNA/LNP) formulated in lipid nanoparticles. Tumor samples were initially analyzed 24 hours following treatment. NK cells were differentiated using an antibody against the mature NK cell surface marker, DX5. Results are shown in FIG. 39A. Other tumor samples were analyzed 14 days after treatment with mOX40L_miR122. CD4⁺ and CD8⁺ T-cells were identified using anti-mouse CD4 and anti-mouse CD8 antibodies, respectively. Results are shown in FIG. 39B-39C.

[3718] A similar experiment was performed in the MC38 tumor model. Mice with MC38 tumors were administered a single intratumoral injection of mOX40L_miR122 or NST-OX40L. In some animals a second dose of mRNA was administered 6 days after the first dose. Immune cell infiltrate was assessed for CD8⁺ cells 24 hours and 72 hours after each dose of mRNA. Results are shown in FIG. 39D.

### B. Results

[3719] FIG. 39A shows that 24 hours after administration of mOX40L_miR122 to A20 tumors, NK cells infiltration significantly increased in OX40L-dosed animals compared to controls. FIG. 39B-39C show that 14 days after administration of mOX40L_miR122 to A20 tumors, both CD4⁺ (FIG. 39B) and CD8⁺ (FIG. 39C) T-cell infiltration into the tumor microenvironment significantly increased compared to control tumor samples.

[3720] FIG. 39D shows a significant increase in infiltrating CD8⁺ T-cells 72 hours after a second dose of mOX40L_miR122 in MC38 tumors compared to control treated tumors.

[3721] These data from two tumor models demonstrate that administration of a polynucleotide comprising an mRNA encoding an OX40L polypeptide promotes increased numbers of both innate and adaptive immune cells within the tumor microenvironment.

### Example 27

### In Vivo Efficacy in A20 Tumors

[3722] In vivo efficacy was assessed in the A20 tumor model. A20 tumors were established as described above.

### A. Tumor Treatment

[3723] Mice were treated with either 12.5 μg per dose mOX40L_miR122 in LNP, 12.5 μg per dose negative control mRNA designed not to be translated into protein in LNP (NST-OX40L), a PBS negative control, or left untreated. mRNA/LNPs and negative controls were dosed in a 25 μl volume directly into the A20 tumor lesions at a frequency of once every 7 days for up to 6 maximum doses. The tumor volumes of individual animals are shown in FIG. 40A (measured as mm³). A Kaplan-Meier survival curve of the same animals is shown in FIG. 40B. The x-axes of both graphs are Days post disease induction, i.e. subcutaneous cancer cell implantation.

### B. Results

[3724] FIG. 40A shows that an increased number of animals treated with mOX40L_miR122 exhibited tumor growth inhibition compared to control animals. All of the control animals (30/30) were sacrificed by Day 60 post disease induction (primarily due to reaching the pre-determined tumor burden endpoint≥2000 mm3). In contrast, 4/9 animals or 44% of the mOX40L_miR122-treated mice had not yet reached the tumor burden endpoint by Day 98.

[3725] FIG. 40B shows the survival benefit of mOX40L_miR122 treatment, in which 2 mice in the mOX40L_miR122 arm (as designated by asterisk* in FIG. 40A) and 1 from the PBS group were removed from the study due to tumor ulceration and not included in the survival estimate. By this criteria, 2/8 or 25% of the OX40L mRNA treated animals were apparent complete responders by Day 98 post implantation compared to 0/29 of the control animals.

[3726] These data show the in vivo efficacy of administering a polynucleotide comprising an mRNA encoding an OX40L polypeptide (mOX40L_miR122) in the A20 tumor model.

### Example 28

### miR-122 Modulates OX40L Expression

[3727] The effects of incorporating a miR-122 binding site into the polynucleotide were assessed.

A. Preparation of OX40L modified mRNA

[3728] A polynucleotide comprising an mRNA encoding an OX40L polypeptide (murine OX40L) and further comprising a miRNA binding site (miR-122) was prepared as described above (mouse OX40L, mOX40L_miR122, SEQ ID NO: 1207; human OX40L, hOX40L_miR122, SEQ ID NO: 1206). Polynucleotides comprising an mRNA encoding mouse OX40L polypeptide or human OX40L polypeptide, each without a miR-122 binding site, were also prepared to compare the effects of the presence of the miR-122 binding site.

### B. Cell Transfections

[3729] Primary human hepatocytes, human liver cancer cells (Hep3B), and human cervical carcinoma cells (HeLa) were transfected with a polynucleotide comprising an mRNA encoding human OX40L polypeptide (hOX40L) or a polynucleotide comprising an mRNA encoding human OX40L polypeptide and further comprising a miR-122 binding site (hOX40L_miR122). Cells were analyzed for OX40L expression 6 hours, 24 hours, and 48 hours after transfection. Results are shown in FIG. 41A. The same experiment was also performed with mouse OX40L, as shown in FIG. 41B.

### C. Results

[3730] FIG. 41A shows that incorporating a miR-122 binding site into the polynucleotide markedly reduced human OX40L expression in primary hepatocytes at later timepoints. Specifically, at 24 hours post-transfection, OX40L expression was reduced by 88% from 6,706 ng/well in cells treated with a hOX40L (no miR-122 binding site) to 814 ng/well in cells treated with hOX40L_miR122 (comprising a miR-122 binding site). At 48 hours post-transfection, OX40L expression was reduced by 94% from 11,115 ng/well to 698 ng/well in cells treated with a polynucleotide comprising a miR-122 binding site.

[3731] FIG. 41B shows similar results for mouse OX40L. Incorporating a miR-122 binding site into the polynucleotide reduced mouse OX40L expression in primary hepatocytes by 85% at 24 hours (from 1,237 ng/well to 182 ng/well) and by 91% at 48 hours (from 1,704 ng/well to 161 ng/well).

[3732] These data show that incorporating a microRNA binding site (miR-122) into a polynucleotide comprising an mRNA encoding an OX40L polypeptide reduces expression of the OX40L polypeptide in primary hepatocytes compared to a polynucleotide lacking a miR-122 binding site.

### Example 29

### Efficacy of Intravenous Administration of OX40L_miR122 mRNA in a Subcutaneous P388D1 model

[3733] The P388D1 cell line is a myeloid cell-derived cancer isolated from a mouse of the DBA/2 strain. The P388D1 syngeneic tumor model was used to assess the efficacy of intravenously administered OX40L_miR122 mRNA formulated in C₁₈ PEG containing lipid nanoparticles (LNPs).

### A. Study Design

[3734] P388D1 cells were implanted subcutaneously in DBA/2 mice. Treatment began 3 days post implantation and continued for 3 weeks (to 20 days post implant.) Briefly, 0.5×10⁶ P388D1 cells were implanted subcutaneously into female DBA2 mice at day 0. Mice were enrolled in treatment study based on emergence of palpable tumors at day 3. During the treatment period, animals exhibiting>20% weight loss, tumor burden>2000 mm³, or other signs of distress were humanely euthanized.

### Treatment Arms Included:

[3735] PBS control;
[3736] Negative control mRNA (NST-mOX40L-miR122) MC3-DSPE LNP, 0.5 mg/kg (dosing once weekly); and
[3737] mOX40L-miR122 MC3-DSPE LNP, 0.5 mg/kg (dosing once weekly)

### B. Results

[3738] Treatment with LNPs carrying mOX40L mRNA at 0.5 mg/kg produced delay in tumor growth in 3/10 mice compared to mice treated with both negative control (NST-OX40L) LNP and PBS. FIG. 42A shows continued tumor growth in mice treated with PBS control. FIG. 42B shows continued tumor growth in mice treated with negative control mRNA formulated with MC3-DSPE LNP. FIG. 142C shows reduced or delayed tumor growth in mice treated with mOX40L-miR122 formulated with MC3-DSPE LNP. Arrows indicate dose days post tumor implantation (days 4, 11, and 18). As shown in FIG. 42C, delayed tumor growth was observed in animals treated with mOX40L-miR122.

[3739] FIG. 43 shows that an overall increase in survival was observed in animals with reduced tumor growth after mOX40L-miR122 treatment. No animal in either control group survived beyond Day 17. In contrast, survival for animals treated with mOX40L-miR122 was extended to Day 25.

[3740] Animals were also observed for adverse clinical signs at least once daily. Individual body weights were recorded 3 times weekly. Changes in body weight during treatment are shown in FIG. 44.

[3741] Control animals (PBS treated, shown by shaded circles in FIG. 44) exhibited clinical signs, such as weight loss and mortality, that were typical for animals with advanced disease in this model. Mice were humanely euthanized upon appearance of advanced clinical signs, excessive weight loss or at study termination.

[3742] Treatment with the LNPs carrying negative control mRNA (NST treated, shown by shaded squares in FIG. 44) and mOX40L-miR122 (shown by open circles in FIG. 44) were well-tolerated, with weight loss, necropsy findings and clinical signs similar to those of the NST control group. None of the observations within any group suggested issues with tolerance to treatment.

### Example 30

### In Vivo Anti-Tumor Efficacy of IL12 Modified mRNA in a Colon Adenocarcinoma (MC38) Syngeneic Model (Intravenous Administration)

[3743] The in vivo anti-tumor efficacy of murine IL12 mRNA, administered as a single intravenous (IV) dose in mice bearing M38 adenocarcinoma tumors, was assessed.

A. Preparation of IL12 Modified mRNA and Control

[3744] A polynucleotide comprising a nucleotide sequence encoding an IL12 polypeptide (murine IL12) and a miRNA binding site (miR-122) in its 3′ UTR was prepared. (mIL12_miR122). A negative control mRNA was also prepared (non-translatable version of mRNAs), e.g., NST-FIX. Both modified mRNAs were formulated in MC3 lipid nanoparticles (LNP). See, U.S. Patent Pub. 2010/0324120, incorporated herein by reference in its entirety.

[3745] FIG. 45 shows a comparison of protein expression from sequence optimized mRNA encoding IL12B-linker-IL12A fusion protein (sequences comprising an miRNA (miR-122) binding site) over the corresponding mRNA comprising wild-type IL12A and wild-type IL12B sequences.

### B. MC-38 Colon Adenocarcinoma Mouse Model

[3746] MC-38 colon adenocarcinoma tumors were implanted subcutaneously in mice as described in Rosenberg et al., Science 233:1318-1321 (1986)).

[3747] Ten days after tumor implantation, two groups of animals were administered a single intravenous dose of LNP-formulated IL12 modified mRNA (at a dose of either 0.1 mg/kg (group 4) or 0.05 mg/kg (group 5). Two groups of control animals were treated with equivalent doses of negative control mRNA (NST-FIX LNP) (group 7 and group 8), PBS (group 1), or IL12 protein, 1 μg (group 2).

[3748] Tumor volume was measured using manual calipers. Tumor volume mean to day 24 (FIG. 46) was recorded in cubic millimeters (mm³).

### C. Results

[3749] Higher AUC and Cₘₐₓ for IL12 plasma levels were observed following administration of IL12 mRNA in lipid nanoparticle (LNP) compared to the corresponding IL12 recombinant protein (FIG. 47A). Higher AUC and Cₘₐₓ for IFNγ plasma levels were observed following administration of IL12 mRNA administered in lipid nanoparticle (LNP) compared to IL12 recombinant protein (FIG. 47B). The higher AUC levels for IL12 and IFNγ plasma levels observed following treatment with IL12 mRNA administered in lipid nanoparticle (LNP) at 0.1 mpk and 0.05 mpk, compared to treatment with IL12 recombinant protein at approximately 0.05 mpk are shown in FIG. 47C. The numbers in parentheses indicate the x-fold increase for mRNA over protein.

[3750] FIG. 46 depicts the robust efficacy of a single intravenous (IV) dose of IL12 mRNA in lipid nanoparticle (LNP), at doses of 0.1 mg/kg (Group 4) and 0.05 mg/kg (Group 5)(as indicated by lines with the inverted triangles), compared to Groups 1 (PBS), 2 (IL12 protein), 7 and 8 (controls NST-FIX, 0.1 mg/kg and 0.05 mg/kg, respectively).

[3751] FIGS. 48A-48F depict the mean tumor volume and the number of complete responses (CR) seen following administration of a single intravenous (IV) dose of: IL12 mRNA in lipid nanoparticle (LNP), at doses of 0.1 mg/kg (Group 4)(FIG. 48F) and 0.05 mg/kg (Group 5)(FIG. 48E), PBS (Group 1)(FIG. 48A), IL12 protein (Group 2)(FIG. 48D), controls NST-FIX, 0.1 mg/kg and 0.05 mg/kg (Groups 7 and 8, respectively) (FIG. 48C and FIG. 48B, respectively). Complete responses (CRs) are shown in FIG. 48E and FIG. 48F only. FIG. 48E shows that 6 of 8 CRs were seen in Group 5 (IL12 mRNA in lipid nanoparticle (LNP), at a dose of 0.05 mg/kg). FIG. 48F shows that 5 of 9 CRs were seen in Group 4 (IL12 mRNA in lipid nanoparticle (LNP), at a dose of 0.1 mg/kg). Aside from the IL12 mRNA groups, no other group observed any CRs.

[3752] FIG. 49 depicts the survival benefit at day 47 post tumor-implantation from a single intravenous (IV) dose of IL12 mRNA in lipid nanoparticle (LNP) at a dose of 0.05 mg/kg (group 5) and at a dose of 0.1 mg/kg (group 4).

[3753] Notably, FIGS. 5-7 demonstrate the advantage of administering intravenous IL12 mRNA over protein in terms of improved pharmacokinetics (PK), pharmacodynamics (PD), and therapeutic efficacy, with a single IV dose.

[3754] FIG. 50 depicts the tolerability advantage of local (intratumoral) administration of IL12 mRNA over systemic (intravenous) administration. Nine (9) of 10 mice intratumorally administered IL12 mRNA were viable at day 20 compared to 3 of 12 mice intravenously administered IL12 mRNA.

### Example 31

### In Vivo Anti-Tumor Efficacy of IL12 Modified mRNA in a Colon Adenocarcinoma (MC38) Model (Intratumoral Administration)

[3755] The in vivo anti-tumor efficacy of IL12 mRNA, administered intratumorally in mice bearing M38 adenocarcinoma tumors, was assessed.

A. Preparation of IL12 Modified mRNA and Control

[3756] A polynucleotide comprising a nucleotide sequence encoding an IL12 polypeptide (murine IL12) and a miRNA binding site (miR-122) was prepared (mIL12_miR122). A negative control mRNA, NST-FIX mRNA, was also prepared. Both modified mRNAs were formulated in MC3 lipid nanoparticles (LNP). See, U.S. Patent Pub. 2010/0324120, incorporated herein by reference in its entirety.

### B. MC-38 Colon Adenocarcinoma Mouse Model

[3757] MC-38 colon adenocarcinoma tumors were implanted subcutaneously in mice as described in Rosenberg et al., Science 233:1318-1321 (1986)).

[3758] Ten days after tumor implantation, animals were administered a single intratumoral dose of MC3 LNP-formulated murine IL12 modified mRNA (4 μg mRNA per dose). Two groups of control animals were treated with an equivalent dose and regimen of negative control mRNA (NST-FIX LNP) or PBS.

[3759] Tumor volume was measured at the indicated time points in FIG. 51B using manual calipers. Tumor volume mean to day 24 (FIG. 51A) and individual tumor volume to day 47 (FIG. 51B) were recorded in cubic millimeters (mm³). Endpoints in the study were either death of the animal or a tumor volume reaching 1500 mm³.

### C. Results

[3760] FIG. 51A shows that mean tumor volume was reduced when MC3 LNP-formulated murine IL12 modified mRNA was administered. In contrast, administering a control modified mRNA (NST-FIX) or PBS to the mice had little effect on reducing the tumor volume mean when assessed up to day 24.

[3761] FIG. 51B shows that administering MC3 LNP-formulated murine IL12 modified mRNA to the mice decreased individual tumor volumes in some animals compared to animals administered control modified mRNA (NST-FIX) or PBS. Complete responses (CRs) were seen in 3 of 7 animals (44%), with 3 animals removed due to ulceration. This data shows that mIL12 miR122 polynucleotides have anti-tumor efficacy when administered intratumorally in vivo.

### Example 32

### In Vivo Anti-Tumor Efficacy of Murine IL12 Modified mRNA in a B-Cell Lymphoma (A20) Syngeneic Model

[3762] The in vivo anti-tumor efficacy of murine IL12 mRNA, administered intratumorally in mice bearing A20 B-cell lymphoma tumors, was assessed.

A. Preparation of IL12 modified mRNAs and controls

[3763] A polynucleotide comprising a nucleotide sequence encoding an IL12 polypeptide (murine IL12) without a miRNA binding site (miRless) was prepared. (IL12 miRless). A polynucleotide comprising a nucleotide sequence encoding an IL12 polypeptide (murine IL12) and a miRNA binding site (miR-122) was prepared (mIL12 miR122). The miR-122 binding element was incorporated to decrease protein production from the liver. A negative control mRNA (NST) was also prepared (non-translatable version of the same mRNA) (NST IL12_miRless). All modified mRNAs were formulated in MC3 lipid nanoparticles (LNP). See, US20100324120, incorporated herein by reference in its entirety.

### B. A20 B-Cell Lymphoma Tumor Model

[3764] Mouse models of B-cell lymphoma using the A20 cell line are useful for analyzing tumors. (Kim et al., Journal of Immunology 122:549-554 (1979); Donnou et al., Advances in Hematology 2012:701704 (2012), incorporated herein by reference in their entirety). A20 cells are derived from a B cell lymphoma from a BALB/c mouse and are typically grown in syngeneic mice as a subcutaneous implant. 500,000 A20 cells were implanted subcutaneously in BALB/c mice to generate subcutaneous tumors. Tumors were monitored for size and palpability.

[3765] Once the tumors reached an average size of 100 mm³, the mice were cohorted into three groups. One test group was administered intratumorally mIL12_miRless in MC3-based lipid nanoparticles (LNP) at a dose of 5 μg of mRNA (FIG. 52B, FIG. 53A). The second test group was administered intratumorally mIL12_miR122 in MC3-based lipid nanoparticles (LNP) of 5 μg of mRNA (FIG. 53B). The control group was administered an equivalent dose of non-translated control mRNA (NST) (FIG. 52A). Animals were dosed on day 10 post implantation.

[3766] The study was carried out through day 50 post implantation. Endpoints in the study were either death of the animal or a pre-determined endpoint of 2000 mm³ tumor volume.

### C. Results

[3767] FIG. 52A shows that tumor volume (measured in mm³) increased over time in all 12 animals treated with 5 μg control NST mRNA. FIG. 52B shows that tumor volume decreased over time in some animals treated with mIL12_miRless compared to animals administered control mRNA (NST). Complete responses (CRs) were seen in 5 of 12 animals (42%).

[3768] FIG. 53A and FIG. 53B compare changes in tumor volume between animals treated with 5 μg mIL12_miRless (FIG. 53A) and animals treated with 5 μg mIL12-miR122 (FIG. 53B). Complete responses (CR) were achieved in 5 out of 12 mice in the mIL12 miRless group (FIG. 53A) and 6 out of 12 mice in the IL12-miR122 group (FIG. 53B).

[3769] The data in FIG. 53A and FIG. 53B show that mIL12_miRless and mIL12-miR122 polynucleotides have comparable anti-tumor efficacy when administered intratumorally in vivo.

### Example 33

### Single and Multidose In Vivo Anti-tumor Efficacy of a Modified IL12 mRNA

[3770] The in vivo anti-tumor efficacy of a modified murine IL12 mRNA, administered as a single 0.5 μg dose and a multidose (0.5 μg for 7 days x 6), was studied in BALB/C mice bearing A20 B-cell lymphoma tumors.

A. Modified IL12 mRNA

[3771] A polynucleotide comprising a nucleotide sequence encoding an IL12 polypeptide (murine IL12) and a miRNA binding site (miR-122) was prepared. (mIL12_miR122). A polynucleotide comprising a nucleotide sequence encoding an IL12 polypeptide (murine IL12) without a miRNA binding site (miRless) was prepared. (mIL12 miRless). One group of mIL12_miR122 mRNA was formulated in MC3-based lipid nanoparticles (LNP). See, US20100324120, incorporated herein by reference in its entirety. Another group of mIL12 miR122 mRNA was formulated in compound 18-based lipid nanoparticles (LNP).

### B. Dosing

[3772] On day 10 post implantation, two groups of mice bearing A20 tumors (n=12 in each group) were administered a single 0.5 μg dose of murine IL12 mRNA in the form of IL12 miRless- or IL12 miR122-mRNA in MC3-based LNP.

[3773] Also on day 10 post implantation, another group of mice bearing A20 tumors was intratumorally administered weekly dosing of 0.5 μg of IL12 miR122 mRNA in MC3-based LNP for 7 days x 6.

[3774] Also on day 10 post implantation, another group of mice bearing A20 tumors was intratumorally administered weekly dosing of 0.5 μg of IL12 miR122 mRNA in compound 18-based LNP for 7 days x 6.

[3775] Finally, 10 days post implantation, another group of mice bearing A20 tumors (n=12 per group) was administered weekly dosing of 0.5 μg non-translated negative control mRNA (NST) in either MC3-based LNP or compound 18-based LNP for 7 days x 6.

### C. Results

[3776] As shown in FIG. 54A and FIG. 54B, in vivo anti-tumor efficacy in a B-cell lymphoma tumor model (A20) was achieved after mice bearing A20 tumors were administered a single dose of 0.5 μg murine IL12 mRNA in MC3-based lipid nanoparticle (LNP). FIG. 54A depicts decreased tumor volume in some mice administered IL12 miRless (0.5 μg), and that four (4) complete responses (CR) were achieved. FIG. 54B depicts decreased tumor volume in some mice administered IL12 miR122 (0.5 μg), and that three (3) complete responses (CR) were achieved.

[3777] As shown in FIG. 55A and FIG. 55B, in vivo anti-tumor efficacy was enhanced with a weekly dosing regimen of IL12 miR122 mRNA in MC3-based LNP (0.5 μg mRNA for 7 days x 6), compared to single dosing. FIG. 55A shows that three (3) complete responses (CR) were achieved in the 12 A20-bearing mice administered a single dose of 0.5 μg IL12 miR122 mRNA. FIG. 55B shows that five (5) CRs were achieved in the 12 A20-bearing mice administered weekly dosing of 0.5 μg IL12 miR122 mRNA for seven (7) days×6.

[3778] As shown in FIG. 56A and FIG. 56B, in vivo anti-tumor efficacy of weekly intratumoral doses of 0.5 μg IL12 mRNA in compound 18-based lipid nanoparticle (LNP) administered to A20-bearing mice was similar to the in vivo anti-tumor efficacy of IL12 mRNA in MC3-based LNP. FIG. 56A shows the individual tumor volume (mm³) for 12 mice administered 0.5 μg IL12 miR122 in MC3-based LNP for 7 days x 6. Complete responses (CR) were achieved in 5 out of 12 animals. FIG. 56B shows the individual tumor volumes for 12 mice administered 0.5 μg of IL12 mRNA in compound 18-based LNP for 7 days x 6. Complete responses (CR) were also achieved in 5 out of 12 animals.

[3779] As shown in FIG. 57A and FIG. 57B, tumor growth was observed in mice bearing A20 tumors administered weekly dosing (7 days×6) of 0.5 μg non-translated negative control mRNA (NST) in MC3-based lipid nanoparticle (LNP) (FIG. 57A) and 0.5 μg NST in compound 18-based LNP (FIG. 57B).

[3780] This data shows that polynucleotides comprising modified murine IL12 mRNA (both miR122 and miRless) show anti-tumor efficacy at low doses (0.5 μg). It also shows that in vivo anti-tumor efficacy can potentially be enhanced with a multiple dosing regimen. Finally, the data shows in vivo anti-tumor efficacy when 0.5 μg IL12 miR122 mRNA in MC3-based and compound 18-based LNP is administered intratumorally weekly (for 7 days x 6). In contrast, tumor growth was observed in mice bearing A20 tumors administered weekly dosing (7 days×6) of 0.5 μg non-translated negative control mRNA (NST) in MC3-based lipid nanoparticle (LNP) and in compound 18-based LNP.

### Example 34

### Analysis of Levels of IL12 p70, IFNγ, IP10, IL6, GCSF, and GROa in Plasma and Tumors of A20-Bearing Mice Following Administration of Murine IL12 mRNA

[3781] On day 10 post implantation, groups of mice bearing A20 tumors (n=12 in each group) were administered a dose of miR122 IL12 mRNA (at 5 μg, 2.5 μg, or 0.5 μg) in MC3-based LNP or compound 18-based LNP, NST or IL12 protein at the same dosages, or PBS.

[3782] The levels of tumor and plasma IL12 p70, as well as the level of other cytokines, were determined at 6 and 24 hours after administration of the dosages. The levels of IL12 (p70) were determined using a sandwich ELISA commercial kit. The levels of IFNγ, IP10, IL6, G-CSF, and GROu were also determined.

[3783] Results: FIG. 58A and FIG. 58B show dose-dependent levels of IL12 in plasma (FIG. 58A) and tumor (FIG. 58B) at 6 hours and 24 hours following administration of the indicated doses of murine IL12 mRNA in a lipid nanoparticle (LNP) to mice bearing A20 tumors.

[3784] FIG. 59A and FIG. 59B show elevated levels of IL12 in plasma and tumor following administration of the indicated doses of murine IL12 mRNA in compound 18-based LNPs compared to murine IL12 mRNA in MC3-based LNPs. FIG. 59C shows plasma and tumor IL12 levels at 6 hours and 24 hours.

[3785] FIG. 60A and FIG. 60B show increased levels of IFNγ at 6 hours and 24 hours in plasma (FIG. 60A) and in tumor (FIG. 60B) following administration of murine IL12 mRNA to mice bearing A20 tumors.

[3786] FIG. 61A and FIG. 61B show increased levels of IP10 at 6 hours and 24 hours in plasma (FIG. 61A) and in tumor (FIG. 61B) following administration of murine IL12 mRNA to mice bearing A20 tumors.

[3787] FIG. 62A and FIG. 62B show decreased levels of IL6 at 6 hours and 24 hours in plasma (FIG. 62A) and in tumor (FIG. 62B) following administration of murine IL12 mRNA in compound 18-based LNP compared to murine IL12 mRNA in MC3-based LNP.

[3788] FIG. 63A and FIG. 63B show decreased levels of GCSF at 6 hours and 24 hours in plasma (FIG. 63A) and in tumor (FIG. 63B) following administration of murine IL12 mRNA in compound 18-based LNP compared to murine IL12 mRNA in MC3-based LNP.

[3789] FIG. 64A and FIG. 64B show decreased levels of GROu at 6 hours and at 24 hours in plasma (FIG. 64A) and tumor (FIG. 64B) following administration of murine IL12 RNA in compound 18-based LNP compared to murine IL12 mRNA in MC3-based LNP.

[3790] The data in this example show dose dependent levels of murine IL12 in plasma and tumor with intratumoral administration of murine IL12 mRNA. The data also show increased IL12 levels in plasma and tumor from compound 18-based LNPs compared to MC3-based LNP, as well as increased IFNγ and IP10 levels, attributable to administration of murine IL12 mRNA. Finally, this example shows decreased levels of IL6, GCSF, and GROu in plasma and tumor with compound 18-formulated murine IL12 mRNA compared to MC3-formulated murine IL12 mRNA.

### Example 35

### In Vivo Anti-Tumor Efficacy of Intravenous (IV) Administration of IL12_miR122 mRNA in a Subcutaneous A20 Model

### A. Study Design

[3791] 500,000 A20 cells were implanted subcutaneously in BALB/c mice. A20 tumor-bearing mice were cohorted into 2 treatment groups (N=10) when tumor averages reached approximately ˜100 mm³. Mice were IV dosed with 0.5 mg/kg murine mRNA in a C18 PEG containing LNP (MC3:cholesterol: DSPC:PEG-DSPE at mol % s of 50:38.5:10:1.5) every 7 days (Q7D).

[3792] The control group were treated with negative control mRNA formulated in LNP, whereas the treatment group were dosed with LNPs containing murine IL12 mRNA with a miR122 binding element with in the 3′ UTR. Both the use of the C18-containing LNP and the incorporation of the miR122 binding element were meant to mitigate potential protein production from the liver.

[3793] Tumor volumes and body weights were measured twice a week, and general clinical observations made in accordance with an accepted IACUC protocol until a pre-determined endpoint of 2000 mm³ tumor volume was reached. B. Efficacy Data

[3794] The individual tumor volumes from mice treated with weekly dosing of IL12 murine mRNA plus a miR122 binding element formulated in a C18 PEG-containing LNP are shown in FIG. 65B compared to appropriate negative controls in FIG. 65A. Dosing days are indicated by vertical red hashed lines, and the pre-determined endpoint of 2000 mm³ tumor volume indicated by horizontal black hashed line. C. Assessment of Side Effects/Toxicity

[3795] The individual body weights from mice treated with weekly dosing of murine IL12 mRNA plus a miR122 binding element formulated in a C18 PEG-containing LNP are shown in FIG. 66B compared to appropriate negative controls in FIG. 66A.

[3796] D. Conclusion

[3797] The intravenous administration of murine IL12 mRNA delayed the growth of A20 tumors as compared to an appropriate negative control (i.e., IV treatment of identically formulated mRNA with a miR122 binding element that had no start “NST” codons). The efficacious dosing of 0.5 mg/kg Q7D was well-tolerated as determined by general clinical observations and more quantitatively by body weight measurements.

### Example 36

### In Vivo Anti-Tumor Efficacy of Intraperitoneal (IP) Administration of IL12 Modified Murine mRNA in an IP MC38 Model

### A. Study Design

[3798] The luciferase reporter gene was integrated within the MC-38 colon cell line to enable measurement of bioluminescence from these cells if grown in a context that tumor burden could not be assessed by caliper in live animals. The light output from these cells has been correlated with tumor burden.

[3799] 500,000 MC-38 luciferase-enabled (MC38-luc) cells were inoculated in the peritoneal cavity as a model of colon cancer metastasis to this space. Mice were assigned to various treatment groups based on bioluminescent signal, and treatment started 7 days post disease induction.

[3800] Mice were treated with a single intraperitoneal (IP) dose of murine mRNA formulated in a LNP (MC3:cholesterol:DSPC:PEG-DMGat mol % s of 50:38.5:10:1.5) and compared to a single IP dose of 1 μg recombinant mouse IL12 protein. A single dose of 2 fixed dose levels of mRNA (2 and 4 μg) were administered at day 7 post disease induction, and murine IL12 mRNAs with and without a miR122 binding element were assessed in different treatment groups compared to appropriate negative controls (non-start NST mRNA with a miR122 binding element encapsulated in an identically formulated LNP).

[3801] Tumor volumes and body weights were frequently measured, and general clinical observations made in accordance with appropriate IACUC protocols.

### B. Efficacy Data

[3802] Bioluminescence (BL) was used as a surrogate for tumor burden and measured on several days including day 22 post disease induction as depicted in FIG. 67. Treatment groups and dose levels are indicated below the X-axis in FIG. 68. From left to right, mice were administered no treatment, 2 μg mIL12_miRless, 2 μg mIL12_miR122, 2 μg NST_OX40L_122, 4 μg mIL12_miRless, 4 μg mIL12_miR122, 4 μg NST_OX40L_122, and 1 μg rm IL12. Mice treated with murine IL12 mRNA in all arms exhibited lower BL signal than negative controls.

### C. Assessment of Side Effects/Toxicity

[3803] The treatments were generally well tolerated, and no treatment groups exhibited a body weight loss average of over 10%.

### D. Conclusion

[3804] As shown in FIG. 68, mice treated with both fixed doses of murine IL12 mRNA exhibited lower levels of BL signal as a measure of tumor burden compared to negative controls, and this inhibited BL level was associated with an apparent survival benefit of intraperitoneally-dosed murine IL12 mRNA. Murine IL12 mRNA that contained a miR122 binding domain within the 3′ UTR exhibited similar efficacy to mRNA without this regulatory element (miR-less). The effective doses employed were considered generally well-tolerated.

### Example 37

### mRNA Encoding IL15 and hIL15Rα

[3805] Human sequence optimized (hOpt) mRNA encoding human IL15 was prepared along with mRNAs encoding wild type human IL15Ra, the extracellular domain of human IL15Ra, wild type mouse IL15Ra, and the extracellular domain of mouse IL15Ra. See TABLES 10 and 11.

### Example 38

### In vitro expression and bioactivity of hOpt IL15 mRNA

[3806] HeLa cells in 6-well tissue culture plates were transfected with hOpt IL15 mRNA alone or in combination with human IL15Rα extracellular domain (“ECD”) mRNA, human IL15Rα wild type (“WT”) mRNA, mouse IL15Rα ECD mRNA, or mouse IL15Rα WT mRNA. The amount of secreted, cell-associated, and total IL15 produced by the transfected HeLa cells in each well was determined. The half maximal effective concentration (“EC50”) in CTLL-2 cells associated with corresponding transfections as well as administration of recombinant human IL15 protein was also determined. Results are shown in TABLE E3.

TABLE E3
Amounts of IL15 produced by hOpt IL15 mRNA and EC₅₀ in vitro

| | | Cell- | | |
|---|---|---|---|---|
| | Secreted | associated | Total | EC₅₀ |
| | IL15 | IL15 | IL15 | CTLL-2 |
| | (pmol/ | (pmol/ | (pmol/ | cells |
| Source of IL15 | well)* | well)* | well)* | (nM) |
| hOpt IL15 mRNA | 3.6 | 5.2 | 8.8 | 0.013 |
| hOpt IL15 mRNA + | 78.2 | 7.9 | 86.1 | 0.058 |
| hIL15Rα ECD mRNA | | | | |
| hOpt IL15 mRNA + | 26.1 | 67.9 | 94.0 | 0.053 |
| hIL15Rα WT mRNA | | | | |
| hOpt IL15 mRNA + | 40.8 | 6.3 | 47.1 | 0.021 |
| mIL15Rα ECD mRNA | | | | |
| hOpt IL15 mRNA + | 29.5 | 109.4 | 138.9 | 0.039 |
| mILI5Rα WT mRNA | | | | |
| Recombinant hIL15 | — | — | — | 0.062 |
| protein | | | | |

*Based on transfection of HeLa cells in 6-well plates.

[3807] The activities of mRNA-produced IL15 and the various IL15/IL15Rα complexes was confirmed in primary mouse T cells (data not shown).

### Example 39

### In Vivo Expression and Bioactivity of hOpt IL15 mRNA

[3808] Non-tumor bearing C57BI/6J female mice were injected intravenously with a single dose of 0.5, 0.25, or 0.1 mg/kg hOpt IL15 mRNA alone, or 0.5 mg/kg hOpt IL15 mRNA (FIG. 69A shows the structure of the construct) co-administered with 0.5, 0.25, or 0.1 mg/kg of either: (1) human IL15Rα wild type (“WT”) mRNA, (2) human IL15Rα extracellular domain (“ECD”) mRNA, (3) mouse IL15Rα WT mRNA, or (4) mouse IL15Rα ECD mRNA. Additional mice were injected intraperitoneally with 5 μg IL15 recombinant protein alone or with 0.5 mg/kg NST-OX40L alone. Mice receiving no treatment were also used as controls.

[3809] Body weight changes were determined at 2, 4, 6, 8, 10, 12, and 14 days after administration. As shown in FIG. 69B, co-administration of 0.5 mg/kg hOpt IL15 mRNA and 0.5 mg/kg of either mouse or human IL15Rα WT mRNA was not tolerated due to body weight loss. Co-administration of 0.5 mg/kg hOpt IL15 mRNA and 0.25 mg/kg of either mouse or human IL15Rα WT mRNA yielded some body weight loss, yet appeared to be a maximum tolerated dose (MTD). Co-administration of 0.5 mg/kg hOpt IL15 mRNA with any of the tested doses of either mouse or human IL15Rα ECD mRNA was tolerated.

[3810] IL15 plasma concentrations were also determined at 24, 48, and 72 hours after administration. As shown in FIG. 70, the highest levels of plasma IL15 were produced from co-administration of 0.5 mg/kg hOpt IL15 mRNA and 0.5 mg/kg of either mouse or human IL15Rα WT mRNA. The groups with the most body weight loss in FIG. 69B exhibited the highest IL15 plasma levels at 72 hours in FIG. 70.

[3811] In a subset of mice receiving co-administration of 0.5 mg/kg hOpt IL15 mRNA and 0.5 mg/kg of either mouse or human IL15Rα WT mRNA, spleens were harvested at 8 days after administration, and spleen weights and spleen cell counts were determined. As shown in FIG. 71 and FIG. 72, co-administration of 0.5 mg/kg hOpt IL15 mRNA and 0.5 mg/kg of either mouse or human IL15Rα WT mRNA induced significant increases in both spleen weight and spleen cell counts. As shown in FIG. 72, spleenocyte numbers of CD8⁺ T cells, NK cells, and NK T cells were all markedly increased. Expansion of CD8⁺ T cells and NK cells were also seen in peripheral blood (data not shown).

### Example 40

### mRNA Encoding Constitutively Active IL18

[3812] mRNAs encoding constitutively active IL18 (“IL18”) were prepared from wild type human or mouse IL18 sequences. mRNAs were prepared encoding wild-type human IL18 (hIL18 WT; SEQ ID NO: 564), wild-type mature human IL18 having the human tissue plasminogen activator signal peptide at its N terminus (htPA-hIL18 mRNA), wild type mature human IL18 having the human IL12 signal peptide at its N terminus (hIL2sp-hIL18 mRNA), wild-type murine IL18 (mIL18 WT), wild-type mature murine IL18 having the murine tissue plasminogen activator signal peptide at its N terminus (mtPA-mIL18 mRNA), and wild type mature murine IL18 having the murine IL12 signal peptide at its N terminus (mIL2sp-mIL18). FIG. 73 shows the structure of IL18 encoded by the mRNAs as compared to wild type IL18.

### Example 41

### In Vitro Expression and Bioactivity of IL18 mRNA

[3813] Expression of IL18 mRNAs was confirmed by cell-free translation by QC into HeLa cells. Both wild type human and mouse IL18 were expressed in HeLa cell lysate, while IL2spIL18 from both human and mouse were expressed in HeLa cells lysate, with some expression in HeLa cell supernatant. HeLa cells were seeded in 6-well plates and transfected with hIL18 WT mRNA, htPA-hIL18 mRNA, hIL2sp-hIL18 mRNA, mIL18 WT mRNA, mtPA-mIL18 mRNA, or mIL2sp-mIL18 mRNA. Following transfection, expression of IL18 was determined using anti-IL18 antibody to detectIL18. FIG. 74A.

[3814] The ability of recombinant mIL2sp-mIL18 or mIL18 WT protein to induce expression of interferon-γ in murine CTLL2 cells was measured. CTLL2 cells were cultured in standard media and transfected with mIL2sp-mIL18 or mIL18 WT. Both mIL2sp-mIL18 or mIL18 WT caused the CTLL2 cells to secret interferon-γ. FIG. 74B.

### Example 42

### In Vivo Efficacy of Combining IL23 and IL18 Modified mRNAs in a B-Cell Lymphoma Model

[3815] In vivo efficacy of modified mRNAs encoding IL23 and IL18 was assessed in a B-cell lymphoma model.

A. Preparation of IL23 and IL18 Modified mRNA

[3816] A polynucleotide comprising a modified mRNA encoding an IL23 polypeptide (murine IL23) was prepared as described above. A polynucleotide comprising a modified mRNA encoding an IL18 polypeptide (murine IL18) having the murine IL12 signal peptide was also prepared as described above. A negative control mRNA was also prepared (non-translatable version of the Factor IX mRNA containing multiple stop codons; NST-FIX. The modified mRNAs were all formulated in the same manner (Cap1, G5 RP mRNA in 1.5 mol % DMG MC3 LNP).

### B. A20 B-Cell Lymphoma Tumor Model

[3817] B-cell lymphoma tumors were established subcutaneously in BALB/c mice. Mouse B-cell lymphoma cells (A20, ATCC No. TIB-208; ATCC, Manassas, VA) were cultured according to the vendor's instructions. Cells were inoculated subcutaneously in BALB/c mice to generate subcutaneous tumors. Tumors were monitored for size and palpability. Once the tumors reached a mean size of approximately 100 mm3, animals were separated into two groups of 12 mice each. Group I was treated with repeated intratumoral doses of mIL23 mRNA at a dose of 12.5 ug mRNA. Group II was treated with a mixture of IL23 mRNA (6.25 ug) and IL12sp-IL18 mRNA (6.25 ug). Animals were dosed on Days 18, 25 and 32, as indicated by the arrows in FIGS. 75A and 75B. Results are shown in FIGS. 75A and 75B as a plot of tumor volume over time. The study was carried out through Day 38. Otherwise, endpoints in the study were either death of the animal or a tumor volume reaching 2000 mm3.

### C. Results

[3818] FIG. 75A shows individual tumor growth in animals treated with mRNA encoding murine IL23. FIG. 75B shows individual tumor growth in animals treated with a combination of mRNAs, one of which encodes murine IL18 having the murine IL12 signal peptide and one of which encodes murine IL23. Multiple doses of IL23 mRNA reduced or decreased the size of tumors in some animals and inhibited the growth of tumors in some animals. In one animal treated with IL23 mRNA, treatment led to a complete response (i.e., tumor elimination) prior to day 38 (see FIG. 75A). Of the 12 mice given IL23 mRNA, 9 mice had tumors whose size remained below 500 mm3 at the study endpoint (see FIG. 75A, shaded area).

[3819] When mice were treated with the combination of mRNAs encoding IL18 and IL23, tumor growth was impacted to a greater degree than with the single mRNA treatment. In 9 animals that received mRNAs encoding IL18 and IL23, treatment led to a complete response prior to day 38 (see FIG. 75B). Of the 12 mice treated with the combination, 11 mice had tumors whose size remained below 500 mm3 at the study endpoint (see FIG. 75B, shaded area). These data indicate that IL23 mRNA treatment reduces tumor growth and facilitates tumor elimination in a B-cell lymphoma model of cancer, and that combination therapy using mRNAs encoding IL18 and IL23 is more effective in treating tumors than IL23 mRNA alone.

### Example 43

### In Vitro Expression of Single Chain IL23 mRNA

[3820] Expression of secreted IL23 polypeptide was measured in the cultured media of cancer cells following transfection with polynucleotides comprising an mRNA encoding a murine or human IL23 polypeptide. Polynucleotides comprising an mRNA encoding a murine IL23 polypeptide (“muIL23-mRNA”) or a human IL23 polypeptide (SEQ ID NO: 983, polypeptide; SEQ ID NO: 984, polynucleotide) (“huIL23-mRNA”) were used in this example. IL23 polynucleotides were constructed as single chain constructs, with the Gly6Ser linker (GS linker) connecting the p40 and p19 subunits of IL23 (see FIG. 76).

[3821] HeLa cells were seeded in 6-well plates and transfected with muIL23-mRNA (SEQ ID NO: 82) or huIL23-mRNA (SEQ ID NO: 984). Following transfection, expression of IL23 was determined. These assays detected 2691 ng/mL murine IL23 and 1393 ng/mL human IL23. These data indicate that introducing IL23 mRNA into cells facilitates the expression and secretion of IL23.

### Example 44

### In Vivo Efficacy of IL23 Modified mRNA in a B-Cell Lymphoma Model

[3822] In vivo efficacy of modified mRNA encoding IL23 was assessed in a B-cell lymphoma model.

A. Preparation of IL23 Modified mRNA

[3823] A polynucleotide comprising a modified mRNA encoding an IL23 polypeptide (murine IL23) was prepared as described above. A negative control mRNA was also prepared (non-translatable version of the Factor IX mRNA containing multiple stop codons; NST-FIX). Both modified mRNAs were formulated in the same manner (Cap1, G5 RP mRNA in 1.5 mol % DMG MC3 LNP).

### B. A20 B-Cell Lymphoma Tumor Model

[3824] B-cell lymphoma tumors were established subcutaneously in BALB/c mice. Mouse B-cell lymphoma cells (A20, ATCC No. TIB-208; ATCC, Manassas, VA) were cultured according to the vendor's instructions. Cells were inoculated subcutaneously in BALB/c mice to generate subcutaneous tumors. Tumor were monitored for size and palpability.

[3825] Once the tumors reached a mean size of approximately 100 mm³, animals were separated into two groups of 12 mice each. Group I (control) was treated with negative control mRNA, NST-FIX, at a dose of 12.5 μg mRNA at each time point. Group II was treated with repeated intratumoral doses of mIL23 mRNA at a dose of 12.5 μg mRNA. Animals were dosed on Days 18, 25 and 32, as indicated by the arrows in FIGS. 77A and 77B. Results are shown in FIGS. 77A and 77B as a plot of tumor volume over time. The study was carried out through Day 38. Otherwise, endpoints in the study were either death of the animal or a tumor volume reaching 2000 mm³.

### C. Results

[3826] FIG. 77A shows individual tumor growth in animals treated with control NST-FIX mRNA. FIG. 77B shows individual tumor growth in animals treated with IL23 mRNA. Multiple doses of the control modified mRNA had little effect on the tumor volume. In contrast, multiple doses of IL23 mRNA reduced or decreased the size of tumors in some animals and inhibited the growth of tumors in some animals. In one animal treated with IL23, treatment led to a complete response (i.e., tumor elimination). Of the 12 mice given IL23 mRNA, 9 mice had tumors whose size remained below 500 mm³ at the study endpoint (see FIG. 77B, shaded area). In contrast, 11 of the 12 mice in the control group had tumors whose size was larger than 500 mm3 at the study endpoint (see FIG. 77A, shaded area). These data indicate that IL23 mRNA treatment reduces tumor growth and facilitates tumor elimination in a B-cell lymphoma model of cancer.

### Example 45

### In Vivo Efficacy of Combinations of Interleukin Polypeptides IL12 plus IL18 and IL23 plus IL18

[3827] Prior studies of interleukin polypeptides have demonstrated the effectiveness of interleukins in treating mouse models of cancer. These data have been reported in studies such as Wang et al., J Dermatological Sci. 36:66-68 (2004), hereby incorporated by reference in its entirety. Relevant methods and results from Wang et al. are summarized below in this Example.

### A. B16 Mouse Model of Melanoma

[3828] B16 melanoma cells (1×10⁵ cells) were implanted into the upper abdominal skin of syngeneic male C57BL/6J mice to establish a cutaneous melanoma model. At 5 and 7 days post implantation, cDNA vectors encoding one or more interleukin polypeptides were introduced into the mice via gene gun. The tested vectors expressed IL12 (pcDNA-IL12), IL18 (pcDNA-mproIL18/mICE), IL23 (pcDNA-IL23), or a GFP control (phGFP-105-C1). For each vector or combination of vectors, 5 mice were treated and the tumor volume was measured at days 5, 7, 9, 12, 14, 17, and 21. FIG. 78A presents the average tumor volume for each group. Final Kaplan-Meier survival curves were prepared and are shown in FIG. 78B.

### B. Results

[3829] Wang et al. tested six different therapies' effectiveness in the B16 mouse model of melanoma described above: IL23 plus IL18 (solid square); IL12 plus IL18 (open circle); IL12 alone (solid triangle); IL23 alone (ex-mark); IL18 alone (open square); and a GFP-expression control (solid circle). As shown in FIG. 78A, the gene-gun therapy with both IL23 and IL18 plasmids resulted in the significant suppression of the implanted tumor by the 14th day after tumor implantation, compared to that with the control GFP (P<0.01) or IL18 expression vector alone (P<0.05). The therapy with IL23 and IL18 cDNA showed equivalent anti-tumor effect to that of IL12 and IL18 cDNA. Therapy with IL23 alone was more effective in suppressing tumor growth than the GFP control. The antitumor effect of the IL23 and IL18 combination also contributed to an improvement in the survival rate and the life span of the rats relative to either plasmid alone (FIG. 78B).

### Example 46

### In Vivo Efficacy of Combining IL23 and IL18 Modified mRNAs in a B Cell Lymphoma Model

[3830] In vivo efficacy of modified mRNAs encoding IL23 and IL18 was assessed in a B cell lymphoma model.

### Preparation of IL23 and IL18 Modified mRNA

[3831] A polynucleotide comprising a modified mRNA encoding an IL23 polypeptide (murine IL23) was prepared as described above. A polynucleotide comprising a modified mRNA encoding an IL18 polypeptide (murine IL18) was also prepared as described above. A negative control mRNA was also prepared (non-translatable version of the Factor IX mRNA containing multiple stop codons; NST-FIX). The modified mRNAs were all formulated in the same manner (Cap1, G5 RP mRNA in 1.5 mol % DMG MC3 LNP).

### B. A20 B-Cell Lymphoma Tumor Model

[3832] B-cell lymphoma tumors were established subcutaneously in BALB/c mice. Mouse B-cell lymphoma cells (A20, ATCC No. TIB-208; ATCC, Manassas, VA) were cultured according to the vendor's instructions. Cells were inoculated subcutaneously in BALB/c mice to generate subcutaneous tumors. Tumors were monitored for size and palpability.

[3833] Once the tumors reached a mean size of approximately 100 mm3, animals were separated into two groups of 12 mice each. Group I was treated with repeated intratumoral doses of mIL23 mRNA at a dose of 12.5 μg mRNA. Group II was treated with a mixture of IL23 mRNA (6.25 μg) and IL18 mRNA (6.25 μg). Animals were dosed on Days 18, 25 and 32, as indicated by the arrows in FIGS. 79A and 79B. Results are shown in FIGS. 79A and 79B as a plot of tumor volume over time or % survival rate over time, respectively.

[3834] The study was carried out through Day 38. Otherwise, endpoints in the study were either death of the animal or a tumor volume reaching 2000 mm³.

### C. Results

[3835] FIG. 79A shows individual tumor growth in animals treated with the different mRNAs. FIG. 79B shows % survival rate in animals treated with the different mRNAs. Multiple doses of IL23 mRNA reduced or decreased the size of tumors in some animals and inhibited the growth of tumors in some animals. In one animal treated with IL23 mRNA, treatment led to a near complete response (i.e., minimal tumor growth) by day 21 (see FIG. 79A). Of the 12 mice given IL23 mRNA, 9 mice had tumors whose size remained below 500 mm3 at the study endpoint (see FIG. 79A).

[3836] When mice were treated with the combination of mRNAs encoding IL18 and IL23, tumor growth was impacted to a greater degree than with the single mRNA treatment. In 9 animals that received mRNAs encoding IL18 and IL23, treatment led to a complete response prior to day 38 (see FIG. 79B). Of the 12 mice treated with the combination, 11 mice had tumors whose size remained below 500 mm3 at the study endpoint (see FIG. 79B).

[3837] These data indicate that IL23 mRNA treatment reduces tumor growth and facilitates tumor elimination in a B-cell lymphoma model of cancer, and that combination therapy using mRNAs encoding IL18 and IL23 may be more effective in treating tumors than IL23 mRNA alone.

### OTHER EMBODIMENTS

[3838] It is to be understood that the words which have been used are words of description rather than limitation, and that changes can be made within the purview of the appended claims without departing from the true scope and spirit of the disclosure in its broader aspects.

[3839] While the present disclosure has been described at some length and with some particularity with respect to the several described embodiments, it is not intended that it should be limited to any such particulars or embodiments or any particular embodiment, but it is to be construed with references to the appended claims so as to provide the broadest possible interpretation of such claims in view of the prior art and, therefore, to effectively encompass the intended scope of the disclosure.

[3840] All publications, patent applications, patents, and other references mentioned herein are incorporated by reference in their entirety. In case of conflict, the present specification, including definitions, will control. In addition, section headings, the materials, methods, and examples are illustrative only and not intended to be limiting.

The application's sequence listing, which the Patent Office published only in electronic form, follows.

SEQUENCE LISTING (1263 sequences)

SEQ ID NO: 1 - protein, 223 aa, Homo sapiens
MACLGFQRHKAQLNLATRTWPCTLLFFLLFIPVFCKAMHVAQPAVVLASSRGIASFVCEYASPGKATEVRVTVLRQADSQVTEVCAATYMMGNELTFLDDSICTGTSSGNQVNLTIQGLRAMDTGLYICKVELMYPPPYYLGIGNGTQIYVIDPEPCPDSDFLLWILAAVSSGLFFYSFLLTAVSLSKMLKKRSPLTTGVYVKMPPTEPECEKQFQPYFIPIN

SEQ ID NO: 2 - protein, 126 aa, Homo sapiens [sequence omitted]

SEQ ID NO: 3 - protein, 188 aa, Homo sapiens
KAMHVAQPAVVLASSRGIASFVCEYASPGKATEVRVTVLRQADSQVTEVCAATYMMGNELTFLDDSICTGTSSGNQVNLTIQGLRAMDTGLYICKVELMYPPPYYLGIGNGTQIYVIDPEPCPDSDFLLWILAAVSSGLFFYSFLLTAVSLSKMLKKRSPLTTGVYVKMPPTEPECEKQFQPYFIPIN

SEQ ID NO: 4 - protein, 56 aa, Homo sapiens
MACLGFQRHKAQLNLATRTWPCTLLFFLLFIPVFCKAPPTEPECEKQFQPYFIPIN

SEQ ID NO: 5 - protein, 58 aa, Homo sapiens
MACLGFQRHKAQLNLATRTWPCTLLFFLLFIPVFCKAKEKKPSYNRGLCENAPNRARM

SEQ ID NO: 6 - protein, 79 aa, Homo sapiens
MACLGFQRHKAQLNLATRTWPCTLLFFLLFIPVFCKAMHVAQPAVVLASSRGIASFVSKEKKPSYNRGLCENAPNRARM

SEQ ID NO: 7 - protein, 174 aa, Homo sapiens
MACLGFQRHKAQLNLATRTWPCTLLFFLLFIPVFCKAMHVAQPAVVLASSRGIASFVCEYASPGKATEVRVTVLRQADSQVTEVCAATYMMGNELTFLDDSICTGTSSGNQVNLTIQGLRAMDTGLYICKVELMYPPPYYLGIGNGTQIYVIAKEKKPSYNRGLCENAPNRARM

SEQ ID NO: 8 - DNA, 503 bp, Homo sapiens
  source 1..503: mol_type = other DNA
ggcgtggtccagcctgggaggtccctgagactctcctgtgcagcgtctggattcaccttcagtagctatggcatgcactgggtccgccaggctccaggcaaggggctggagtgggtggcagttatatggtatgatggaagtaataaatactatgcagactccgtgaagggccgattcaccatctccagagacaattccaagaacacgctgtatctgcaaatgaacagcctgagagccgaggacacggctgtgtattactgtgcgagagatccgaggggagctaccctttactactactactaccggtkggacgtctggggccaagggaccacggtcaccgtctcctcagcctccaccaagggcccatcggtcttccccctggcgccctgctccaggagcacctccgagagcacagcggccctgggctgcctggtcaaggactacttccccgaaccggtgacggtgtcgtggaactcaggcgctctgaccagcggcgtgcacac

SEQ ID NO: 9 - protein, 166 aa, Homo sapiens
GVVQPGRSLRLSCAASGFTFSSYGMHWVRQAPGKGLEWVAVIWYDGSNKYYADSVKGRFTISRDNSKNTLYLQMNSLRAEDTAVYYCARDPRGATLYYYYYRDVWGQGTTVTVSSASTKGPSVFPLAPCSRSTSESTAALGCLVKDYFPEPVTVSWNSGALTSGVH

SEQ ID NO: 10 - DNA, 417 bp, Homo sapiens
  source 1..417: mol_type = other DNA
ccatcctccctgtctgcatctgtaggagacagagtcaccatcacttgccgggcaagtcagagcattaacagctatttagattggtatcagcagaaaccagggaaagcccctaaactcctgatctatgctgcatccagtttgcaaagtggggtcccatcaaggttcagtggcagtggatctgggacagatttcactctcaccatcagcagtctgcaacctgaagattttgcaacttactactgtcaacagtattacagtactccattcactttcggccctgggaccaaagtggaaatcaaacgaactgtggctgcaccatctgtcttcatcttcccgccatctgatgagcagttgaaatctggaactgcctctgttgtgtgcctgctgaataacttctatcccagagaggccaaagta

SEQ ID NO: 11 - protein, 139 aa, Homo sapiens
PSSLSASVGDRVTITCRASQSINSYLDWYQQKPGKAPKLLIYAASSLQSGVPSRFSGSGSGTDFTLTISSLQPEDFATYYCQQYYSTPFTFGPGTKVEIKRTVAAPSVFIFPPSDEQLKSGTASVVCLLNNFYPREAKV

SEQ ID NO: 12 - protein, 167 aa, Homo sapiens
GVVQPGRSLRLSCAASGFTFSSYGMHWVRQAPGKGLEWVAVIWYDGSNKYYADSVKGRFTISRDNSKNTLYLQMNSLRAEDTAVYYCARDPRGATLYYYYYGMDVWGQGTTVTVSSASTKGPSVFPLAPCSRSTSESTAALGCLVKDYFPEPVTVSWNSGALTSGVH

SEQ ID NO: 13 - protein, 139 aa, Homo sapiens; identical to SEQ ID NO: 11

SEQ ID NO: 14 - protein, 10 aa, Homo sapiens
GFTFSSYGMH

SEQ ID NO: 15 - protein, 15 aa, Homo sapiens
VIWYDGSNKYYADSV

SEQ ID NO: 16 - protein, 16 aa, Homo sapiens
DPRGATLYYYYYGMDV

SEQ ID NO: 17 - protein, 11 aa, Homo sapiens
RASQSINSYLD

SEQ ID NO: 18 - protein, 7 aa, Homo sapiens
AASSLQS

SEQ ID NO: 19 - protein, 9 aa, Homo sapiens
QQYYSTPFT

SEQ ID NO: 20 - DNA, 1413 bp, Homo sapiens
  source 1..1413: mol_type = other DNA
atggagtttgggctgagctgggttttcctcgttgctcttttaagaggtgtccagtgtcaggtgcagctggtggagtctgggggaggcgtggtccagcctgggaggtccctgagactctcctgtgcagcgtctggattcaccttcagtagctatggcatgcactgggtccgccaggctccaggcaaggggctggagtgggtggcagttatatggtatgatggaagtaataaatactatgcagactccgtgaagggccgattcaccatctccagagacaattccaagaacacgctgtatctgcaaatgaacagcctgagagccgaggacacggctgtgtattactgtgcgagagatccgaggggagctaccctttactactactactacggtatggacgtctggggccaagggaccacggtcaccgtctcctcagcctccaccaagggcccatcggtcttccccctggcgccctgctccaggagcacctccgagagcacagcggccctgggctgcctggtcaaggactacttccccgaaccggtgacggtgtcgtggaactcaggcgctctgaccagcggcgtgcacaccttcccagctgtcctacagtcctcaggactctactccctcagcagcgtggtgaccgtgccctccagcaacttcggcacccagacctacacctgcaacgtagatcacaagcccagcaacaccaaggtggacaagacagttgagcgcaaatgttgtgtcgagtgcccaccgtgcccagcaccacctgtggcaggaccgtcagtcttcctcttccccccaaaacccaaggacaccctcatgatctcccggacccctgaggtcacgtgcgtggtggtggacgtgagccacgaagaccccgaggtccagttcaactggtacgtggacggcgtggaggtgcataatgccaagacaaagccacgggaggagcagttcaacagcacgttccgtgtggtcagcgtcctcaccgttgtgcaccaggactggctgaacggcaaggagtacaagtgcaaggtctccaacaaaggcctcccagcccccatcgagaaaaccatctccaaaaccaaagggcagccccgagaaccacaggtgtacaccctgcccccatcccgggaggagatgaccaagaaccaggtcagcctgacctgcctggtcaaaggcttctaccccagcgacatcgccgtggagtgggagagcaatgggcagccggagaacaactacaagaccacacctcccatgctggactccgacggctccttcttcctctacagcaagctcaccgtggacaagagcaggtggcagcaggggaacgtcttctcatgctccgtgatgcatgaggctctgcacaaccactacacgcagaagagcctctccctgtctccgggtaaatga

SEQ ID NO: 21 - protein, 451 aa, Homo sapiens
QVQLVESGGGVVQPGRSLRLSCAASGFTFSSYGMHWVRQAPGKGLEWVAVIWYDGSNKYYADSVKGRFTISRDNSKNTLYLQMNSLRAEDTAVYYCARDPRGATLYYYYYGMDVWGQGTTVTVSSASTKGPSVFPLAPCSRSTSESTAALGCLVKDYFPEPVTVSWNSGALTSGVHTFPAVLQSSGLYSLSSVVTVPSSNFGTQTYTCNVDHKPSNTKVDKTVERKCCVECPPCPAPPVAGPSVFLFPPKPKDTLMISRTPEVTCVVVDVSHEDPEVQFNWYVDGVEVHNAKTKPREEQFNSTFRVVSVLTVVHQDWLNGKEYKCKVSNKGLPAPIEKTISKTKGQPREPQVYTLPPSREEMTKNQVSLTCLVKGFYPSDIAVEWESNGQPENNYKTTPPMLDSDGSFFLYSKLTVDKSRWQQGNVFSCSVMHEALHNHYTQKSLSLSPGK

SEQ ID NO: 22 - DNA, 714 bp, Homo sapiens
  source 1..714: mol_type = other DNA
atggacatgagggtccccgctcagctcctggggctcctgctactctggctccgaggtgccagatgtgacatccagatgacccagtctccatcctccctgtctgcatctgtaggagacagagtcaccatcacttgccgggcaagtcagagcattaacagctatttagattggtatcagcagaaaccagggaaagcccctaaactcctgatctatgctgcatccagtttgcaaagtggggtcccatcaaggttcagtggcagtggatctgggacagatttcactctcaccatcagcagtctgcaacctgaagattttgcaacttactactgtcaacagtattacagtactccattcactttcggccctgggaccaaagtggaaatcaaacgaactgtggctgcaccatctgtcttcatcttcccgccatctgatgagcagttgaaatctggaactgcctctgttgtgtgcctgctgaataacttctatcccagagaggccaaagtacagtggaaggtggataacgccctccaatcgggtaactcccaggagagtgtcacagagcaggacagcaaggacagcacctacagcctcagcagcaccctgacgctgagcaaagcagactacgagaaacacaaagtctacgcctgcgaagtcacccatcagggcctgagctcgcccgtcacaaagagcttcaacaggggagagtgttagtga

SEQ ID NO: 23 - protein, 214 aa, Homo sapiens
DIQMTQSPSSLSASVGDRVTITCRASQSINSYLDWYQQKPGKAPKLLIYAASSLQSGVPSRFSGSGSGTDFTLTISSLQPEDFATYYCQQYYSTPFTFGPGTKVEIKRTVAAPSVFIFPPSDEQLKSGTASVVCLLNNFYPREAKVQWKVDNALQSGNSQESVTEQDSKDSTYSLSSTLTLSKADYEKHKVYACEVTHQGLSSPVTKSFNRGEC

SEQ ID NO: 24 - DNA, 1392 bp, Homo sapiens
  source 1..1392: mol_type = other DNA
atggagtttgggctgagctgggttttcctcgttgctcttttaagaggtgtccagtgtcaggtgcagctggtggagtctgggggaggcgtggtccagcctgggaggtccctgagactctcctgtgtagcgtctggattcaccttcagtagccatggcatgcactgggtccgccaggctccaggcaaggggctggagtgggtggcagttatatggtatgatggaagaaataaatactatgcagactccgtgaagggccgattcaccatctccagagacaattccaagaacacgctgtttctgcaaatgaacagcctgagagccgaggacacggctgtgtattactgtgcgagaggaggtcacttcggtccttttgactactggggccagggaaccctggtcaccgtctcctcagcctccaccaagggcccatcggtcttccccctggcgccctgctccaggagcacctccgagagcacagcggccctgggctgcctggtcaaggactacttccccgaaccggtgacggtgtcgtggaactcaggcgctctgaccagcggcgtgcacaccttcccagctgtcctacagtcctcaggactctactccctcagcagcgtggtgaccgtgccctccagcaacttcggcacccagacctacacctgcaacgtagatcacaagcccagcaacaccaaggtggacaagacagttgagcgcaaatgttgtgtcgagtgcccaccgtgcccagcaccacctgtggcaggaccgtcagtcttcctcttccccccaaaacccaaggacaccctcatgatctcccggacccctgaggtcacgtgcgtggtggtggacgtgagccacgaagaccccgaggtccagttcaactggtacgtggacggcgtggaggtgcataatgccaagacaaagccacgggaggagcagttcaacagcacgttccgtgtggtcagcgtcctcaccgttgtgcaccaggactggctgaacggcaaggagtacaagtgcaaggtctccaacaaaggcctcccagcccccatcgagaaaaccatctccaaaaccaaagggcagccccgagaaccacaggtgtacaccctgcccccatcccgggaggagatgaccaagaaccaggtcagcctgacctgcctggtcaaaggcttctaccccagcgacatcgccgtggagtgggagagcaatgggcagccggagaacaactacaagaccacacctcccatgctggactccgacggctccttcttcctctacagcaagctcaccgtggacaagagcaggtggcagcaggggaacgtcttctcatgctccgtgatgcatgaggctctgcacaaccactacacgcagaagagcctctccctgtctccgggtaaatga

SEQ ID NO: 25 - protein, 463 aa, Homo sapiens
MEFGLSWVFLVALLRGVQCQVQLVESGGGVVQPGRSLRLSCVASGFTFSSHGMHWVRQAPGKGLEWVAVIWYDGRNKYYADSVKGRFTISRDNSKNTLFLQMNSLRAEDTAVYYCARGGHFGPFDYWGQGTLVTVSSASTKGPSVFPLAPCSRSTSESTAALGCLVKDYFPEPVTVSWNSGALTSGVHTFPAVLQSSGLYSLSSVVTVPSSNFGTQTYTCNVDHKPSNTKVDKTVERKCCVECPPCPAPPVAGPSVFLFPPKPKDTLMISRTPEVTCVVVDVSHEDPEVQFNWYVDGVEVHNAKTKPREEQFNSTFRVVSVLTVVHQDWLNGKEYKCKVSNKGLPAPIEKTISKTKGQPREPQVYTLPPSREEMTKNQVSLTCLVKGFYPSDIAVEWESNGQPENNYKTTPPMLDSDGSFFLYSKLTVDKSRWQQGNVFSCSVMHEALHNHYTQKSLSLSPGK

SEQ ID NO: 26 - DNA, 708 bp, Homo sapiens
  source 1..708: mol_type = other DNA
atggaaaccccagcgcagcttctcttcctcctgctactctggctcccagataccaccggagaaattgtgttgacgcagtctccaggcaccctgtctttgtctccaggggaaagagccaccctctcctgcagggccagtcagagtattagcagcagcttcttagcctggtaccagcagagacctggccaggctcccaggctcctcatctatggtgcatccagcagggccactggcatcccagacaggttcagtggcagtgggtctgggacagacttcactctcaccatcagcagactggagcctgaagattttgcagtgtattactgtcagcagtatggtacctcaccctggacgttcggccaagggaccaaggtggaaatcaaacgaactgtggctgcaccatctgtcttcatcttcccgccatctgatgagcagttgaaatctggaactgcctctgttgtgtgcctgctgaataacttctatcccagagaggccaaagtacagtggaaggtggataacgccctccaatcgggtaactcccaggagagtgtcacagagcaggacagcaaggacagcacctacagcctcagcagcaccctgacgctgagcaaagcagactacgagaaacacaaagtctacgcctgcgaagtcacccatcagggcctgagctcgcccgtcacaaagagcttcaacaggggagagtgttag

SEQ ID NO: 27 - protein, 235 aa, Homo sapiens
METPAQLLFLLLLWLPDTTGEIVLTQSPGTLSLSPGERATLSCRASQSISSSFLAWYQQRPGQAPRLLIYGASSRATGIPDRFSGSGSGTDFTLTISRLEPEDFAVYYCQQYGTSPWTFGQGTKVEIKRTVAAPSVFIFPPSDEQLKSGTASVVCLLNNFYPREAKVQWKVDNALQSGNSQESVTEQDSKDSTYSLSSTLTLSKADYEKHKVYACEVTHQGLSSPVTKSFNRGEC

SEQ ID NO: 28 - protein, 167 aa, Homo sapiens
GVVQPGRSLRLSCVASGFTFSSHGMHWVRQAPGKGLEWVAVIWYDGRNKYYADSVKGRFTISRDNSKNTLFLQMNSLRAEDTAVYYCARGGHFGPFDYWGQGTLVTVSSASTKGPSVFPLAPCSRSTSESTAALGCLVKDYFPEPVTVSWNSGALTSGVHTFPAVLQ

SEQ ID NO: 29 - protein, 141 aa, Homo sapiens
QSPGTLSLSPGERATLSCRASQSISSSFLAWYQQRPGQAPRLLIYGASSRATGIPDRFSGSGSGTDFTLTISRLEPEDFAVYYCQQYGTSPWTFGQGTKVEIKRTVAAPSVFIFPPSDEQLKSGTASVVCLLNNFYPREAK

SEQ ID NO: 30 - protein, 10 aa, Homo sapiens
GFTFSSHGMH

SEQ ID NO: 31 - protein, 15 aa, Homo sapiens
VIWYDGRNKYYADSV

SEQ ID NO: 32 - protein, 9 aa, Homo sapiens
GGHFGPFDY

SEQ ID NO: 33 - protein, 12 aa, Homo sapiens
RASQSISSSFLA

SEQ ID NO: 34 - protein, 7 aa, Homo sapiens
GASSRAT

SEQ ID NO: 35 - protein, 10 aa, Homo sapiens
CQQYGTSPWT

SEQ ID NO: 36 - DNA, 1392 bp, Homo sapiens
  source 1..1392: mol_type = other DNA
atggagtttgggctgagctgggttttcctcgttgctcttttaagaggtgtccagtgtcaggtgcagctggtggagtctgggggaggcgtggtccagcctgggaggtccctgagactctcctgtgtagcgtctggattcaccttcagtagccatggcatgcactgggtccgccaggctccaggcaaggggctggagtgggtggcagttatatggtatgatggaagaaataaatactatgcagactccgtgaagggccgattcaccatctccagagacaattccaagaacacgctgtttctgcaaatgaacagcctgagagccgaggacacggctgtgtattactgtgcgagaggaggtcacttcggtccttttgactactggggccagggaaccctggtcaccgtctcctcagcctccaccaagggcccatcggtcttccccctggcgccctgctccaggagcacctccgagagcacagcggccctgggctgcctggtcaaggactacttccccgaaccggtgacggtgtcgtggaactcaggcgctctgaccagcggcgtgcacaccttcccagctgtcctacagtcctcaggactctactccctcagcagcgtggtgaccgtgccctccagcaacttcggcacccagacctacacctgcaacgtagatcacaagcccagcaacaccaaggtggacaagacagttgagcgcaaatgttgtgtcgagtgcccaccgtgcccagcaccacctgtggcaggaccgtcagtcttcctcttccccccaaaacccaaggacaccctcatgatctcccggacccctgaggtcacgtgcgtggtggtggacgtgagccacgaagaccccgaggtccagttcaactggtacgtggacggcgtggaggtgcataatgccaagacaaagccacgggaggagcagttccaaagcacgttccgtgtggtcagcgtcctcaccgttgtgcaccaggactggctgaacggcaaggagtacaagtgcaaggtctccaacaaaggcctcccagcccccatcgagaaaaccatctccaaaaccaaagggcagccccgagaaccacaggtgtacaccctgcccccatcccgggaggagatgaccaagaaccaggtcagcctgacctgcctggtcaaaggcttctaccccagcgacatcgccgtggagtgggagagcaatgggcagccggagaacaactacaagaccacacctcccatgctggactccgacggctccttcttcctctacagcaagctcaccgtggacaagagcaggtggcagcaggggaacgtcttctcatgctccgtgatgcatgaggctctgcacaaccactacacgcagaagagcctctccctgtctccgggtaaatga

SEQ ID NO: 37 - protein, 463 aa, Homo sapiens
MEFGLSWVFLVALLRGVQCQVQLVESGGGVVQPGRSLRLSCVASGFTFSSHGMHWVRQAPGKGLEWVAVIWYDGRNKYYADSVKGRFTISRDNSKNTLFLQMNSLRAEDTAVYYCARGGHFGPFDYWGQGTLVTVSSASTKGPSVFPLAPCSRSTSESTAALGCLVKDYFPEPVTVSWNSGALTSGVHTFPAVLQSSGLYSLSSVVTVPSSNFGTQTYTCNVDHKPSNTKVDKTVERKCCVECPPCPAPPVAGPSVFLFPPKPKDTLMISRTPEVTCVVVDVSHEDPEVQFNWYVDGVEVHNAKTKPREEQFQSTFRVVSVLTVVHQDWLNGKEYKCKVSNKGLPAPIEKTISKTKGQPREPQVYTLPPSREEMTKNQVSLTCLVKGFYPSDIAVEWESNGQPENNYKTTPPMLDSDGSFFLYSKLTVDKSRWQQGNVFSCSVMHEALHNHYTQKSLSLSPGK

SEQ ID NO: 38 - DNA, 459 bp, Homo sapiens
  source 1..459: mol_type = other DNA
cctgggaggtccctgagactctcctgtgcagcgtctggattcaccttcagtagtcatggcatccactgggtccgccaggctccaggcaaggggctggagtgggtggcagttatatggtatgatggaagaaataaagactatgcagactccgtgaagggccgattcaccatctccagagacaattccaagaacacgctgtatttgcaaatgaacagcctgagagccgaggacacggctgtgtattactgtgcgagagtggccccactggggccacttgactactggggccagggaaccctggtcaccgtctcctcagcctccaccaagggcccatcggtcttccccctggcgccctgctccaggagcacctccgagagcacagcggccctgggctgcctggtcaaggactacttccccgaaccggtgacggtgtcgtggaactcaggcgctctgaccagc

SEQ ID NO: 39 - protein, 153 aa, Homo sapiens
PGRSLRLSCAASGFTFSSHGIHWVRQAPGKGLEWVAVIWYDGRNKDYADSVKGRFTISRDNSKNTLYLQMNSLRAEDTAVYYCARVAPLGPLDYWGQGTLVTVSSASTKGPSVFPLAPCSRSTSESTAALGCLVKDYFPEPVTVSWNSGALTS

SEQ ID NO: 40 - DNA, 440 bp, Homo sapiens
  source 1..440: mol_type = other DNA
cagtctccaggcaccctgtctttgtctccaggggaaagagccaccctctcctgcagggccagtcagagtgtcagcagctacttagcctggtaccagcagaaacctggccaggctcccaggctcctcatctatggtgcatccagcagggccactggcatcccagacaggttcagtggcagtgggtctgggacagacttcactctcaccatcagcagactggagcctgaggattttgcagtgtattactgtcaacagtatggtaggtcaccattcactttcggccctgggaccaaagtagatatcaagcgaactgtggctgcaccatctgtcttcatcttcccgccatctgatgagcagttgaaatctggaactgcctctgttgtgtgcctgctgaataacttctatcccagagaggccaaagtacagtggaaaggtggata

SEQ ID NO: 41 - protein, 146 aa, Homo sapiens
QSPGTLSLSPGERATLSCRASQSVSSYLAWYQQKPGQAPRLLIYGASSRATGIPDRFSGSGSGTDFTLTISRLEPEDFAVYYCQQYGRSPFTFGPGTKVDIKRTVAAPSVFIFPPSDEQLKSGTASVVCLLNNFYPREAKVQWKGG

SEQ ID NO: 42 - protein, 153 aa, Homo sapiens; identical to SEQ ID NO: 39

SEQ ID NO: 43 - protein, 146 aa, Homo sapiens; identical to SEQ ID NO: 41

SEQ ID NO: 44 - protein, 10 aa, Homo sapiens
GFTFSSHGIH

SEQ ID NO: 45 - protein, 15 aa, Homo sapiens
VIWYDGRNKDYADSV

SEQ ID NO: 46 - protein, 9 aa, Homo sapiens
VAPLGPLDY

SEQ ID NO: 47 - protein, 11 aa, Homo sapiens
RASQSVSSYLA

SEQ ID NO: 48 - protein, 7 aa, Homo sapiens
GASSRAT

SEQ ID NO: 49 - protein, 10 aa, Homo sapiens
CQQYGRSPFT

SEQ ID NO: 50 - DNA, 1395 bp, Homo sapiens
  source 1..1395: mol_type = other DNA
atggagtttgggctgagctgggttttcctcgttgctcttttaagaggtgtccagtgtcaggtgcagctggtggagtctgggggaggcgtggtccagcctgggaggtccctgagactctcctgtacagcgtctggattcaccttcagtaactatggcatgcactgggtccgccaggctccaggcaaggggctggagtgggtggcagttatatggtatgatggaagtaataaacactatggagactccgtgaagggccgattcaccatctccagtgacaattccaagaacacgctgtatctgcaaatgaacagcctgagagccgaggacacggctgtgtattactgtgcgagaggagagagactggggtcctactttgactactggggccagggaaccctggtcaccgtctcctcagcctccaccaagggcccatcggtcttccccctggcgccctgctccaggagcacctccgagagcacagcggccctgggctgcctggtcaaggactacttccccgaaccggtgacggtgtcgtggaactcaggcgctctgaccagcggcgtgcacaccttcccagctgtcctacagtcctcaggactctactccctcagcagcgtggtgaccgtgccctccagcaacttcggcacccagacctacacctgcaacgtagatcacaagcccagcaacaccaaggtggacaagacagttgagcgcaaatgttgtgtcgagtgcccaccgtgcccagcaccacctgtggcaggaccgtcagtcttcctcttccccccaaaacccaaggacaccctcatgatctcccggacccctgaggtcacgtgcgtggtggtggacgtgagccacgaagaccccgaggtccagttcaactggtacgtggacggcgtggaggtgcataatgccaagacaaagccacgggaggagcagttcaacagcacgttccgtgtggtcagcgtcctcaccgttgtgcaccaggactggctgaacggcaaggagtacaagtgcaaggtctccaacaaaggcctcccagcccccatcgagaaaaccatctccaaaaccaaagggcagccccgagaaccacaggtgtacaccctgcccccatcccgggaggagatgaccaagaaccaggtcagcctgacctgcctggtcaaaggcttctaccccagcgacatcgccgtggagtgggagagcaatgggcagccggagaacaactacaagaccacacctcccatgctggactccgacggctccttcttcctctacagcaagctcaccgtggacaagagcaggtggcagcaggggaacgtcttctcatgctccgtgatgcatgaggctctgcacaaccactacacgcagaagagcctctccctgtctccgggtaaatga

SEQ ID NO: 51 - protein, 464 aa, Homo sapiens
MEFGLSWVFLVALLRGVQCQVQLVESGGGVVQPGRSLRLSCTASGFTFSNYGMHWVRQAPGKGLEWVAVIWYDGSNKHYGDSVKGRFTISSDNSKNTLYLQMNSLRAEDTAVYYCARGERLGSYFDYWGQGTLVTVSSASTKGPSVFPLAPCSRSTSESTAALGCLVKDYFPEPVTVSWNSGALTSGVHTFPAVLQSSGLYSLSSVVTVPSSNFGTQTYTCNVDHKPSNTKVDKTVERKCCVECPPCPAPPVAGPSVFLFPPKPKDTLMISRTPEVTCVVVDVSHEDPEVQFNWYVDGVEVHNAKTKPREEQFNSTFRVVSVLTVVHQDWLNGKEYKCKVSNKGLPAPIEKTISKTKGQPREPQVYTLPPSREEMTKNQVSLTCLVKGFYPSDIAVEWESNGQPENNYKTTPPMLDSDGSFFLYSKLTVDKSRWQQGNVFSCSVMHEALHNHYTQKSLSLSPGK

SEQ ID NO: 52 - DNA, 702 bp, Homo sapiens
  source 1..702: mol_type = other DNA
atggaaaccccagcgcagcttctcttcctcctgctactctggctcccagataccaccggagaaattgtgttgacgcagtctccaggcaccctgtctttgtctccaggggaaagagccaccctctcctgcaggaccagtgttagcagcagttacttagcctggtaccagcagaaacctggccaggctcccaggctcctcatctatggtgcatccagcagggccactggcatcccagacaggttcagtggcagtgggtctgggacagacttcactctcaccatcagcagactggagcctgaagattttgcagtctattactgtcagcagtatggcatctcacccttcactttcggcggagggaccaaggtggagatcaagcgaactgtggctgcaccatctgtcttcatcttcccgccatctgatgagcagttgaaatctggaactgcctctgttgtgtgcctgctgaataacttctatcccagagaggccaaagtacagtggaaggtggataacgccctccaatcgggtaactcccaggagagtgtcacagagcaggacagcaaggacagcacctacagcctcagcagcaccctgacgctgagcaaagcagactacgagaaacacaaagtctacgcctgcgaagtcacccatcagggcctgagctcgcccgtcacaaagagcttcaacaggggagagtgttag

SEQ ID NO: 53 - protein, 233 aa, Homo sapiens
METPAQLLFLLLLWLPDTTGEIVLTQSPGTLSLSPGERATLSCRTSVSSSYLAWYQQKPGQAPRLLIYGASSRATGIPDRFSGSGSGTDFTLTISRLEPEDFAVYYCQQYGISPFTFGGGTKVEIKRTVAAPSVFIFPPSDEQLKSGTASVVCLLNNFYPREAKVQWKVDNALQSGNSQESVTEQDSKDSTYSLSSTLTLSKADYEKHKVYACEVTHQGLSSPVTKSFNRGEC

SEQ ID NO: 54 - protein, 166 aa, Homo sapiens
GVVQPGRSLRLSCTASGFTFSNYGMHWVRQAPGKGLEWVAVIWYDGSNKHYGDSVKGRFTISSDNSKNTLYLQMNSLRAEDTAVYYCARGERLGSYFDYWGQGTLVTVSSASTKGPSVFPLAPCSRSTSESTAALGCLVKDYFPEPVTVSWNSGALTSGVHTFPAV

SEQ ID NO: 55 - protein, 141 aa, Homo sapiens
QSPGTLSLSPGERATLSCRTSVSSSYLAWYQQKPGQAPRLLIYGASSRATGIPDRFSGSGSGTDFTLTISRLEPEDFAVYYCQQYGISPFTFGGGTKVEIKRTVAAPSVFIFPPSDEQLKSGTASVVCLLNNFYPREAKVQ

SEQ ID NO: 56 - protein, 10 aa, Homo sapiens
GFTFSNYGMH

SEQ ID NO: 57 - protein, 15 aa, Homo sapiens
VIWYDGSNKHYGDSV

SEQ ID NO: 58 - protein, 10 aa, Homo sapiens
GERLGSYFDY

SEQ ID NO: 59 - protein, 10 aa, Homo sapiens
RTSVSSSYLA

SEQ ID NO: 60 - protein, 7 aa, Homo sapiens
GASSRAT

SEQ ID NO: 61 - protein, 10 aa, Homo sapiens
CQQYGISPFT

SEQ ID NO: 62 - DNA, 489 bp, Homo sapiens
  source 1..489: mol_type = other DNA
cctgggaggtccctgagactctcctgtgcagcgtctggattcaccttcagtagtcatggcatccactgggtccgccaggctccaggcaaggggctggagtgggtggcagttatatggtatgatggaagaaataaagactatgcagactccgtgaagggccgattcaccatctccagagacaattccaagaagacgctgtatttgcaaatgaacagcctgagagccgaggacacggctgtgtattactgtgcgagagtggccccactggggccacttgactactggggccagggaaccctggtcaccgtctcctcagcctccaccaagggcccatcggtcttccccctggcgccctgctccaggagcacctccgagagcacagcggccctgggctgcctggtcaaggactacttccccgaaccggtgacggtgtcgtggaactcaggcgctctgaccagcggcgtgcacaccttcccagctgtcctacag

SEQ ID NO: 63 - protein, 163 aa, Homo sapiens
PGRSLRLSCAASGFTFSSHGIHWVRQAPGKGLEWVAVIWYDGRNKDYADSVKGRFTISRDNSKKTLYLQMNSLRAEDTAVYYCARVAPLGPLDYWGQGTLVTVSSASTKGPSVFPLAPCSRSTSESTAALGCLVKDYFPEPVTVSWNSGALTSGVHTFPAVLQ

SEQ ID NO: 64 - DNA, 417 bp, Homo sapiens
  source 1..417: mol_type = other DNA
ggcaccctgtctttgtctccaggggaaagagccaccctctcctgcagggccagtcagagtgtcagcagctacttagcctggtaccagcagaaacctggccaggctcccagactcctcatctatggtgcatccagcagggccactggcatcccagacaggttcagtggcagtgggtctgggacagacttcactctcaccatcagcagactggagcctgaggattttgcagtgtattactgtcagcagtatggtaggtcaccattcactttcggccctgggaccaaagtggatatcaagcgaactgtggctgcaccatctgtcttcatcttcccgccatctgatgagcagttgaaatctggaactgcctctgttgtgtgcctgctgaataacttctatcccagagaggccaaagtacag

SEQ ID NO: 65 - protein, 139 aa, Homo sapiens
GTLSLSPGERATLSCRASQSVSSYLAWYQQKPGQAPRLLIYGASSRATGIPDRFSGSGSGTDFTLTISRLEPEDFAVYYCQQYGRSPFTFGPGTKVDIKRTVAAPSVFIFPPSDEQLKSGTASVVCLLNNFYPREAKVQ

SEQ ID NO: 66 - protein, 163 aa, Homo sapiens; identical to SEQ ID NO: 63

SEQ ID NO: 67 - protein, 139 aa, Homo sapiens; identical to SEQ ID NO: 65

SEQ ID NO: 68 - protein, 10 aa, Homo sapiens
GFTFSSHGIH

SEQ ID NO: 69 - protein, 15 aa, Homo sapiens
VIWYDGRNKDYADSV

SEQ ID NO: 70 - protein, 9 aa, Homo sapiens
VAPLGPLDY

SEQ ID NO: 71 - protein, 11 aa, Homo sapiens
RASQSVSSYLA

SEQ ID NO: 72 - protein, 7 aa, Homo sapiens
GASSRAT

SEQ ID NO: 73 - protein, 10 aa, Homo sapiens
CQQYGRSPFT

SEQ ID NO: 74 - DNA, 1392 bp, Homo sapiens
  source 1..1392: mol_type = other DNA
atggagtttgggctgagctgggttttcctcgttgctcttttaagaggtgtccagtgtcaggtgcagctggtggagtctgggggaggcgtggtcgagcctgggaggtccctgagactctcctgtacagcgtctggattcaccttcagtagttatggcatgcactgggtccgccaggctccaggcaaggggctggagtgggtggcagttatatggtatgatggaagcaataaacactatgcagactccgcgaagggccgattcaccatctccagagacaattccaagaacacgctgtatctgcaaatgaacagcctgagagccgaggacacggctgtgtattactgtgcgagagccggactgctgggttactttgactactggggccagggaaccctggtcaccgtctcctcagcctccaccaagggcccatcggtcttccccctggcgccctgctccaggagcacctccgagagcacagcggccctgggctgcctggtcaaggactacttccccgaaccggtgacggtgtcgtggaactcaggcgctctgaccagcggcgtgcacaccttcccagctgtcctacagtcctcaggactctactccctcagcagcgtggtgaccgtgccctccagcaacttcggcacccagacctacacctgcaacgtagatcacaagcccagcaacaccaaggtggacaagacagttgagcgcaaatgttgtgtcgagtgcccaccgtgcccagcaccacctgtggcaggaccgtcagtcttcctcttccccccaaaacccaaggacaccctcatgatctcccggacccctgaggtcacgtgcgtggtggtggacgtgagccacgaagaccccgaggtccagttcaactggtacgtggacggcgtggaggtgcataatgccaagacaaagccacgggaggagcagttcaacagcacgttccgtgtggtcagcgtcctcaccgttgtgcaccaggactggctgaacggcaaggagtacaagtgcaaggtctccaacaaaggcctcccagcccccatcgagaaaaccatctccaaaaccaaagggcagccccgagaaccacaggtgtacaccctgcccccatcccgggaggagatgaccaagaaccaggtcagcctgacctgcctggtcaaaggcttctaccccagcgacatcgccgtggagtgggagagcaatgggcagccggagaacaactacaagaccacacctcccatgctggactccgacggctccttcttcctctacagcaagctcaccgtggacaagagcaggtggcagcaggggaacgtcttctcatgctccgtgatgcatgaggctctgcacaaccactacacgcagaagagcctctccctgtctccgggtaaatga

SEQ ID NO: 75 - protein, 463 aa, Homo sapiens
MEFGLSWVFLVALLRGVQCQVQLVESGGGVVEPGRSLRLSCTASGFTFSSYGMHWVRQAPGKGLEWVAVIWYDGSNKHYADSAKGRFTISRDNSKNTLYLQMNSLRAEDTAVYYCARAGLLGYFDYWGQGTLVTVSSASTKGPSVFPLAPCSRSTSESTAALGCLVKDYFPEPVTVSWNSGALTSGVHTFPAVLQSSGLYSLSSVVTVPSSNFGTQTYTCNVDHKPSNTKVDKTVERKCCVECPPCPAPPVAGPSVFLFPPKPKDTLMISRTPEVTCVVVDVSHEDPEVQFNWYVDGVEVHNAKTKPREEQFNSTFRVVSVLTVVHQDWLNGKEYKCKVSNKGLPAPIEKTISKTKGQPREPQVYTLPPSREEMTKNQVSLTCLVKGFYPSDIAVEWESNGQPENNYKTTPPMLDSDGSFFLYSKLTVDKSRWQQGNVFSCSVMHEALHNHYTQKSLSLSPGK

SEQ ID NO: 76 - DNA, 705 bp, Homo sapiens
  source 1..705: mol_type = other DNA
atggaaaccccagcgcagcttctcttcctcctgctactctggctcccagataccaccggagaaattgtgttgacgcagtctccaggcaccctgtctttgtctccaggggaaagagccaccctctcctgtagggccagtcaaagtgttagcagctacttagcctggtaccaacagaaacctggccaggctcccaggcccctcatctatggtgtatccagcagggccactggcatcccagacaggttcagtggcagtgggtctgggacagacttcactctcaccatcagcagactggagcctgaagattttgcagtgtattactgtcagcagtatggtatctcaccattcactttcggccctgggaccaaagtggatatcaaacgaactgtggctgcaccatctgtcttcatcttcccgccatctgatgagcagttgaaatctggaactgcctctgttgtgtgcctgctgaataacttctatcccagagaggccaaagtacagtggaaggtggataacgccctccaatcgggtaactcccaggagagtgtcacagagcaggacagcaaggacagcacctacagcctcagcagcaccctgacgctgagcaaagcagactacgagaaacacaaagtctacgcctgcgaagtcacccatcagggcctgagctcgcccgtcacaaagagcttcaacaggggagagtgttag

SEQ ID NO: 77 - protein, 234 aa, Homo sapiens
METPAQLLFLLLLWLPDTTGEIVLTQSPGTLSLSPGERATLSCRASQSVSSYLAWYQQKPGQAPRPLIYGVSSRATGIPDRFSGSGSGTDFTLTISRLEPEDFAVYYCQQYGISPFTFGPGTKVDIKRTVAAPSVFIFPPSDEQLKSGTASVVCLLNNFYPREAKVQWKVDNALQSGNSQESVTEQDSKDSTYSLSSTLTLSKADYEKHKVYACEVTHQGLSSPVTKSFNRGEC

SEQ ID NO: 78 - protein, 138 aa, Homo sapiens
GGVVEPGRSLRLSCTASGFTFSSYGMHWVRQAPGKGLEWVAVIWYDGSNKHYADSAKGRFTISRDNSKNTLYLQMNSLRAEDTAVYYCARAGLLGYFDYWGQGTLVTVSSASTKGPSVFPLAPCSRSTSESTAALGCL

SEQ ID NO: 79 - protein, 142 aa, Homo sapiens
QSPGTLSLSPGERATLSCRASQSVSSYLAWYQQKPGQAPRPLIYGVSSRATGIPDRFSGSGSGTDFTLTISRLEPEDFAVYYCQQYGISPFTFGPGTKVDIKRTVAAPSVFIFPPSDEQLKSGTASVVCLLNNFYPREAKVQ

SEQ ID NO: 80 - protein, 10 aa, Homo sapiens
GFTFSSYGMH

SEQ ID NO: 81 - protein, 15 aa, Homo sapiens
VIWYDGSNKHYADSA

SEQ ID NO: 82 - protein, 9 aa, Homo sapiens
AGLLGYFDY

SEQ ID NO: 83 - protein, 11 aa, Homo sapiens
RASQSVSSYLA

SEQ ID NO: 84 - protein, 7 aa, Homo sapiens
GASSRAT

SEQ ID NO: 85 - protein, 10 aa, Homo sapiens
CQQYGISPFT

SEQ ID NO: 86 - DNA, 507 bp, Homo sapiens
  source 1..507: mol_type = other DNA
ggcgtggtccagcctgggaggtccctgagactctcctgtgcagcgtctggattcaccttcagtagctatggcatgcactgggtccgccaggctccaggcaaggggctggagtgggtggcagttatatggtatgatggaagtaataaatactatgcagactccgtgaagggccgattcaccatctccagagacaattccaagaacacgctgtatctgcaaatgaacagcctgagagccgaggacacggctgtgtattactgtgcgagaggggcccgtataataaccccttgtatggacgtctggggccaagggaccacggtcaccgtctcctcagcctccaccaagggcccatcggtcttccccctggcgccctgctccaggagcacctccgagagcacagcggccctgggctgcctggtcaaggactacttccccgaaccggtgacggtgtcgtggaactcaggcgctctgaccagcggcgtgcacaccttcccagctgtcctacag

SEQ ID NO: 87 - protein, 169 aa, Homo sapiens
GVVQPGRSLRLSCAASGFTFSSYGMHWVRQAPGKGLEWVAVIWYDGSNKYYADSVKGRFTISRDNSKNTLYLQMNSLRAEDTAVYYCARGARIITPCMDVWGQGTTVTVSSASTKGPSVFPLAPCSRSTSESTAALGCLVKDYFPEPVTVSWNSGALTSGVHTFPAVLQ

SEQ ID NO: 88 - DNA, 458 bp, Homo sapiens
  source 1..458: mol_type = other DNA
cagtctccatcctccctgtctgcatctgtaggagacagagtcaccatcacttgccgggcaagtcagagcattaacacctatttaatttggtatcagcagaaaccagggaaagcccctaacttcctgatctctgctacatccattttgcaaagtggggtcccatcaaggttccgtggcagtggctctgggacaaatttcactctcaccatcaacagtcttcatcctgaagattttgcaacttactactgtcaacagagttacagtaccccattcactttcggccctgggaccaaagtggatatcaaacgaactgtggctgcaccatctgtcttcatcttcccgccatctgatgagcagttgaaatctggaactgcctctgttgtgtgcctgctgaataacttctatcccagagaggccaaagtacagtggaaggtggataacgccctccaatcgggtaa

SEQ ID NO: 89 - protein, 152 aa, Homo sapiens
QSPSSLSASVGDRVTITCRASQSINTYLIWYQQKPGKAPNFLISATSILQSGVPSRFRGSGSGTNFTLTINSLHPEDFATYYCQQSYSTPFTFGPGTKVDIKRTVAAPSVFIFPPSDEQLKSGTASVVCLLNNFYPREAKVQWKVDNALQSG

SEQ ID NO: 90 - protein, 169 aa, Homo sapiens; identical to SEQ ID NO: 87

SEQ ID NO: 91 - protein, 152 aa, Homo sapiens; identical to SEQ ID NO: 89

SEQ ID NO: 92 - protein, 10 aa, Homo sapiens
GFTFSSYGMH

SEQ ID NO: 93 - protein, 15 aa, Homo sapiens
VIWYDGSNKYYADSV

SEQ ID NO: 94 - protein, 11 aa, Homo sapiens
GARIITPCMDV

SEQ ID NO: 95 - protein, 11 aa, Homo sapiens
RASQSINTYLI

SEQ ID NO: 96 - protein, 7 aa, Homo sapiens
ATSILQS

SEQ ID NO: 97 - protein, 9 aa, Homo sapiens
QQSYSTPFT

SEQ ID NO: 98 - DNA, 501 bp, Homo sapiens
  source 1..501: mol_type = other DNA
ggcgtggtccagcctgggaggtccctgagactctcctgtgtagcgtctggattcatcttcagtagtcatggcatccactgggtccgccaggctccaggcaaggggctggagtgggtggcagttatatggtatgatggaagaaataaagactatgcagactccgtgaagggccgattcaccatctccagagacaattccaagaacacgctgtatttgcaaatgaacagcctgagagccgaggacacggctgtgtattactgtgcgagagtggccccactggggccacttgactactggggccagggaaccctggtcaccgtctcctcagcctccaccaagggcccatcggtcttccccctggcgccctgctccaggagcacctccgagagcacagcggccctgggctgcctggtcaaggactacttccccgaaccggtgacggtgtcgtggaactcaggcgctctgaccagcggcgtgcacaccttcccagctgtcctacag

SEQ ID NO: 99 - protein, 167 aa, Homo sapiens
GVVQPGRSLRLSCVASGFIFSSHGIHWVRQAPGKGLEWVAVIWYDGRNKDYADSVKGRFTISRDNSKNTLYLQMNSLRAEDTAVYYCARVAPLGPLDYWGQGTLVTVSSASTKGPSVFPLAPCSRSTSESTAALGCLVKDYFPEPVTVSWNSGALTSGVHTFPAVLQ

SEQ ID NO: 100 - DNA, 426 bp, Homo sapiens
  source 1..426: mol_type = other DNA
tctccaggcaccctgtctttgtctccaggggaaagagccaccctctcctgcagggccagtcagagtattagcagcaatttcttagcctggtaccagcagaaacctggccaggctcccaggctcctcatctatcgtccatccagcagggccactggcatcccagacagtttcagtggcagtgggtctgggacagacttcactctcaccatcagcagactggagcctgaggattttgcattatattactgtcagcagtatggtacgtcaccattcactttcggccctgggaccaaagtggatatcaagcgaactgtggctgcaccatctgtcttcatcttcccgccatctgatgagcagttgaaatctggaactgcctctgttgtgtgcctgctgaataacttctatcccagagaggccaaagtacag

SEQ ID NO: 101 - protein, 142 aa, Homo sapiens
SPGTLSLSPGERATLSCRASQSISSNFLAWYQQKPGQAPRLLIYRPSSRATGIPDSFSGSGSGTDFTLTISRLEPEDFALYYCQQYGTSPFTFGPGTKVDIKRTVAAPSVFIFPPSDEQLKSGTASVVCLLNNFYPREAKVQ

SEQ ID NO: 102 - protein, 167 aa, Homo sapiens; identical to SEQ ID NO: 99

SEQ ID NO: 103 - protein, 142 aa, Homo sapiens; identical to SEQ ID NO: 101

SEQ ID NO: 104 - protein, 10 aa, Homo sapiens
GFIFSSHGIH

SEQ ID NO: 105 - protein, 15 aa, Homo sapiens
VIWYDGRNKDYADSV

SEQ ID NO: 106 - protein, 9 aa, Homo sapiens
VAPLGPLDY

SEQ ID NO: 107 - protein, 12 aa, Homo sapiens
RASQSISSNFLA

SEQ ID NO: 108 - protein, 7 aa, Homo sapiens
RPSSRAT

SEQ ID NO: 109 - protein, 10 aa, Homo sapiens
CQQYGTSPFT

SEQ ID NO: 110 - DNA, 516 bp, Homo sapiens
  source 1..516: mol_type = other DNA
tcgggcccaggactggtgaagccttcacagatcctgtccctcacctgcactgtctctggtggctccatcagcagtggtggtcactactggagctggatccgccagcacccagggaagggcctggagtggattgggtacatctattacattgggaacacctactacaacccgtccctcaagagtcgagttaccatatcagtagacacgtctaagaaccagttctccctgaagctgagctctgtgactgccgcggacacggccgtgtattattgtgcgagagatagtggggactactacggtatagacgtctggggccaagggaccacggtcaccgtctcctcagcttccaccaagggcccatccgtcttccccctggcgccctgctccaggagcacctccgagagcacagccgccctgggctgcctggtcaaggactacttccccgaaccggtgacggtgtcgtggaactcaggcgccctgaccagcggcgtgcacaccttcccggctgtcctacaa

SEQ ID NO: 111 - protein, 172 aa, Homo sapiens
SGPGLVKPSQILSLTCTVSGGSISSGGHYWSWIRQHPGKGLEWIGYIYYIGNTYYNPSLKSRVTISVDTSKNQFSLKLSSVTAADTAVYYCARDSGDYYGIDVWGQGTTVTVSSASTKGPSVFPLAPCSRSTSESTAALGCLVKDYFPEPVTVSWNSGALTSGVHTFPAVLQ

SEQ ID NO: 112 - DNA, 465 bp, Homo sapiens
  source 1..465: mol_type = other DNA
tctccagactttcagtctgtgactccaaaggagaaagtcaccatcacctgccgggccagtcagagcattggtagtagcttacattggtatcagcagaaaccagatcagtctccaaagctcctcatcaagtatgcttcccagtccttctctggggtcccctcgaggttcagtggcagtggatctgggacagatttcaccctcaccatcaatagcctggaagctgaagatgctgcaacgtattactgtcatcagagtagtagtttaccgctcactttcggcggagggaccaaggtggagatcaaacgaactgtggctgcaccatctgtcttcatcttcccgccatctgatgagcagttgaaatctggaactgcctctgttgtgtgcctgctgaataacttctatcccagagaggccaaagtacagtggaaggtggataacgccctccaatcgggtaactcccaggag

SEQ ID NO: 113 - protein, 155 aa, Homo sapiens
SPDFQSVTPKEKVTITCRASQSIGSSLHWYQQKPDQSPKLLIKYASQSFSGVPSRFSGSGSGTDFTLTINSLEAEDAATYYCHQSSSLPLTFGGGTKVEIKRTVAAPSVFIFPPSDEQLKSGTASVVCLLNNFYPREAKVQWKVDNALQSGNSQE

SEQ ID NO: 114 - protein, 172 aa, Homo sapiens; identical to SEQ ID NO: 111

SEQ ID NO: 115 - protein, 155 aa, Homo sapiens; identical to SEQ ID NO: 113

SEQ ID NO: 116 - protein, 8 aa, Homo sapiens
SSGGHYWS

SEQ ID NO: 117 - protein, 17 aa, Homo sapiens
GYIYYIGNTYYNPSLKS

SEQ ID NO: 118 - protein, 10 aa, Homo sapiens
DSGDYYGIDV

SEQ ID NO: 119 - protein, 12 aa, Homo sapiens
CRASQSIGSSLH

SEQ ID NO: 120 - protein, 7 aa, Homo sapiens
YASQSFS

SEQ ID NO: 121 - protein, 9 aa, Homo sapiens
HQSSSLPLT

SEQ ID NO: 122 - DNA, 451 bp, Homo sapiens
  source 1..451: mol_type = other DNA
ggcgtggtccagcctgggaggtccctgagactctcctgtgcagcgtctggattcaccttcagtagctatggcatgcactgggtccgccaggctccaggcaaggggctggagtgggtggcagttatatggtatgatggaagtcataaatactatgcagactccgtgaagggccgattcaccatctccagagacaattccaagaacacgctgtatctgcaaatgaacagcctgagagccgaggacacggctgtgtattactgtgcgagaggcgctgtagtagtaccagctgctatggacgtctggggccaagggaccacggtcaccgtctcctcagcctccaccaagggcccatcggtcttccccctggcgccctgctccaggagcacctccgagagcacagcggccctgggctgcctggtcaaggactacttccccgaaccggtgacggtgt

SEQ ID NO: 123 - protein, 151 aa, Homo sapiens
GVVQPGRSLRLSCAASGFTFSSYGMHWVRQAPGKGLEWVAVIWYDGSHKYYADSVKGRFTISRDNSKNTLYLQMNSLRAEDTAVYYCARGAVVVPAAMDVWGQGTTVTVSSASTKGPSVFPLAPCSRSTSESTAALGCLVKDYFPEPVTVS

SEQ ID NO: 124 - DNA, 402 bp, Homo sapiens
  source 1..402: mol_type = other DNA
acccagtctccatcctccctgtctgcatctgtaggagacagagtcaccatcacttgccgggcaagtcagaacattagcaggtatttaaattggtatcaacagaaaccagggaaagcccctaagttcctgatctatgttgcatctattttgcaaagtggggtcccatcagggttcagtgccagtggatctgggccagatttcactctnaccatcagcagtctgcaacctgaagattttgcaacttactactgtcaacagagttacagtaccccattcactttcggccctgggaccaaagtggatatcaaacgaactgtggctgcaccatctgtcttcatcttcccgccatctgatgagcagttgaaatctggaactgcctctgttgtgtgcctgctgaataac

SEQ ID NO: 125 - protein, 134 aa, Homo sapiens
TQSPSSLSASVGDRVTITCRASQNISRYLNWYQQKPGKAPKFLIYVASILQSGVPSGFSASGSGPDFTLTISSLQPEDFATYYCQQSYSTPFTFGPGTKVDIKRTVAAPSVFIFPPSDEQLKSGTASVVCLLNN

SEQ ID NO: 126 - protein, 150 aa, Homo sapiens
GVVQPGRSLRLSCAASGFTFSSYGMHWVRQAPGKGLEWVAVIWYDGSHKYYADSVKGRFTISRDNSKNTLYLQMNSLRAEDTAVYYCARGAVVVPAAMDVWGQGTTVTVSSASTKGPSVFPLAPCSRSTSESTAALGCLVKDYFPEPVTV

SEQ ID NO: 127 - protein, 134 aa, Homo sapiens; identical to SEQ ID NO: 125

SEQ ID NO: 128 - protein, 10 aa, Homo sapiens
GFTFSSYGMH

SEQ ID NO: 129 - protein, 15 aa, Homo sapiens
VIWYDGSHKYYADSV

SEQ ID NO: 130 - protein, 11 aa, Homo sapiens
GAVVVPAAMDV

SEQ ID NO: 131 - protein, 11 aa, Homo sapiens
RASQNISRYLN

SEQ ID NO: 132 - protein, 7 aa, Homo sapiens
VASILQS

SEQ ID NO: 133 - protein, 9 aa, Homo sapiens
QQSYSTPFT

SEQ ID NO: 134 - DNA, 438 bp, Homo sapiens
  source 1..438: mol_type = other DNA
gtggtccagcctgggaggtccctgagactctcctgtgcagcgtctggattcaccttcagtagcngtggcatgcactgggtccgccaggctccaggcaaggggctggagtgggtggcagttatatggtctgatggaagtcataaatactatgcagactccgtgaagggccgattcaccatctccagagacaattccaagaacacgctgtatctgcaaatgaacagcctgagagccgaggacacggctgtgtattactgtgcgagaggaactatgatagtagtgggtacccttgactactggggccagggaaccctggtcaccgtctcctcagcctccaccaagggcccatcggtcttccccctggcgccctgctccaggagcacctccgagagcacagcggccctgggctgcctggtcaaggactacttccccgaaccg

SEQ ID NO: 135 - protein, 145 aa, Homo sapiens
VVQPGRSLRLSCAASGFTFSSGMHWVRQAPGKGLEWVAVIWSDGSHKYYADSVKGRFTISRDNSKNTLYLQMNSLRAEDTAVYYCARGTMIVVGTLDYWGQGTLVTVSSASTKGPSVFPLAPCSRSTSESTAALGCLVKDYFPEP

SEQ ID NO: 136 - DNA, 451 bp, Homo sapiens
  source 1..451: mol_type = other DNA
acccagtctccatcctccctgtctgcatctgtaggagacagagtcaccatcacttgccgggcaagtcagagcatttgcaactatttaaattggtatcagcagaaaccaggaaaagcccctagggtcctgatctatgctgcatccagtttgcaaggtggggtcccgtcaaggttcagtggcagtggatctgggacagattgcactctcaccatcagcagtctgcaacctgaagattttgcaacttactactgtcaacagagttacactaccccattcactttcggccctgggaccagagtggatatcgaacgaactgtggctgcaccatctgtcttcatcttcccgccatctgatgagcagttgaaatctggaactgcctctgttgtgtgcctgctgaataacttctatcccagagaggccaaagtacagtggaaggtggataacgcctatt

SEQ ID NO: 137 - protein, 150 aa, Homo sapiens
TQSPSSLSASVGDRVTITCRASQSICNYLNWYQQKPGKAPRVLIYAASSLQGGVPSRFSGSGSGIDCTLTISSLQPEDFATYYCQQSYITPFTFGPGTRVDIERTVAAPSVFIFPPSDEQLKSGTASVVCLLNNFYPREAKVQWKVDNAY

SEQ ID NO: 138 - protein, 146 aa, Homo sapiens
VVQPGRSLRLSCAASGFTFSSCGMHWVRQAPGKGLEWVAVIWSDGSHKYYADSVKGRFTISRDNSKNTLYLQMNSLRAEDTAVYYCARGTMIVVGTLDYWGQGTLVTVSSASTKGPSVFPLAPCSRSTSESTAALGCLVKDYFPEP

SEQ ID NO: 139 - protein, 150 aa, Homo sapiens; identical to SEQ ID NO: 137

SEQ ID NO: 140 - protein, 10 aa, Homo sapiens
GFTFSSCGMH

SEQ ID NO: 141 - protein, 15 aa, Homo sapiens
VIWSDGSHKYYADSV

SEQ ID NO: 142 - protein, 11 aa, Homo sapiens
GTMIVVGTLDY

SEQ ID NO: 143 - protein, 11 aa, Homo sapiens
RASQSICNYLN

SEQ ID NO: 144 - protein, 7 aa, Homo sapiens
AASSLQG

SEQ ID NO: 145 - protein, 9 aa, Homo sapiens
QQSYITPFT

SEQ ID NO: 146 - DNA, 562 bp, Homo sapiens
  source 1..562: mol_type = other DNA
tcctgtgcagcgtctggattcaccttcagttactatggcgtctgggggaggcgtggtccagcctgggaggtccctgagactctcctgtgcagcgtctggattcaccttcagtagctatggcgtgcactgggtccgccaggctccaggcaaggggctggagtgggtggcagttatatggtatgatggaagtaataaatactatgcagactccgtgaagggccgattcaccatctccagagacaattccaagagcacgctgtatctgcaaatgaacagcctgagagccgaggacacggctgtgtattattgtgcgagagactcgtattacgatttttggagtggtcggggcggtatggacgtctggggccaagggaccacggtcaccgtctcctcagcctccaccaagggcccatcggtcttccccctggcgccctgctccaggagcacctccgagagcacagcggccctgggctgcctggtcaaggactacttccccgaaccggtgacggtgtcgtggaactcaggcgctctgaccagcggcgtgcacaccttcccagctgtc

SEQ ID NO: 147 - protein, 174 aa, Homo sapiens
SGGGVVQPGRSLRLSCAASGFTFSSYGVHWVRQAPGKGLEWVAVIWYDGSNKYYADSVKGRFTISRDNSKSTLYLQMNSLRAEDTAVYYCARDSYYDFWSGRGGMDVWGQGTTVTVSSASTKGPSVFPLAPCSRSTSESTAALGCLVKDYFPEPVTVSWNSGALTSGVHTFPAV

SEQ ID NO: 148 - DNA, 419 bp, Homo sapiens
  source 1..419: mol_type = other DNA
ccactctccctgcccgtcacccttggacagccggcctccatctcctgcaggtctagtcaaagcctcgtatacagtgatggaaacacctacttgaattggtttcagcagaggccaggccaatctccaaggcgcctaatttataaggtttctaactgggactctggggtcccagacagattcagcggcagtgggtcaggcactgatttcacactgaaaatcagcagggtggaggctgaggatgttggggtttattactgcatgcaaggttcacactggcctccgacgttcggccaagggaccaaggtggaaatcaaacgaactgtggctgcaccatctgtcttcatcttcccgccatctgatgagcagttgaaatctggaactgcctctgttgtgtgcctgctgaataacttctatcccac

SEQ ID NO: 149 - protein, 139 aa, Homo sapiens
PLSLPVTLGQPASISCRSSQSLVYSDGNTYLNWFQQRPGQSPRRLIYKVSNWDSGVPDRFSGSGSGTDFTLKISRVEAEDVGVYYCMQGSHWPPTFGQGTKVEIKRTVAAPSVFIFPPSDEQLKSGTASVVCLLNNFYP

SEQ ID NO: 150 - protein, 171 aa, Homo sapiens
GVVQPGRSLRLSCAASGFTFSSYGVHWVRQAPGKGLEWVAVIWYDGSNKYYADSVKGRFTISRDNSKSTLYLQMNSLRAEDTAVYYCARDSYYDFWSGRGGMDVWGQGTTVTVSSASTKGPSVFPLAPCSRSTSESTAALGCLVKDYFPEPVTVSWNSGALTSGVHTFPAV

SEQ ID NO: 151 - protein, 139 aa, Homo sapiens; identical to SEQ ID NO: 149

SEQ ID NO: 152 - protein, 10 aa, Homo sapiens
GFTFSSYGVH

SEQ ID NO: 153 - protein, 15 aa, Homo sapiens
VIWYDGSNKYYADSV

SEQ ID NO: 154 - protein, 15 aa, Homo sapiens
DSYYDFWSGRGGMDV

SEQ ID NO: 155 - protein, 16 aa, Homo sapiens
RSSQSLVYSDGNTYLN

SEQ ID NO: 156 - protein, 7 aa, Homo sapiens
KVSNWDS

SEQ ID NO: 157 - protein, 9 aa, Homo sapiens
MQGSHWPPT

SEQ ID NO: 158 - DNA, 490 bp, Homo sapiens
  source 1..490: mol_type = other DNA
gtccagcctgggaggtccctgagactctcctgtgcagcgtctggattcaccttcagtaactatgccatgcactgggtccgccaggctccaggcaaggggctggagtgggtggtagttatttggcatgatggaaataataaatactatgcagagtccgtgaagggccgattcaccatctccagagacaattccaagaacacgctgtatctgcaaatgaacagcctgagagccgaggacacggctgtatattactgtgcgagagatcagggcactggctggtacggaggctttgacttctggggccagggaaccctggtcaccgtctcctcagcctccaccaagggcccatcggtcttccccctggcgccctgctccaggagcacctccgagagcacagcggccctgggctgcctggtcaaggactacttccccgaaccggtgacggtgtcgtggaactcaggcgctctgaccagcggcgtgcacaccttcc

SEQ ID NO: 159 - protein, 163 aa, Homo sapiens
VQPGRSLRLSCAASGFTFSNYAMHWVRQAPGKGLEWVVVIWHDGNNKYYAESVKGRFTISRDNSKNTLYLQMNSLRAEDTAVYYCARDQGTGWYGGFDFWGQGTLVTVSSASTKGPSVFPLAPCSRSTSESTAALGCLVKDYFPEPVTVSWNSGALTSGVHTF

SEQ ID NO: 160 - DNA, 419 bp, Homo sapiens
  source 1..419: mol_type = other DNA
cctggagagccggcttccatctcttgcaggtctagtcagagcctcctgcatagtaatggatacaactatttggattggtacctgcagaagccaggacagtctccacagctcctgatctatttgggttctaatcgggcctccggggtccctgacaggttcagtggcagtggatcaggcacagattttacactgaaactcagcagagtggaggctgaggatgttggggtttattactgcatgcaagctctacaaactcctctcactttcggcggagggaccaaggtggagatcaaacgaactgtggctgcaccatctgtcttcatcttcccgccatctgatgagcagttgaaatctggaactgcctctgttgtgtgcctgctgaataacttctatcccagaraggccaaagtacattccat

SEQ ID NO: 161 - protein, 133 aa, Homo sapiens
PGEPASISCRSSQSLLHSNGYNYLDWYLQKPGQSPQLLIYLGSNRASGVPDRFSGSGSGTDFTLKLSRVEAEDVGVYYCMQALQTPLTFGGGTKVEIKRTVAAPSVFIFPPSDEQLKSGTASVVCLLNNFYPR

SEQ ID NO: 162 - protein, 163 aa, Homo sapiens; identical to SEQ ID NO: 159

SEQ ID NO: 163 - protein, 133 aa, Homo sapiens; identical to SEQ ID NO: 161

SEQ ID NO: 164 - protein, 10 aa, Homo sapiens
GFTFSNYAMH

SEQ ID NO: 165 - protein, 15 aa, Homo sapiens
VIWHDGNNKYYAESV

SEQ ID NO: 166 - protein, 12 aa, Homo sapiens
DQGTGWYGGFDF

SEQ ID NO: 167 - protein, 16 aa, Homo sapiens
RSSQSLLHSNGYNYLD

SEQ ID NO: 168 - protein, 7 aa, Homo sapiens
LGSNRAS

SEQ ID NO: 169 - protein, 9 aa, Homo sapiens
MQALQTPLT

SEQ ID NO: 170 - DNA, 1612 bp, Mus musculus
  source 1..1612: mol_type = other DNA
tcaagcttttggaccctcgtacagaagctaatacgactcactatagggaaataagagagaaaagaagagtaagaagaaatataagagccaccatggaaacggacactctcctgctgtgggtactgttgctttgggtgccaggatctacgggcgaggcgaagctccaggaaagcgggccggtactggtcaaacccggcgctagcgtgaaaatgagttgcaaggccagcggttatactttcaccgactattacatgaattgggtaaagcagagccacgggaagtcattggaatggattggagtaatcaacccctacaacggggacaccagttataaccaaaagttcaagggaaaggcgacactcactgtggataaaagttcaagcacagcctacatggaacttaattccttgacatctgaggacagcgcagtatactattgtgctagatattacggtagttggttcgcctactgggggcaaggaacgctaatcactgtatcaaccgcaaaaactacagcaccctctgtataccctctcgcacctgtgtgcggagacacaactggcagctcagtaaccctcgggtgcctggttaaggggtatttcccagagccagtgactctcacctggaattctggaagccttagttcaggagtacatactttccccgctgtgctacaatcagatctgtacaccctgagttcaagcgttaccgttacgagtagtacttggccttctcagtccataacctgtaacgtcgcccatcccgcctcttctaccaaggttgacaagaagattgaaccgagaggacccaccattaaaccctgccctccttgcaagtgtcctgctccaaacctcttgggaggcccgtccgtcttcatctttcccccaaagatcaaagacgtgctcatgatttcgctgtcaccaatcgtaacgtgcgttgtggtggacgtctccgaggacgacccagatgtccagatatcctggttcgtaaacaatgtggaggtccatacagcccagacgcagacccaccgcgaggactataattctaccctcagggttgtctctgccctgccaattcagcatcaggactggatgagcgggaaagagttcaagtgtaaagtgaataataaagatctgcctgcccccatcgagagaactatcagtaaacctaaaggatccgtgcgcgctccccaggtctacgtcctgccccccccagaagaggaaatgactaagaagcaggtcacacttacctgcatggtgacggattttatgccagaagacatttatgtggaatggacaaataatggaaagacagagctcaattataagaacacagagccagtgttagattcagatggcagttattttatgtacagcaaactgcgcgtagaaaaaaaaaattgggtcgagcgcaatagctactcctgcagcgtcgtgcatgaagggctacacaatcaccacaccacgaagagcttttcccggacacctgggaaatgataataggctggagcctcggtggccatgcttcttgccccttgggcctccccccagcccctcctccccttcctgcacccgtacccccgtggtctttgaataaagtctgagtgggcggc

SEQ ID NO: 171 - protein, 467 aa, Mus musculus
METDTLLLWVLLLWVPGSTGEAKLQESGPVLVKPGASVKMSCKASGYTFTDYYMNWVKQSHGKSLEWIGVINPYNGDTSYNQKFKGKATLTVDKSSSTAYMELNSLTSEDSAVYYCARYYGSWFAYWGQGTLITVSTAKTTAPSVYPLAPVCGDTTGSSVTLGCLVKGYFPEPVTLTWNSGSLSSGVHTFPAVLQSDLYTLSSSVTVTSSTWPSQSITCNVAHPASSTKVDKKIEPRGPTIKPCPPCKCPAPNLLGGPSVFIFPPKIKDVLMISLSPIVTCVVVDVSEDDPDVQISWFVNNVEVHTAQTQTHREDYNSTLRVVSALPIQHQDWMSGKEFKCKVNNKDLPAPIERTISKPKGSVRAPQVYVLPPPEEEMTKKQVTLTCMVTDFMPEDIYVEWTNNGKTELNYKNTEPVLDSDGSYFMYSKLRVEKKNWVERNSYSCSVVHEGLHNHHTTKSFSRTPGK

SEQ ID NO: 172 - DNA, 1401 bp, Mus musculus
  source 1..1401: mol_type = other DNA
atggaaacggacactctcctgctgtgggtactgttgctttgggtgccaggatctacgggcgaggcgaagctccaggaaagcgggccggtactggtcaaacccggcgctagcgtgaaaatgagttgcaaggccagcggttatactttcaccgactattacatgaattgggtaaagcagagccacgggaagtcattggaatggattggagtaatcaacccctacaacggggacaccagttataaccaaaagttcaagggaaaggcgacactcactgtggataaaagttcaagcacagcctacatggaacttaattccttgacatctgaggacagcgcagtatactattgtgctagatattacggtagttggttcgcctactgggggcaaggaacgctaatcactgtatcaaccgcaaaaactacagcaccctctgtataccctctcgcacctgtgtgcggagacacaactggcagctcagtaaccctcgggtgcctggttaaggggtatttcccagagccagtgactctcacctggaattctggaagccttagttcaggagtacatactttccccgctgtgctacaatcagatctgtacaccctgagttcaagcgttaccgttacgagtagtacttggccttctcagtccataacctgtaacgtcgcccatcccgcctcttctaccaaggttgacaagaagattgaaccgagaggacccaccattaaaccctgccctccttgcaagtgtcctgctccaaacctcttgggaggcccgtccgtcttcatctttcccccaaagatcaaagacgtgctcatgatttcgctgtcaccaatcgtaacgtgcgttgtggtggacgtctccgaggacgacccagatgtccagatatcctggttcgtaaacaatgtggaggtccatacagcccagacgcagacccaccgcgaggactataattctaccctcagggttgtctctgccctgccaattcagcatcaggactggatgagcgggaaagagttcaagtgtaaagtgaataataaagatctgcctgcccccatcgagagaactatcagtaaacctaaaggatccgtgcgcgctccccaggtctacgtcctgccccccccagaagaggaaatgactaagaagcaggtcacacttacctgcatggtgacggattttatgccagaagacatttatgtggaatggacaaataatggaaagacagagctcaattataagaacacagagccagtgttagattcagatggcagttattttatgtacagcaaactgcgcgtagaaaaaaaaaattgggtcgagcgcaatagctactcctgcagcgtcgtgcatgaagggctacacaatcaccacaccacgaagagcttttcccggacacctgggaaa

SEQ ID NO: 173 - DNA, 1671 bp, Mus musculus
  source 1..1671: mol_type = other DNA
ggaaataagagagaaaagaagagtaagaagaaatataagagccaccatggaaacggacactctcctgctgtgggtactgttgctttgggtgccaggatctacgggcgaggcgaagctccaggaaagcgggccggtactggtcaaacccggcgctagcgtgaaaatgagttgcaaggccagcggttatactttcaccgactattacatgaattgggtaaagcagagccacgggaagtcattggaatggattggagtaatcaacccctacaacggggacaccagttataaccaaaagttcaagggaaaggcgacactcactgtggataaaagttcaagcacagcctacatggaacttaattccttgacatctgaggacagcgcagtatactattgtgctagatattacggtagttggttcgcctactgggggcaaggaacgctaatcactgtatcaaccgcaaaaactacagcaccctctgtataccctctcgcacctgtgtgcggagacacaactggcagctcagtaaccctcgggtgcctggttaaggggtatttcccagagccagtgactctcacctggaattctggaagccttagttcaggagtacatactttccccgctgtgctacaatcagatctgtacaccctgagttcaagcgttaccgttacgagtagtacttggccttctcagtccataacctgtaacgtcgcccatcccgcctcttctaccaaggttgacaagaagattgaaccgagaggacccaccattaaaccctgccctccttgcaagtgtcctgctccaaacctcttgggaggcccgtccgtcttcatctttcccccaaagatcaaagacgtgctcatgatttcgctgtcaccaatcgtaacgtgcgttgtggtggacgtctccgaggacgacccagatgtccagatatcctggttcgtaaacaatgtggaggtccatacagcccagacgcagacccaccgcgaggactataattctaccctcagggttgtctctgccctgccaattcagcatcaggactggatgagcgggaaagagttcaagtgtaaagtgaataataaagatctgcctgcccccatcgagagaactatcagtaaacctaaaggatccgtgcgcgctccccaggtctacgtcctgccccccccagaagaggaaatgactaagaagcaggtcacacttacctgcatggtgacggattttatgccagaagacatttatgtggaatggacaaataatggaaagacagagctcaattataagaacacagagccagtgttagattcagatggcagttattttatgtacagcaaactgcgcgtagaaaaaaaaaattgggtcgagcgcaatagctactcctgcagcgtcgtgcatgaagggctacacaatcaccacaccacgaagagcttttcccggacacctgggaaatgataataggctggagcctcggtggccatgcttcttgccccttgggcctccccccagcccctcctccccttcctgcacccgtacccccgtggtctttgaataaagtctgagtgggcggcaaaaaaaaaaaaaaaaaaaaaaaaaaaaaaaaaaaaaaaaaaaaaaaaaaaaaaaaaaaaaaaaaaaaaaaaaaaaaaaaaaaaaaaaaaaaaaaaaaaatctag

SEQ ID NO: 174 - DNA, 1630 bp, Mus musculus
  source 1..1630: mol_type = other DNA
tcaagcttttggaccctcgtacagaagctaatacgactcactatagggaaataagagagaaaagaagagtaagaagaaatataagagccaccatggaaacggacactctcctgctgtgggtactgttgctttgggtgccaggatctacgggcgaggcgaagctccaggaaagcgggccggtactggtcaaacccggcgctagcgtgaaaatgagttgcaaggccagcggttatactttcaccgactattacatgaattgggtaaagcagagccacgggaagtcattggaatggattggagtaatcaacccctacaacggggacaccagttataaccaaaagttcaagggaaaggcgacactcactgtggataaaagttcaagcacagcctacatggaacttaattccttgacatctgaggacagcgcagtatactattgtgctagatattacggtagttggttcgcctactgggggcaaggaacgctaatcactgtatcaaccgccaaaaccacaccgccttccgtgtaccctctagcgcccggttgtggtgacactacaggatcgtctgtgactttgggctgccttgtgaaaggatatttccctgaatctgttactgtgacctggaactctggctcgctgagtagttcagtgcacacattccccgccctgcttcagagcggtttgtacaccatgtcttcttcagttaccgtcccctcatcaacgtggccttcacagactgtcacgtgttctgttgcccacccagcaagctccaccaccgtggataaaaaactggagccaagcgggccgatctcaaccatcaatccgtgtcctccatgcaaggagtgccacaagtgtcctgccccaaatctggagggaggcccgtccgtctttatttttccacccaatattaaagacgtcctgatgataagcttgaccccaaaagtaacttgcgttgtggtggatgtctcggaggatgaccccgatgttcagatcagctggttcgtgaacaacgtcgaggtacatactgcgcagacccaaactcaccgagaagattataacagtactattcgagtggtgtctacccttcccatccagcaccaggactggatgtccggaaaggaatttaaatgcaaggtgaataataaagatctaccctcaccaattgaacgaacgataagtaagatcaaaggactggtgagggccccacaggtgtatattctcccacctcctgccgagcagctgtcccgcaaagacgtctccttaacatgtttagtcgtgggattcaaccctggagatattagcgtcgagtggaccagtaacggtcacacggaagagaactacaaagacacggcgcccgtgctcgacagtgacggcagttacttcatctactccaaacttaatatgaagaccagtaaatgggagaagacagactccttttcttgcaatgtgcgccacgagggcctgaagaactactacctgaaaaagacaatcagcagaagccctggcaagtgataataggctggagcctcggtggccatgcttcttgccccttgggcctccccccagcccctcctccccttcctgcacccgtacccccgtggtctttgaataaagtctgagtgggcggc

SEQ ID NO: 175 - protein, 473 aa, Mus musculus
METDTLLLWVLLLWVPGSTGEAKLQESGPVLVKPGASVKMSCKASGYTFTDYYMNWVKQSHGKSLEWIGVINPYNGDTSYNQKFKGKATLTVDKSSSTAYMELNSLTSEDSAVYYCARYYGSWFAYWGQGTLITVSTAKTTPPSVYPLAPGCGDTTGSSVTLGCLVKGYFPESVTVTWNSGSLSSSVHTFPALLQSGLYTMSSSVTVPSSTWPSQTVTCSVAHPASSTTVDKKLEPSGPISTINPCPPCKECHKCPAPNLEGGPSVFIFPPNIKDVLMISLTPKVTCVVVDVSEDDPDVQISWFVNNVEVHTAQTQTHREDYNSTIRVVSTLPIQHQDWMSGKEFKCKVNNKDLPSPIERTISKIKGLVRAPQVYILPPPAEQLSRKDVSLTCLVVGFNPGDISVEWTSNGHTEENYKDTAPVLDSDGSYFIYSKLNMKTSKWEKTDSFSCNVRHEGLKNYYLKKTISRSPGK

SEQ ID NO: 176 - DNA, 1419 bp, Mus musculus
  source 1..1419: mol_type = other DNA
atggaaacggacactctcctgctgtgggtactgttgctttgggtgccaggatctacgggcgaggcgaagctccaggaaagcgggccggtactggtcaaacccggcgctagcgtgaaaatgagttgcaaggccagcggttatactttcaccgactattacatgaattgggtaaagcagagccacgggaagtcattggaatggattggagtaatcaacccctacaacggggacaccagttataaccaaaagttcaagggaaaggcgacactcactgtggataaaagttcaagcacagcctacatggaacttaattccttgacatctgaggacagcgcagtatactattgtgctagatattacggtagttggttcgcctactgggggcaaggaacgctaatcactgtatcaaccgccaaaaccacaccgccttccgtgtaccctctagcgcccggttgtggtgacactacaggatcgtctgtgactttgggctgccttgtgaaaggatatttccctgaatctgttactgtgacctggaactctggctcgctgagtagttcagtgcacacattccccgccctgcttcagagcggtttgtacaccatgtcttcttcagttaccgtcccctcatcaacgtggccttcacagactgtcacgtgttctgttgcccacccagcaagctccaccaccgtggataaaaaactggagccaagcgggccgatctcaaccatcaatccgtgtcctccatgcaaggagtgccacaagtgtcctgccccaaatctggagggaggcccgtccgtctttatttttccacccaatattaaagacgtcctgatgataagcttgaccccaaaagtaacttgcgttgtggtggatgtctcggaggatgaccccgatgttcagatcagctggttcgtgaacaacgtcgaggtacatactgcgcagacccaaactcaccgagaagattataacagtactattcgagtggtgtctacccttcccatccagcaccaggactggatgtccggaaaggaatttaaatgcaaggtgaataataaagatctaccctcaccaattgaacgaacgataagtaagatcaaaggactggtgagggccccacaggtgtatattctcccacctcctgccgagcagctgtcccgcaaagacgtctccttaacatgtttagtcgtgggattcaaccctggagatattagcgtcgagtggaccagtaacggtcacacggaagagaactacaaagacacggcgcccgtgctcgacagtgacggcagttacttcatctactccaaacttaatatgaagaccagtaaatgggagaagacagactccttttcttgcaatgtgcgccacgagggcctgaagaactactacctgaaaaagacaatcagcagaagccctggcaag

SEQ ID NO: 177 - DNA, 1689 bp, Mus musculus
  source 1..1689: mol_type = other DNA
ggaaataagagagaaaagaagagtaagaagaaatataagagccaccatggaaacggacactctcctgctgtgggtactgttgctttgggtgccaggatctacgggcgaggcgaagctccaggaaagcgggccggtactggtcaaacccggcgctagcgtgaaaatgagttgcaaggccagcggttatactttcaccgactattacatgaattgggtaaagcagagccacgggaagtcattggaatggattggagtaatcaacccctacaacggggacaccagttataaccaaaagttcaagggaaaggcgacactcactgtggataaaagttcaagcacagcctacatggaacttaattccttgacatctgaggacagcgcagtatactattgtgctagatattacggtagttggttcgcctactgggggcaaggaacgctaatcactgtatcaaccgccaaaaccacaccgccttccgtgtaccctctagcgcccggttgtggtgacactacaggatcgtctgtgactttgggctgccttgtgaaaggatatttccctgaatctgttactgtgacctggaactctggctcgctgagtagttcagtgcacacattccccgccctgcttcagagcggtttgtacaccatgtcttcttcagttaccgtcccctcatcaacgtggccttcacagactgtcacgtgttctgttgcccacccagcaagctccaccaccgtggataaaaaactggagccaagcgggccgatctcaaccatcaatccgtgtcctccatgcaaggagtgccacaagtgtcctgccccaaatctggagggaggcccgtccgtctttatttttccacccaatattaaagacgtcctgatgataagcttgaccccaaaagtaacttgcgttgtggtggatgtctcggaggatgaccccgatgttcagatcagctggttcgtgaacaacgtcgaggtacatactgcgcagacccaaactcaccgagaagattataacagtactattcgagtggtgtctacccttcccatccagcaccaggactggatgtccggaaaggaatttaaatgcaaggtgaataataaagatctaccctcaccaattgaacgaacgataagtaagatcaaaggactggtgagggccccacaggtgtatattctcccacctcctgccgagcagctgtcccgcaaagacgtctccttaacatgtttagtcgtgggattcaaccctggagatattagcgtcgagtggaccagtaacggtcacacggaagagaactacaaagacacggcgcccgtgctcgacagtgacggcagttacttcatctactccaaacttaatatgaagaccagtaaatgggagaagacagactccttttcttgcaatgtgcgccacgagggcctgaagaactactacctgaaaaagacaatcagcagaagccctggcaagtgataataggctggagcctcggtggccatgcttcttgccccttgggcctccccccagcccctcctccccttcctgcacccgtacccccgtggtctttgaataaagtctgagtgggcggcaaaaaaaaaaaaaaaaaaaaaaaaaaaaaaaaaaaaaaaaaaaaaaaaaaaaaaaaaaaaaaaaaaaaaaaaaaaaaaaaaaaaaaaaaaaaaaaaaaaatctag

SEQ ID NO: 178 - DNA, 928 bp, Mus musculus
  source 1..928: mol_type = other DNA
tcaagcttttggaccctcgtacagaagctaatacgactcactatagggaaataagagagaaaagaagagtaagaagaaatataagagccaccatggaaacggacactctcctgctgtgggtactgttgctttgggtgccaggatctacgggcgatattgtgatgactcaaaccacactgagcctcccggtgagcctgggggatcaagcctccattagttgccgaagctcccaaagtatcgtgcactccaacggcaacacctatctggagtggtatttacagaagcccggacagagcccaaagctgctcatctacaaagtgtccaatcgcttctcgggcgtgccagacagattctcaggtagtgggtctgggacagattttaccctgaagatatctcgagtggaggcggaggatttaggagtctactattgtttccagggtagtcatgtgccttacactttcggtggggggacaaaattagaaatcaaaagggccgacgcagccccaacggtctctattttccctccatcttccgagcagctgacgagtggcggggcctcagtggtctgcttcctgaataatttctaccccaaggacataaacgtgaaatggaaaattgatggatcagaaaggcagaatggcgttctgaactcctggaccgaccaggatagcaaggactccacctactcgatgtccagtacactcactctgactaaggacgaatatgaaagacataattcatacacctgtgaggctacacataaaacatccacttccccaatcgtcaaatccttcaatcgaaatgagtgctgataataggctggagcctcggtggccatgcttcttgccccttgggcctccccccagcccctcctccccttcctgcacccgtacccccgtggtctttgaataaagtctgagtgggcggc

SEQ ID NO: 179 - protein, 239 aa, Mus musculus
METDTLLLWVLLLWVPGSTGDIVMTQTTLSLPVSLGDQASISCRSSQSIVHSNGNTYLEWYLQKPGQSPKLLIYKVSNRFSGVPDRFSGSGSGTDFTLKISRVEAEDLGVYYCFQGSHVPYTFGGGTKLEIKRADAAPTVSIFPPSSEQLTSGGASVVCFLNNFYPKDINVKWKIDGSERQNGVLNSWTDQDSKDSTYSMSSTLTLTKDEYERHNSYTCEATHKTSTSPIVKSFNRNEC

SEQ ID NO: 180 - DNA, 717 bp, Mus musculus
  source 1..717: mol_type = other DNA
atggaaacggacactctcctgctgtgggtactgttgctttgggtgccaggatctacgggcgatattgtgatgactcaaaccacactgagcctcccggtgagcctgggggatcaagcctccattagttgccgaagctcccaaagtatcgtgcactccaacggcaacacctatctggagtggtatttacagaagcccggacagagcccaaagctgctcatctacaaagtgtccaatcgcttctcgggcgtgccagacagattctcaggtagtgggtctgggacagattttaccctgaagatatctcgagtggaggcggaggatttaggagtctactattgtttccagggtagtcatgtgccttacactttcggtggggggacaaaattagaaatcaaaagggccgacgcagccccaacggtctctattttccctccatcttccgagcagctgacgagtggcggggcctcagtggtctgcttcctgaataatttctaccccaaggacataaacgtgaaatggaaaattgatggatcagaaaggcagaatggcgttctgaactcctggaccgaccaggatagcaaggactccacctactcgatgtccagtacactcactctgactaaggacgaatatgaaagacataattcatacacctgtgaggctacacataaaacatccacttccccaatcgtcaaatccttcaatcgaaatgagtgc

SEQ ID NO: 181 - DNA, 987 bp, Mus musculus
  source 1..987: mol_type = other DNA
ggaaataagagagaaaagaagagtaagaagaaatataagagccaccatggaaacggacactctcctgctgtgggtactgttgctttgggtgccaggatctacgggcgatattgtgatgactcaaaccacactgagcctcccggtgagcctgggggatcaagcctccattagttgccgaagctcccaaagtatcgtgcactccaacggcaacacctatctggagtggtatttacagaagcccggacagagcccaaagctgctcatctacaaagtgtccaatcgcttctcgggcgtgccagacagattctcaggtagtgggtctgggacagattttaccctgaagatatctcgagtggaggcggaggatttaggagtctactattgtttccagggtagtcatgtgccttacactttcggtggggggacaaaattagaaatcaaaagggccgacgcagccccaacggtctctattttccctccatcttccgagcagctgacgagtggcggggcctcagtggtctgcttcctgaataatttctaccccaaggacataaacgtgaaatggaaaattgatggatcagaaaggcagaatggcgttctgaactcctggaccgaccaggatagcaaggactccacctactcgatgtccagtacactcactctgactaaggacgaatatgaaagacataattcatacacctgtgaggctacacataaaacatccacttccccaatcgtcaaatccttcaatcgaaatgagtgctgataataggctggagcctcggtggccatgcttcttgccccttgggcctccccccagcccctcctccccttcctgcacccgtacccccgtggtctttgaataaagtctgagtgggcggcaaaaaaaaaaaaaaaaaaaaaaaaaaaaaaaaaaaaaaaaaaaaaaaaaaaaaaaaaaaaaaaaaaaaaaaaaaaaaaaaaaaaaaaaaaaaaaaaaaaatctag

SEQ ID NO: 182 - DNA, 355 bp, Homo sapiens
  source 1..355: mol_type = other DNA
caggtgcagctggtggagtctgggggaggcgtggtccagcctgggaggtccctgagactctcctgtgcagcctctggattcaccttcagtagctatactatgcactgggtccgccaggctccaggcaaggggctggagtgggtgacatttatatcatatgatggaaacaataaatactacgcagactccgtgaagggccgattcaccatctccagagacaattccaagaacacgctgtatctgcaaatgaacagcctgagagctgaggacacggctatatattactgtgcgaggaccggctggctggggccctttgactactggggccagggaaccctggtcaccgtctcctcag

SEQ ID NO: 183 - protein, 118 aa, Homo sapiens
QVQLVESGGGVVQPGRSLRLSCAASGFTFSSYTMHWVRQAPGKGLEWVTFISYDGNNKYYADSVKGRFTISRDNSKNTLYLQMNSLRAEDTAIYYCARTGWLGPFDYWGQGTLVTVSS

SEQ ID NO: 184 - DNA, 325 bp, Homo sapiens
  source 1..325: mol_type = other DNA
gaaattgtgttgacgcagtctccaggcaccctgtctttgtctccaggggaaagagccaccctctcctgcagggccagtcagagtgttggcagcagctacttagcctggtaccagcagaaacctggccaggctcccaggctcctcatctatggtgcattcagcagggccactggcatcccagacaggttcagtggcagtgggtctgggacagacttcactctcaccatcagcagactggagcctgaagattttgcagtgtattactgtcagcagtatggtagctcaccgtggacgttcggccaagggaccaaggtggaaatcaaac

SEQ ID NO: 185 - protein, 108 aa, Homo sapiens
EIVLTQSPGTLSLSPGERATLSCRASQSVGSSYLAWYQQKPGQAPRLLIYGAFSRATGIPDRFSGSGSGTDFTLTISRLEPEDFAVYYCQQYGSSPWTFGQGTKVEIK

SEQ ID NO: 186 - protein, 5 aa, Homo sapiens
SYTMH

SEQ ID NO: 187 - protein, 17 aa, Homo sapiens
FISYDGNNKYYADSVKG

SEQ ID NO: 188 - protein, 9 aa, Homo sapiens
TGWLGPFDY

SEQ ID NO: 189 - protein, 12 aa, Homo sapiens
RASQSVGSSYLA

SEQ ID NO: 190 - protein, 7 aa, Homo sapiens
GAFSRAT

SEQ ID NO: 191 - protein, 9 aa, Homo sapiens
QQYGSSPWT

SEQ ID NO: 192 - RNA, 85 nt, Homo sapiens
  source 1..85: mol_type = other RNA
ccttagcagagctgtggagtgtgacaatggtgtttgtgtctaaactatcaaacgccattatcacactaaatagctactgctaggc

SEQ ID NO: 193 - RNA, 22 nt, Homo sapiens
  source 1..22: mol_type = other RNA
aacgccattatcacactaaata

SEQ ID NO: 194 - RNA, 22 nt, Homo sapiens
  source 1..22: mol_type = other RNA
tatttagtgtgataatggcgtt

SEQ ID NO: 195 - RNA, 22 nt, Homo sapiens
  source 1..22: mol_type = other RNA
tggagtgtgacaatggtgtttg

SEQ ID NO: 196 - RNA, 22 nt, Homo sapiens
  source 1..22: mol_type = other RNA
caaacaccattgtcacactcca

SEQ ID NO: 197 - RNA, 47 nt, Homo sapiens
  source 1..47: mol_type = other RNA
gggaaataagagagaaaagaagagtaagaagaaatataagagccacc

SEQ ID NO: 198 - RNA, 47 nt, Homo sapiens
  source 1..47: mol_type = other RNA
gggagatcagagagaaaagaagagtaagaagaaatataagagccacc

SEQ ID NO: 199 - RNA, 145 nt, Homo sapiens
  source 1..145: mol_type = other RNA
ggaataaaagtctcaacacaacatatacaaaacaaacgaatctcaagcaatcaagcattctacttctattgcagcaatttaaatcatttcttttaaagcaaaagcaattttctgaaaattttcaccatttacgaacgatagcaac

SEQ ID NO: 200 - RNA, 42 nt, Homo sapiens
  source 1..42: mol_type = other RNA
gggagacaagcttggcattccggtactgttggtaaagccacc

SEQ ID NO: 201 - RNA, 47 nt, Homo sapiens; identical to SEQ ID NO: 198
  source 1..47: mol_type = other RNA

SEQ ID NO: 202 - RNA, 145 nt, Homo sapiens; identical to SEQ ID NO: 199
  source 1..145: mol_type = other RNA

SEQ ID NO: 203 - RNA, 42 nt, Homo sapiens; identical to SEQ ID NO: 200
  source 1..42: mol_type = other RNA

SEQ ID NO: 204 - RNA, 47 nt, Homo sapiens
  source 1..47: mol_type = other RNA
gggaattaacagagaaaagaagagtaagaagaaatataagagccacc

SEQ ID NO: 205 - RNA, 47 nt, Homo sapiens
  source 1..47: mol_type = other RNA
gggaaattagacagaaaagaagagtaagaagaaatataagagccacc

SEQ ID NO: 206 - RNA, 47 nt, Homo sapiens
  source 1..47: mol_type = other RNA
gggaaataagagagtaaagaacagtaagaagaaatataagagccacc

SEQ ID NO: 207 - RNA, 47 nt, Homo sapiens
  source 1..47: mol_type = other RNA
gggaaaaaagagagaaaagaagactaagaagaaatataagagccacc

SEQ ID NO: 208 - RNA, 47 nt, Homo sapiens
  source 1..47: mol_type = other RNA
gggaaataagagagaaaagaagagtaagaagatatataagagccacc

SEQ ID NO: 209 - RNA, 47 nt, Homo sapiens
  source 1..47: mol_type = other RNA
gggaaataagagacaaaacaagagtaagaagaaatataagagccacc

SEQ ID NO: 210 - RNA, 47 nt, Homo sapiens
  source 1..47: mol_type = other RNA
gggaaattagagagtaaagaacagtaagtagaattaaaagagccacc

SEQ ID NO: 211 - RNA, 47 nt, Homo sapiens
  source 1..47: mol_type = other RNA
gggaaataagagagaatagaagagtaagaagaaatataagagccacc

SEQ ID NO: 212 - RNA, 47 nt, Homo sapiens
  source 1..47: mol_type = other RNA
gggaaataagagagaaaagaagagtaagaagaaaattaagagccacc

SEQ ID NO: 213 - RNA, 47 nt, Homo sapiens
  source 1..47: mol_type = other RNA
gggaaataagagagaaaagaagagtaagaagaaatttaagagccacc

SEQ ID NO: 214 - RNA, 47 nt, Homo sapiens; identical to SEQ ID NO: 197
  source 1..47: mol_type = other RNA

SEQ ID NO: 215 - RNA, 371 nt, Homo sapiens
  source 1..371: mol_type = other RNA
gcgcctgcccacctgccaccgactgctggaacccagccagtgggagggcctggcccaccagagtcctgctccctcactcctcgccccgccccctgtcccagagtcccacctgggggctctctccacccttctcagagttccagtttcaaccagagttccaaccaatgggctccatcctctggattctggccaatgaaatatctccctggcagggtcctcttcttttcccagagctccaccccaaccaggagctctagttaatggagagctcccagcacactcggagcttgtgctttgtctccacgcaaagcgataaataaaagcattggtggcctttggtctttgaataaagcctgagtaggaagtctaga

SEQ ID NO: 216 - RNA, 568 nt, Homo sapiens
  source 1..568: mol_type = other RNA
gcccctgccgctcccacccccacccatctgggccccgggttcaagagagagcggggtctgatctcgtgtagccatatagagtttgcttctgagtgtctgctttgtttagtagaggtgggcaggaggagctgaggggctggggctggggtgttgaagttggctttgcatgcccagcgatgcgcctccctgtgggatgtcatcaccctgggaaccgggagtggcccttggctcactgtgttctgcatggtttggatctgaattaattgtcctttcttctaaatcccaaccgaacttcttccaacctccaaactggctgtaaccccaaatccaagccattaactacacctgacagtagcaattgtctgattaatcactggccccttgaagacagcagaatgtccctttgcaatgaggaggagatctgggctgggcgggccagctggggaagcatttgactatctggaacttgtgtgtgcctcctcaggtatggcagtgactcacctggttttaataaaacaacctgcaacatctcatggtctttgaataaagcctgagtaggaagtctaga

SEQ ID NO: 217 - RNA, 289 nt, Homo sapiens
  source 1..289: mol_type = other RNA
acacactccacctccagcacgcgacttctcaggacgacgaatcttctcaatgggggggcggctgagctccagccaccccgcagtcactttctttgtaacaacttccgttgctgccatcgtaaactgacacagtgtttataacgtgtacatacattaacttattacctcattttgttatttttcgaaacaaagccctgtggaagaaaatggaaaacttgaagaagcattaaagtcattctgttaagctgcgtaaatggtctttgaataaagcctgagtaggaagtctaga

SEQ ID NO: 218 - RNA, 379 nt, Homo sapiens
  source 1..379: mol_type = other RNA
catcacatttaaaagcatctcagcctaccatgagaataagagaaagaaaatgaagatcaaaagcttattcatctgtttttctttttcgttggtgtaaagccaacaccctgtctaaaaaacataaatttctttaatcattttgcctcttttctctgtgcttcaattaataaaaaatggaaagaatctaatagagtggtacagcactgttatttttcaaagatgtgttgctatcctgaaaattctgtaggttctgtggaagttccagtgttctctcttattccacttcggtagaggatttctagtttcttgtgggctaattaaataaatcattaatactcttctaatggtctttgaataaagcctgagtaggaagtctaga

SEQ ID NO: 219 - RNA, 118 nt, Homo sapiens
  source 1..118: mol_type = other RNA
gctgccttctgcggggcttgccttctggccatgcccttcttctctcccttgcacctgtacctcttggtctttgaataaagcctgagtaggaaggcggccgctcgagcatgcatctaga

SEQ ID NO: 220 - RNA, 908 nt, Homo sapiens
  source 1..908: mol_type = other RNA
gccaagccctccccatcccatgtatttatctctatttaatatttatgtctatttaagcctcatatttaaagacagggaagagcagaacggagccccaggcctctgtgtccttccctgcatttctgagtttcattctcctgcctgtagcagtgagaaaaagctcctgtcctcccatcccctggactgggaggtagataggtaaataccaagtatttattactatgactgctccccagccctggctctgcaatgggcactgggatgagccgctgtgagcccctggtcctgagggtccccacctgggacccttgagagtatcaggtctcccacgtgggagacaagaaatccctgtttaatatttaaacagcagtgttccccatctgggtccttgcacccctcactctggcctcagccgactgcacagcggcccctgcatccccttggctgtgaggcccctggacaagcagaggtggccagagctgggaggcatggccctggggtcccacgaatttgctggggaatctcgtttttcttcttaagacttttgggacatggtttgactcccgaacatcaccgacgcgtctcctgtttttctgggtggcctcgggacacctgccctgcccccacgagggtcaggactgtgactctttttagggccaggcaggtgcctggacatttgccttgctggacggggactggggatgtgggagggagcagacaggaggaatcatgtcaggcctgtgtgtgaaaggaagctccactgtcaccctccacctcttcaccccccactcaccagtgtcccctccactgtcacattgtaactgaacttcaggataataaagtgtttgcctccatggtctttgaataaagcctgagtaggaaggcggccgctcgagcatgcatctaga

SEQ ID NO: 221 - RNA, 835 nt, Homo sapiens
  source 1..835: mol_type = other RNA
actcaatctaaattaaaaaagaaagaaatttgaaaaaactttctctttgccatttcttcttcttcttttttaactgaaagctgaatccttccatttcttctgcacatctacttgcttaaattgtgggcaaaagagaaaaagaaggattgatcagagcattgtgcaatacagtttcattaactccttcccccgctcccccaaaaatttgaatttttttttcaacactcttacacctgttatggaaaatgtcaacctttgtaagaaaaccaaaataaaaattgaaaaataaaaaccataaacatttgcaccacttgtggcttttgaatatcttccacagagggaagtttaaaacccaaacttccaaaggtttaaactacctcaaaacactttcccatgagtgtgatccacattgttaggtgctgacctagacagagatgaactgaggtccttgttttgttttgttcataatacaaaggtgctaattaatagtatttcagatacttgaagaatgttgatggtgctagaagaatttgagaagaaatactcctgtattgagttgtatcgtgtggtgtattttttaaaaaatttgatttagcattcatattttccatcttattcccaattaaaagtatgcagattatttgcccaaatcttcttcagattcagcatttgttctttgccagtctcattttcatcttcttccatggttccacagaagctttgtttcttgggcaagcagaaaaattaaattgtacctattttgtatatgtgagatgtttaaataaattgtgaaaaaaatgaaataaagcatgtttggttttccaaaagaacatat

SEQ ID NO: 222 - RNA, 297 nt, Homo sapiens
  source 1..297: mol_type = other RNA
cgccgccgcccgggccccgcagtcgagggtcgtgagcccaccccgtccatggtgctaagcgggcccgggtcccacacggccagcaccgctgctcactcggacgacgccctgggcctgcacctctccagctcctcccacggggtccccgtagccccggcccccgcccagccccaggtctccccaggccctccgcaggctgcccggcctccctccccctgcagccatcccaaggctcctgacctacctggcccctgagctctggagcaagccctgacccaataaaggctttgaacccat

SEQ ID NO: 223 - RNA, 602 nt, Homo sapiens
  source 1..602: mol_type = other RNA
ggggctagagccctctccgcacagcgtggagacggggcaaggaggggggttattaggattggtggttttgttttgctttgtttaaagccgtgggaaaatggcacaactttacctctgtgggagatgcaacactgagagccaaggggtgggagttgggataatttttatataaaagaagtttttccactttgaattgctaaaagtggcatttttcctatgtgcagtcactcctctcatttctaaaatagggacgtggccaggcacggtggctcatgcctgtaatcccagcactttgggaggccgaggcaggcggctcacgaggtcaggagatcgagactatcctggctaacacggtaaaaccctgtctctactaaaagtacaaaaaattagctgggcgtggtggtgggcacctgtagtcccagctactcgggaggctgaggcaggagaaaggcatgaatccaagaggcagagcttgcagtgagctgagatcacgccattgcactccagcctgggcaacagtgttaagactctgtctcaaatataaataaataaataaataaataaataaataaataaaaataaagcgagatgttgccctcaaa

SEQ ID NO: 224 - RNA, 785 nt, Homo sapiens
  source 1..785: mol_type = other RNA
ggccctgccccgtcggactgcccccagaaagcctcctgccccctgccagtgaagtccttcagtgagcccctccccagccagcccttccctggccccgccggatgtataaatgtaaaaatgaaggaattacattttatatgtgagcgagcaagccggcaagcgagcacagtattatttctccatcccctccctgcctgctccttggcacccccatgctgccttcagggagacaggcagggagggcttggggctgcacctcctaccctcccaccagaacgcaccccactgggagagctggtggtgcagccttcccctccctgtataagacactttgccaaggctctcccctctcgccccatccctgcttgcccgctcccacagcttcctgagggctaattctgggaagggagagttctttgctgcccctgtctggaagacgtggctctgggtgaggtaggcgggaaaggatggagtgttttagttcttgggggaggccaccccaaaccccagccccaactccaggggcacctatgagatggccatgctcaacccccctcccagacaggccctccctgtctccagggcccccaccgaggttcccagggctggagacttcctctggtaaacattcctccagcctcccctcccctggggacgccaaggaggtgggccacacccaggaagggaaagcgggcagccccgttttggggacgtgaacgttttaataatttttgctgaattcctttacaactaaataacacagatattgttataaataaaattgt

SEQ ID NO: 225 - RNA, 3001 nt, Homo sapiens
  source 1..3001: mol_type = other RNA
atattaaggatcaagctgttagctaataatgccacctctgcagttttgggaacaggcaaataaagtatcagtatacatggtgatgtacatctgtagcaaagctcttggagaaaatgaagactgaagaaagcaaagcaaaaactgtatagagagatttttcaaaagcagtaatccctcaattttaaaaaaggattgaaaattctaaatgtctttctgtgcatattttttgtgttaggaatcaaaagtattttataaaaggagaaagaacagcctcattttagatgtagtcctgttggattttttatgcctcctcagtaaccagaaatgttttaaaaaactaagtgtttaggatttcaagacaacattatacatggctctgaaatatctgacacaatgtaaacattgcaggcacctgcattttatgttttttttttcaacaaatgtgactaatttgaaacttttatgaacttctgagctgtccccttgcaattcaaccgcagtttgaattaatcatatcaaatcagttttaattttttaaattgtacttcagagtctatatttcaagggcacattttctcactactattttaatacattaaaggactaaataatctttcagagatgctggaaacaaatcatttgctttatatgtttcattagaataccaatgaaacatacaacttgaaaattagtaatagtatttttgaagatcccatttctaattggagatctctttaatttcgatcaacttataatgtgtagtactatattaagtgcacttgagtggaattcaacatttgactaataaaatgagttcatcatgttggcaagtgatgtggcaattatctctggtgacaaaagagtaaaatcaaatatttctgcctgttacaaatatcaaggaagacctgctactatgaaatagatgacattaatctgtcttcactgtttataatacggatggattttttttcaaatcagtgtgtgttttgaggtcttatgtaattgatgacatttgagagaaatggtggctttttttagctacctctttgttcatttaagcaccagtaaagatcatgtctttttatagaagtgtagattttctttgtgactttgctatcgtgcctaaagctctaaatataggtgaatgtgtgatgaatactcagattatttgtctctctatataattagtttggtactaagtttctcaaaaaattattaacacatgaaagacaatctctaaaccagaaaaagaagtagtacaaattttgttactgtaatgctcgcgtttagtgagtttaaaacacacagtatcttttggttttataatcagtttctattttgctgtgcctgagattaagatctgtgtatgtgtgtgtgtgtgtgtgtgcgtttgtgtgttaaagcagaaaagacttttttaaaagttttaagtgataaatgcaatttgttaattgatcttagatcactagtaaactcagggctgaattataccatgtatattctattagaagaaagtaaacaccatctttattcctgccctttttcttctctcaaagtagttgtagttatatctagaaagaagcaattttgatttcttgaaaaggtagttcctgcactcagtttaaactaaaaataatcatacttggattttatttatttttgtcatagtaaaaattttaatttatatatatttttatttagtattatcttattctttgctatttgccaatcctttgtcatcaattgtgttaaatgaattgaaaattcatgccctgttcattttattttactttattggttaggatatttaaaggatttttgtatatataatttcttaaattaatattccaaaaggttagtggacttagattataaattatggcaaaaatctaaaaacaacaaaaatgatttttatacattctatttcattattcctctttttccaataagtcatacaattggtagatatgacttattttatttttgtattattcactatatctttatgatatttaagtataaataattaaaaaaatttattgtaccttatagtctgtcaccaaaaaaaaaaaattatctgtaggtagtgaaatgctaatgttgatttgtctttaagggcttgttaactatcctttattttctcatttgtcttaaattaggagtttgtgtttaaattactcatctaagcaaaaaatgtatataaatcccattactgggtatatacccaaaggattataaatcatgctgctataaagacacatgcacacgtatgtttattgcagcactattcacaatagcaaagacttggaaccaacccaaatgtccatcaatgatagacttgattaagaaaatgtgcacatatacaccatggaatactatgcagccataaaaaaggatgagttcatgtcctttgtagggacatggataaagctggaaaccatcattctgagcaaactattgcaaggacagaaaaccaaacactgcatgttctcactcataggtgggaattgaacaatgagaacacttggacacaaggtggggaacaccacacaccagggcctgtcatggggtggggggagtggggagggatagcattaggagatatacctaatgtaaatgatgagttaatgggtgcagcacaccaacatggcacatgtatacatatgtagcaaacctgcacgttgtgcacatgtaccctagaacttaaagtataattaaaaaaaaaaagaaaacagaagctatttataaagaagttatttgctgaaataaatgtgatctttcccattaaaaaaataaagaaattttggggtaaaaaaacacaatatattgtattcttgaaaaattctaagagagtggatgtgaagtgttctcaccacaaaagtgataactaattgaggtaatgcacatattaattagaaagattttgtcattccacaatgtatatatacttaaaaatatgttatacacaataaatacatacattaaaaaataagtaaatgta

SEQ ID NO: 226 - RNA, 1037 nt, Homo sapiens
  source 1..1037: mol_type = other RNA
cccaccctgcacgccggcaccaaaccctgtcctcccacccctccccactcatcactaaacagagtaaaatgtgatgcgaattttcccgaccaacctgattcgctagattttttttaaggaaaagcttggaaagccaggacacaacgctgctgcctgctttgtgcagggtcctccggggctcagccctgagttggcatcacctgcgcagggccctctggggctcagccctgagctagtgtcacctgcacagggccctctgaggctcagccctgagctggcgtcacctgtgcagggccctctggggctcagccctgagctggcctcacctgggttccccaccccgggctctcctgccctgccctcctgcccgccctccctcctgcctgcgcagctccttccctaggcacctctgtgctgcatcccaccagcctgagcaagacgccctctcggggcctgtgccgcactagcctccctctcctctgtccccatagctggtttttcccaccaatcctcacctaacagttactttacaattaaactcaaagcaagctcttctcctcagcttggggcagccattggcctctgtctcgttttgggaaaccaaggtcaggaggccgttgcagacataaatctcggcgactcggccccgtctcctgagggtcctgctggtgaccggcctggaccttggccctacagccctggaggccgctgctgaccagcactgaccccgacctcagagagtactcgcaggggcgctggctgcactcaagaccctcgagattaacggtgctaaccccgtctgctcctccctcccgcagagactggggcctggactggacatgagagccccttggtgccacagagggctgtgtcttactagaaacaacgcaaacctctccttcctcagaatagtgatgtgttcgacgttttatcaaaggccccctttctatgttcatgttagttttgctccttctgtgtttttttctgaaccatatccatgttgctgacttttccaaataaaggttttcactcctctc

SEQ ID NO: 227 - RNA, 577 nt, Homo sapiens
  source 1..577: mol_type = other RNA
agaggcctgcctccagggctggactgaggcctgagcgctcctgccgcagagctggccgcgccaaataatgtctctgtgagactcgagaactttcatttttttccaggctggttcggatttggggtggattttggttttgttcccctcctccactctcccccaccccctccccgcccttttttttttttttttttaaactggtattttatctttgattctccttcagccctcacccctggttctcatctttcttgatcaacatcttttcttgcctctgtccccttctctcatctcttagctcccctccaacctggggggcagtggtgtggagaagccacaggcctgagatttcatctgctctccttcctggagcccagaggagggcagcagaagggggtggtgtctccaaccccccagcactgaggaagaacggggctcttctcatttcacccctccctttctcccctgcccccaggactgggccacttctgggtggggcagtgggtcccagattggctcacactgagaatgtaagaactacaaacaaaatttctattaaattaaattttgtgtctcc

SEQ ID NO: 228 - RNA, 2212 nt, Homo sapiens
  source 1..2212: mol_type = other RNA
ctccctccatcccaacctggctccctcccacccaaccaactttccccccaacccggaaacagacaagcaacccaaactgaaccccctcaaaagccaaaaaatgggagacaatttcacatggactttggaaaatatttttttcctttgcattcatctctcaaacttagtttttatctttgaccaaccgaacatgaccaaaaaccaaaagtgcattcaaccttaccaaaaaaaaaaaaaaaaaaagaataaataaataactttttaaaaaaggaagcttggtccacttgcttgaagacccatgcgggggtaagtccctttctgcccgttgggcttatgaaaccccaatgctgccctttctgctcctttctccacaccccccttggggcctcccctccactccttcccaaatctgtctccccagaagacacaggaaacaatgtattgtctgcccagcaatcaaaggcaatgctcaaacacccaagtggcccccaccctcagcccgctcctgcccgcccagcacccccaggccctgggggacctggggttctcagactgccaaagaagccttgccatctggcgctcccatggctcttgcaacatctccccttcgtttttgagggggtcatgccgggggagccaccagcccctcactgggttcggaggagagtcaggaagggccacgacaaagcagaaacatcggatttggggaacgcgtgtcaatcccttgtgccgcagggctgggcgggagagactgttctgttccttgtgtaactgtgttgctgaaagactacctcgttcttgtcttgatgtgtcaccggggcaactgcctgggggcggggatgggggcagggtggaagcggctccccattttataccaaaggtgctacatctatgtgatgggtggggtggggagggaatcactggtgctatagaaattgagatgcccccccaggccagcaaatgttcctttttgttcaaagtctatttttattccttgatatttttctttttttttttttttttttgtggatggggacttgtgaatttttctaaaggtgctatttaacatgggaggagagcgtgtgcggctccagcccagcccgctgctcactttccaccctctctccacctgcctctggcttctcaggcctctgctctccgacctctctcctctgaaaccctcctccacagctgcagcccatcctcccggctccctcctagtctgtcctgcgtcctctgtccccgggtttcagagacaacttcccaaagcacaaagcagtttttccccctaggggtgggaggaagcaaaagactctgtacctattttgtatgtgtataataatttgagatgtttttaattattttgattgctggaataaagcatgtggaaatgacccaaacataatccgcagtggcctcctaatttccttctttggagttgggggaggggtagacatggggaaggggctttggggtgatgggcttgccttccattcctgccctttccctccccactattctcttctagatccctccataaccccactcccctttctctcacccttcttataccgcaaacctttctacttcctctttcattttctattcttgcaatttccttgcaccttttccaaatcctcttctcccctgcaataccatacaggcaatccacgtgcacaacacacacacacactcttcacatctggggttgtccaaacctcatacccactccccttcaagcccatccactctccaccccctggatgccctgcacttggtggcggtgggatgctcatggatactgggagggtgaggggagtggaacccgtgaggaggacctgggggcctctccttgaactgacatgaagggtcatctggcctctgctcccttctcacccacgctgacctcctgccgaaggagcaacgcaacaggagaggggtctgctgagcctggcgagggtctgggagggaccaggaggaaggcgtgctccctgctcgctgtcctggccctgggggagtgagggagacagacacctgggagagctgtggggaaggcactcgcaccgtgctcttgggaaggaaggagacctggccctgctcaccacggactgggtgcctcgacctcctgaatccccagaacacaacccccctgggctggggtggtctggggaaccatcgtgcccccgcctcccgcctactcctttttaagctt

SEQ ID NO: 229 - RNA, 729 nt, Homo sapiens
  source 1..729: mol_type = other RNA
ttggccaggcctgaccctcttggacctttcttctttgccgacaaccactgcccagcagcctctgggacctcggggtcccagggaacccagtccagcctcctggctgttgacttcccattgctcttggagccaccaatcaaagagattcaaagagattcctgcaggccagaggcggaacacacctttatggctggggctctccgtggtgttctggacccagcccctggagacaccattcacttttactgctttgtagtgactcgtgctctccaacctgtcttcctgaaaaaccaaggcccccttcccccacctcttccatggggtgagacttgagcagaacaggggcttccccaagttgcccagaaagactgtctgggtgagaagccatggccagagcttctcccaggcacaggtgttgcaccagggacttctgcttcaagttttggggtaaagacacctggatcagactccaagggctgccctgagtctgggacttctgcctccatggctggtcatgagagcaaaccgtagtcccctggagacagcgactccagagaacctcttgggagacagaagaggcatctgtgcacagctcgatcttctacttgcctgtggggaggggagtgacaggtccacacaccacactgggtcaccctgtcctggatgcctctgaagagagggacagaccgtcagaaactggagagtttctattaaaggtcatttaaacca

SEQ ID NO: 230 - RNA, 847 nt, Homo sapiens
  source 1..847: mol_type = other RNA
tcctccgggaccccagccctcaggattcctgatgctccaaggcgactgatgggcgctggatgaagtggcacagtcagcttccctgggggctggtgtcatgttgggctcctggggcgggggcacggcctggcatttcacgcattgctgccaccccaggtccacctgtctccactttcacagcctccaagtctgtggctcttcccttctgtcctccgaggggcttgccttctctcgtgtccagtgaggtgctcagtgatcggcttaacttagagaagcccgccccctccccttctccgtctgtcccaagagggtctgctctgagcctgcgttcctaggtggctcggcctcagctgcctgggttgtggccgccctagcatcctgtatgcccacagctactggaatccccgctgctgctccgggccaagcttctggttgattaatgagggcatggggtggtccctcaagaccttcccctaccttttgtggaaccagtgatgcctcaaagacagtgtcccctccacagctgggtgccaggggcaggggatcctcagtatagccggtgaaccctgataccaggagcctgggcctccctgaacccctggcttccagccatctcatcgccagcctcctcctggacctcttggcccccagccccttccccacacagccccagaagggtcccagagctgaccccactccaggacctaggcccagcccctcagcctcatctggagcccctgaagaccagtcccacccacctttctggcctcatctgacactgctccgcatcctgctgtgtgtcctgttccatgttccggttccatccaaatacactttctggaacaaa

SEQ ID NO: 231 - RNA, 110 nt, Homo sapiens
  source 1..110: mol_type = other RNA
gctggagcctcggtggccatgcttcttgccccttgggcctccccccagcccctcctccccttcctgcacccgtacccccgtggtctttgaataaagtctgagtgggcggc

SEQ ID NO: 232 - RNA, 116 nt, Homo sapiens
  source 1..116: mol_type = other RNA
taataggctggagcctcggtggccatgcttcttgccccttgggcctccccccagcccctcctccccttcctgcacccgtacccccgtggtctttgaataaagtctgagtgggcggc

SEQ ID NO: 233 - DNA, 18 bp, Homo sapiens
  source 1..18: mol_type = other DNA
attgggcacccgtaaggg

SEQ ID NO: 234 - protein, 20 aa, Homo sapiens
METPAQLLFLLLLWLPDTTG

SEQ ID NO: 235 - protein, 471 aa, Homo sapiens
METPAQLLFLLLLWLPDTTGQVQLVESGGGVVQPGRSLRLSCAASGFTFSSYGMHWVRQAPGKGLEWVAVIWYDGSNKYYADSVKGRFTISRDNSKNTLYLQMNSLRAEDTAVYYCARDPRGATLYYYYYGMDVWGQGTTVTVSSASTKGPSVFPLAPCSRSTSESTAALGCLVKDYFPEPVTVSWNSGALTSGVHTFPAVLQSSGLYSLSSVVTVPSSNFGTQTYTCNVDHKPSNTKVDKTVERKCCVECPPCPAPPVAGPSVFLFPPKPKDTLMISRTPEVTCVVVDVSHEDPEVQFNWYVDGVEVHNAKTKPREEQFNSTFRVVSVLTVVHQDWLNGKEYKCKVSNKGLPAPIEKTISKTKGQPREPQVYTLPPSREEMTKNQVSLTCLVKGFYPSDIAVEWESNGQPENNYKTTPPMLDSDGSFFLYSKLTVDKSRWQQGNVFSCSVMHEALHNHYTQKSLSLSPGK

SEQ ID NO: 236 - protein, 234 aa, Homo sapiens
METPAQLLFLLLLWLPDTTGDIQMTQSPSSLSASVGDRVTITCRASQSINSYLDWYQQKPGKAPKLLIYAASSLQSGVPSRFSGSGSGTDFTLTISSLQPEDFATYYCQQYYSTPFTFGPGTKVEIKRTVAAPSVFIFPPSDEQLKSGTASVVCLLNNFYPREAKVQWKVDNALQSGNSQESVTEQDSKDSTYSLSSTLTLSKADYEKHKVYACEVTHQGLSSPVTKSFNRGEC

SEQ ID NO: 237 - DNA, 325 bp, Homo sapiens
  source 1..325: mol_type = other DNA
gaaattgtgttgacgcagtctccaggcaccctgtctttgtctccaggggaaagagccaccctctcctgcagggccagtcagagtgttagcagcagcttcttagcctggtaccagcagaaacctggccaggctcccaggctcctcatctatggtgcatccagcagggccactggcatcccagacaggttcagtggcagtgggtctgggacagacttcactctcaccatcagcagactggagcctgaagattttgcagtgtattactgtcagcagtatggtagctcaccgtggacgttcggccaagggaccaaggtggaaatcaaac

SEQ ID NO: 238 - protein, 108 aa, Homo sapiens
EIVLTQSPGTLSLSPGERATLSCRASQSVSSSFLAWYQQKPGQAPRLLIYGASSRATGIPDRFSGSGSGTDFTLTISRLEPEDFAVYYCQQYGSSPWTFGQGTKVEIK

SEQ ID NO: 239 - DNA, 355 bp, Homo sapiens
  source 1..355: mol_type = other DNA
caggtgcagctggtggagtctgggggaggcgtggtccagcctgggaggtccctgagactctcctgtgcagcctctggattcaccttcagtagctatactatgcactgggtccgccaggctccaggcaaggggctggagtgggtgacatttatatcatatgatggaagcaataaacactacgcagactccgtgaagggccgattcaccgtctccagagacaattccaagaacacgctgtatctgcaaatgaacagcctgagagctgaggacacggctatatattactgtgcgaggaccggctggctggggccctttgactactggggccagggaaccctggtcaccgtctcctcag

SEQ ID NO: 240 - protein, 118 aa, Homo sapiens
QVQLVESGGGVVQPGRSLRLSCAASGFTFSSYTMHWVRQAPGKGLEWVTFISYDGSNKHYADSVKGRFTVSRDNSKNTLYLQMNSLRAEDTAIYYCARTGWLGPFDYWGQGTLVTVSS

SEQ ID NO: 241 - DNA, 322 bp, Homo sapiens
  source 1..322: mol_type = other DNA
gacatccagatgacccagtctccatcctcactgtctgcatctgtaggagacagagtcaccatcacttgtcgggcgagtcagggtattagcagctggttagcctggtatcagcagaaaccagagaaagcccctaagtccctgatctatgctgcatccagtttgcaaagtggggtcccatcaaggttcagcggcagtggatctgggacagatttcactctcaccatcagcagcctgcagcctgaagattttgcaacttattactgccaacagtataatagttaccctccgacgttcggccaagggaccaaggtggaaatcaaac

SEQ ID NO: 242 - protein, 107 aa, Homo sapiens
DIQMTQSPSSLSASVGDRVTITCRASQGISSWLAWYQQKPEKAPKSLIYAASSLQSGVPSRFSGSGSGTDFTLTISSLQPEDFATYYCQQYNSYPPTFGQGTKVEIK

SEQ ID NO: 243 - DNA, 358 bp, Homo sapiens
  source 1..358: mol_type = other DNA
caggtgcagctggtggagtctgggggaggcgtggtccagcctgggaggtccctgagactctcctgtgcagcgtctggattcaccttcagtagctatggcatgcactgggtccgccaggctccaggcaaggggctggagtgggtggcagttatatggtatgatggaagtaataaatactatgcagactccgtgaagggccgattcaccatctccagagacaattccaagaacacgctgtatctgcaaatgaacagcctgagagccgaggacacggctgtgttttactgtgcgagagctcccaattatattggtgcttttgatgtctggggccaagggacaatggtcaccgtctcttcag

SEQ ID NO: 244 - protein, 119 aa, Homo sapiens
QVQLVESGGGVVQPGRSLRLSCAASGFTFSSYGMHWVRQAPGKGLEWVAVIWYDGSNKYYADSVKGRFTISRDNSKNTLYLQMNSLRAEDTAVFYCARAPNYIGAFDVWGQGTMVTVSS

SEQ ID NO: 245 - protein, 12 aa, Homo sapiens
RASQSVSSSFLA

SEQ ID NO: 246 - protein, 7 aa, Homo sapiens
GASSRAT

SEQ ID NO: 247 - protein, 9 aa, Homo sapiens
QQYGSSPWT

SEQ ID NO: 248 - protein, 5 aa, Homo sapiens
SYTMH

SEQ ID NO: 249 - protein, 17 aa, Homo sapiens
FISYDGSNKHYADSVKG

SEQ ID NO: 250 - protein, 9 aa, Homo sapiens
TGWLGPFDY

SEQ ID NO: 251 - DNA, 1637 bp, Homo sapiens
  source 1..1637: mol_type = other DNA
tcaagcttttggaccctcgtacagaagctaatacgactcactatagggaaataagagagaaaagaagagtaagaagaaatataagagccaccatggagacccccgcccagctgctgtttctgctgctgctgtggctgcccgacaccaccggccaggtgcagctggtggagagcggcggcggcgtggtgcagcccggcagaagcctgagactgagctgcgccgccagcggctttaccttcagcagctacaccatgcactgggtgcggcaggcccctggcaagggactggagtgggtgaccttcataagctacgacggcaataacaagtattacgccgacagcgtgaagggcagattcaccatcagcagagacaacagcaagaataccctgtacctgcagatgaatagcctgagagccgaggacaccgccatctactactgcgccagaacaggctggctgggcccattcgactactggggccagggcacactggtgacagtctccagcgctagcactaagggtcccagcgtgttccccctggccccgagcagcaaaagcaccagcggcggcaccgccgccctgggctgcctggtcaaggactacttccccgagcccgtgaccgtgtcttggaactccggggccctgaccagcggggtacacaccttccccgccgtgctgcagagcagcggcctgtattccctgagctccgtggtgaccgtccctagctccagcctgggcacccagacctacatctgcaacgtgaaccacaagccctccaacaccaaagtggacaagcgcgtggagcccaagagttgcgacaaaacccacacctgtcctccctgcccggctcctgagctgttgggcggacccagcgtcttcctgttccccccaaagcccaaggacaccctgatgatcagccggacccccgaggtgacttgcgtggtggtcgacgtgagccacgaggacccagaggtgaagttcaactggtacgtggacggcgtcgaggtgcacaacgccaagaccaagcctagagaggagcagtacaacagcacctacagggtggtgagcgtgctgaccgtgctgcatcaggactggctgaacggcaaagagtacaagtgcaaggtgtcaaataaggccctgcccgcacccattgagaagactatcagcaaggccaagggccagcccagagagccacaggtgtacaccctgccccccagcagagaggagatgaccaagaaccaggtgagcctcacctgcctggtcaagggcttttaccccagcgacatcgccgttgagtgggagagcaatggccagcccgagaacaactacaagaccacccccccggtgctggactccgacggcagctttttcctgtacagcaagctgaccgtggacaagagcagatggcagcagggcaacgtgttcagctgcagcgtgatgcacgaggccctgcacaaccactacacccagaagtctctgagcctgagccccggcaagtgataataggctggagcctcggtggccatgcttcttgccccttgggcctccccccagcccctcctccccttcctgcacccgtaccccccaaacaccattgtcacactccagtggtctttgaataaagtctgagtgggcggc

SEQ ID NO: 252 - protein, 468 aa, Homo sapiens
METPAQLLFLLLLWLPDTTGQVQLVESGGGVVQPGRSLRLSCAASGFTFSSYTMHWVRQAPGKGLEWVTFISYDGNNKYYADSVKGRFTISRDNSKNTLYLQMNSLRAEDTAIYYCARTGWLGPFDYWGQGTLVTVSSASTKGPSVFPLAPSSKSTSGGTAALGCLVKDYFPEPVTVSWNSGALTSGVHTFPAVLQSSGLYSLSSVVTVPSSSLGTQTYICNVNHKPSNTKVDKRVEPKSCDKTHTCPPCPAPELLGGPSVFLFPPKPKDTLMISRTPEVTCVVVDVSHEDPEVKFNWYVDGVEVHNAKTKPREEQYNSTYRVVSVLTVLHQDWLNGKEYKCKVSNKALPAPIEKTISKAKGQPREPQVYTLPPSREEMTKNQVSLTCLVKGFYPSDIAVEWESNGQPENNYKTTPPVLDSDGSFFLYSKLTVDKSRWQQGNVFSCSVMHEALHNHYTQKSLSLSPGK

SEQ ID NO: 253 - DNA, 1404 bp, Homo sapiens
  source 1..1404: mol_type = other DNA
atggagacccccgcccagctgctgtttctgctgctgctgtggctgcccgacaccaccggccaggtgcagctggtggagagcggcggcggcgtggtgcagcccggcagaagcctgagactgagctgcgccgccagcggctttaccttcagcagctacaccatgcactgggtgcggcaggcccctggcaagggactggagtgggtgaccttcataagctacgacggcaataacaagtattacgccgacagcgtgaagggcagattcaccatcagcagagacaacagcaagaataccctgtacctgcagatgaatagcctgagagccgaggacaccgccatctactactgcgccagaacaggctggctgggcccattcgactactggggccagggcacactggtgacagtctccagcgctagcactaagggtcccagcgtgttccccctggccccgagcagcaaaagcaccagcggcggcaccgccgccctgggctgcctggtcaaggactacttccccgagcccgtgaccgtgtcttggaactccggggccctgaccagcggggtacacaccttccccgccgtgctgcagagcagcggcctgtattccctgagctccgtggtgaccgtccctagctccagcctgggcacccagacctacatctgcaacgtgaaccacaagccctccaacaccaaagtggacaagcgcgtggagcccaagagttgcgacaaaacccacacctgtcctccctgcccggctcctgagctgttgggcggacccagcgtcttcctgttccccccaaagcccaaggacaccctgatgatcagccggacccccgaggtgacttgcgtggtggtcgacgtgagccacgaggacccagaggtgaagttcaactggtacgtggacggcgtcgaggtgcacaacgccaagaccaagcctagagaggagcagtacaacagcacctacagggtggtgagcgtgctgaccgtgctgcatcaggactggctgaacggcaaagagtacaagtgcaaggtgtcaaataaggccctgcccgcacccattgagaagactatcagcaaggccaagggccagcccagagagccacaggtgtacaccctgccccccagcagagaggagatgaccaagaaccaggtgagcctcacctgcctggtcaagggcttttaccccagcgacatcgccgttgagtgggagagcaatggccagcccgagaacaactacaagaccacccccccggtgctggactccgacggcagctttttcctgtacagcaagctgaccgtggacaagagcagatggcagcagggcaacgtgttcagctgcagcgtgatgcacgaggccctgcacaaccactacacccagaagtctctgagcctgagccccggcaag

SEQ ID NO: 254 - DNA, 1696 bp, Homo sapiens
  source 1..1696: mol_type = other DNA
ggaaataagagagaaaagaagagtaagaagaaatataagagccaccatggagacccccgcccagctgctgtttctgctgctgctgtggctgcccgacaccaccggccaggtgcagctggtggagagcggcggcggcgtggtgcagcccggcagaagcctgagactgagctgcgccgccagcggctttaccttcagcagctacaccatgcactgggtgcggcaggcccctggcaagggactggagtgggtgaccttcataagctacgacggcaataacaagtattacgccgacagcgtgaagggcagattcaccatcagcagagacaacagcaagaataccctgtacctgcagatgaatagcctgagagccgaggacaccgccatctactactgcgccagaacaggctggctgggcccattcgactactggggccagggcacactggtgacagtctccagcgctagcactaagggtcccagcgtgttccccctggccccgagcagcaaaagcaccagcggcggcaccgccgccctgggctgcctggtcaaggactacttccccgagcccgtgaccgtgtcttggaactccggggccctgaccagcggggtacacaccttccccgccgtgctgcagagcagcggcctgtattccctgagctccgtggtgaccgtccctagctccagcctgggcacccagacctacatctgcaacgtgaaccacaagccctccaacaccaaagtggacaagcgcgtggagcccaagagttgcgacaaaacccacacctgtcctccctgcccggctcctgagctgttgggcggacccagcgtcttcctgttccccccaaagcccaaggacaccctgatgatcagccggacccccgaggtgacttgcgtggtggtcgacgtgagccacgaggacccagaggtgaagttcaactggtacgtggacggcgtcgaggtgcacaacgccaagaccaagcctagagaggagcagtacaacagcacctacagggtggtgagcgtgctgaccgtgctgcatcaggactggctgaacggcaaagagtacaagtgcaaggtgtcaaataaggccctgcccgcacccattgagaagactatcagcaaggccaagggccagcccagagagccacaggtgtacaccctgccccccagcagagaggagatgaccaagaaccaggtgagcctcacctgcctggtcaagggcttttaccccagcgacatcgccgttgagtgggagagcaatggccagcccgagaacaactacaagaccacccccccggtgctggactccgacggcagctttttcctgtacagcaagctgaccgtggacaagagcagatggcagcagggcaacgtgttcagctgcagcgtgatgcacgaggccctgcacaaccactacacccagaagtctctgagcctgagccccggcaagtgataataggctggagcctcggtggccatgcttcttgccccttgggcctccccccagcccctcctccccttcctgcacccgtaccccccaaacaccattgtcacactccagtggtctttgaataaagtctgagtgggcggcaaaaaaaaaaaaaaaaaaaaaaaaaaaaaaaaaaaaaaaaaaaaaaaaaaaaaaaaaaaaaaaaaaaaaaaaaaaaaaaaaaaaaaaaaaaaaaaaaaaatctag

SEQ ID NO: 255 - protein, 448 aa, Homo sapiens
QVQLVESGGGVVQPGRSLRLSCAASGFTFSSYTMHWVRQAPGKGLEWVTFISYDGNNKYYADSVKGRFTISRDNSKNTLYLQMNSLRAEDTAIYYCARTGWLGPFDYWGQGTLVTVSSASTKGPSVFPLAPSSKSTSGGTAALGCLVKDYFPEPVTVSWNSGALTSGVHTFPAVLQSSGLYSLSSVVTVPSSSLGTQTYICNVNHKPSNTKVDKRVEPKSCDKTHTCPPCPAPELLGGPSVFLFPPKPKDTLMISRTPEVTCVVVDVSHEDPEVKFNWYVDGVEVHNAKTKPREEQYNSTYRVVSVLTVLHQDWLNGKEYKCKVSNKALPAPIEKTISKAKGQPREPQVYTLPPSREEMTKNQVSLTCLVKGFYPSDIAVEWESNGQPENNYKTTPPVLDSDGSFFLYSKLTVDKSRWQQGNVFSCSVMHEALHNHYTQKSLSLSPGK

SEQ ID NO: 256 - DNA, 1637 bp, Homo sapiens
  source 1..1637: mol_type = other DNA
tcaagcttttggaccctcgtacagaagctaatacgactcactatagggaaataagagagaaaagaagagtaagaagaaatataagagccaccatggagacccccgcacagctgctcttcctgctgctgctgtggctgcccgacaccaccggacaggtgcagctggtagagagcggcggcggcgtagtgcagcccggcagaagcctgaggctgtcctgcgccgccagtggctttaccttcagcagctacaccatgcactgggtgagacaggctccaggcaaaggcctggagtgggtgactttcatcagctatgacggaaacaacaagtactacgccgacagcgtgaagggcaggttcaccatctccagagacaactcgaaaaacaccctgtacctgcagatgaacagcctgagagccgaggataccgccatctactactgcgcccgcacaggctggctgggcccttttgactactggggccaaggcacactggttacagtgagcagcgcctcaaccaagggccccagtgtgttccccctggcaccctcgagcaagagcacctccggcggcaccgccgccctgggctgtctcgtgaaggactacttccccgagcccgtcaccgtgagctggaacagcggcgccctgacctcaggcgtgcacaccttccccgccgtgctccagtctagcggcctgtactccctgtcaagcgttgtgacagtgcccagcagcagcctgggcacccagacatacatctgcaatgtgaaccacaaaccctccaacaccaaggtggacaagagggtggagccaaagtcttgcgacaagacccacacctgccctccctgccccgcccccgagctgctgggcggccccagcgtgttcctgtttccccccaagcctaaggacacactgatgatcagcagaacccctgaggtgacctgtgtggtggtggacgtgagccacgaggaccccgaggtgaagtttaactggtacgtggacggcgtggaggtgcacaacgccaagaccaagcccagagaagagcagtacaacagcacctacagagtggtaagcgtgctgaccgtgctgcaccaggactggctgaacggcaaggagtacaagtgcaaggtgtccaataaggcccttcccgcccccatcgagaagaccatctccaaggccaagggccagcctagagagccccaagtgtacaccctgccccccagcagggaggagatgaccaagaatcaggtgagcctgacctgcctggtgaagggattttaccccagcgacatcgccgtggagtgggagagcaacggccagcccgagaacaactacaagaccaccccccccgtgctggacagcgacggctctttcttcctgtacagcaagctgaccgtggacaagtccaggtggcagcagggcaacgtgttcagctgcagcgtgatgcacgaggccctgcacaaccactacacccagaagagcttgtccctgagccccggcaagtgataataggctggagcctcggtggccatgcttcttgccccttgggcctccccccagcccctcctccccttcctgcacccgtaccccccaaacaccattgtcacactccagtggtctttgaataaagtctgagtgggcggc

SEQ ID NO: 257 - protein, 468 aa, Homo sapiens; identical to SEQ ID NO: 252

SEQ ID NO: 258 - DNA, 1404 bp, Homo sapiens
  source 1..1404: mol_type = other DNA
atggagacccccgcacagctgctcttcctgctgctgctgtggctgcccgacaccaccggacaggtgcagctggtagagagcggcggcggcgtagtgcagcccggcagaagcctgaggctgtcctgcgccgccagtggctttaccttcagcagctacaccatgcactgggtgagacaggctccaggcaaaggcctggagtgggtgactttcatcagctatgacggaaacaacaagtactacgccgacagcgtgaagggcaggttcaccatctccagagacaactcgaaaaacaccctgtacctgcagatgaacagcctgagagccgaggataccgccatctactactgcgcccgcacaggctggctgggcccttttgactactggggccaaggcacactggttacagtgagcagcgcctcaaccaagggccccagtgtgttccccctggcaccctcgagcaagagcacctccggcggcaccgccgccctgggctgtctcgtgaaggactacttccccgagcccgtcaccgtgagctggaacagcggcgccctgacctcaggcgtgcacaccttccccgccgtgctccagtctagcggcctgtactccctgtcaagcgttgtgacagtgcccagcagcagcctgggcacccagacatacatctgcaatgtgaaccacaaaccctccaacaccaaggtggacaagagggtggagccaaagtcttgcgacaagacccacacctgccctccctgccccgcccccgagctgctgggcggccccagcgtgttcctgtttccccccaagcctaaggacacactgatgatcagcagaacccctgaggtgacctgtgtggtggtggacgtgagccacgaggaccccgaggtgaagtttaactggtacgtggacggcgtggaggtgcacaacgccaagaccaagcccagagaagagcagtacaacagcacctacagagtggtaagcgtgctgaccgtgctgcaccaggactggctgaacggcaaggagtacaagtgcaaggtgtccaataaggcccttcccgcccccatcgagaagaccatctccaaggccaagggccagcctagagagccccaagtgtacaccctgccccccagcagggaggagatgaccaagaatcaggtgagcctgacctgcctggtgaagggattttaccccagcgacatcgccgtggagtgggagagcaacggccagcccgagaacaactacaagaccaccccccccgtgctggacagcgacggctctttcttcctgtacagcaagctgaccgtggacaagtccaggtggcagcagggcaacgtgttcagctgcagcgtgatgcacgaggccctgcacaaccactacacccagaagagcttgtccctgagccccggcaag

SEQ ID NO: 259 - DNA, 1696 bp, Homo sapiens
  source 1..1696: mol_type = other DNA
ggaaataagagagaaaagaagagtaagaagaaatataagagccaccatggagacccccgcacagctgctcttcctgctgctgctgtggctgcccgacaccaccggacaggtgcagctggtagagagcggcggcggcgtagtgcagcccggcagaagcctgaggctgtcctgcgccgccagtggctttaccttcagcagctacaccatgcactgggtgagacaggctccaggcaaaggcctggagtgggtgactttcatcagctatgacggaaacaacaagtactacgccgacagcgtgaagggcaggttcaccatctccagagacaactcgaaaaacaccctgtacctgcagatgaacagcctgagagccgaggataccgccatctactactgcgcccgcacaggctggctgggcccttttgactactggggccaaggcacactggttacagtgagcagcgcctcaaccaagggccccagtgtgttccccctggcaccctcgagcaagagcacctccggcggcaccgccgccctgggctgtctcgtgaaggactacttccccgagcccgtcaccgtgagctggaacagcggcgccctgacctcaggcgtgcacaccttccccgccgtgctccagtctagcggcctgtactccctgtcaagcgttgtgacagtgcccagcagcagcctgggcacccagacatacatctgcaatgtgaaccacaaaccctccaacaccaaggtggacaagagggtggagccaaagtcttgcgacaagacccacacctgccctccctgccccgcccccgagctgctgggcggccccagcgtgttcctgtttccccccaagcctaaggacacactgatgatcagcagaacccctgaggtgacctgtgtggtggtggacgtgagccacgaggaccccgaggtgaagtttaactggtacgtggacggcgtggaggtgcacaacgccaagaccaagcccagagaagagcagtacaacagcacctacagagtggtaagcgtgctgaccgtgctgcaccaggactggctgaacggcaaggagtacaagtgcaaggtgtccaataaggcccttcccgcccccatcgagaagaccatctccaaggccaagggccagcctagagagccccaagtgtacaccctgccccccagcagggaggagatgaccaagaatcaggtgagcctgacctgcctggtgaagggattttaccccagcgacatcgccgtggagtgggagagcaacggccagcccgagaacaactacaagaccaccccccccgtgctggacagcgacggctctttcttcctgtacagcaagctgaccgtggacaagtccaggtggcagcagggcaacgtgttcagctgcagcgtgatgcacgaggccctgcacaaccactacacccagaagagcttgtccctgagccccggcaagtgataataggctggagcctcggtggccatgcttcttgccccttgggcctccccccagcccctcctccccttcctgcacccgtaccccccaaacaccattgtcacactccagtggtctttgaataaagtctgagtgggcggcaaaaaaaaaaaaaaaaaaaaaaaaaaaaaaaaaaaaaaaaaaaaaaaaaaaaaaaaaaaaaaaaaaaaaaaaaaaaaaaaaaaaaaaaaaaaaaaaaaaatctag

SEQ ID NO: 260 - protein, 448 aa, Homo sapiens; identical to SEQ ID NO: 255

SEQ ID NO: 261 - DNA, 1637 bp, Homo sapiens
  source 1..1637: mol_type = other DNA
tcaagcttttggaccctcgtacagaagctaatacgactcactatagggaaataagagagaaaagaagagtaagaagaaatataagagccaccatggagacacccgcccagctgctcttcctgctgctgttgtggctgcccgacaccaccggacaggttcagctggtggaaagcggcggcggcgtggtgcagccaggcaggagcctgagactgtcctgcgccgcaagcggcttcaccttctccagctataccatgcactgggtgaggcaggcccccggcaaaggcctggagtgggtgacgttcatctcctacgacggtaacaataagtactacgccgacagcgtgaaaggcaggttcaccatcagcagagacaacagcaagaacactctgtacctgcagatgaactccctccgtgccgaggacaccgccatctactactgcgccaggaccggctggctgggccccttcgactactgggggcagggcaccctggtcaccgtgagtagcgccagcaccaagggacctagcgtgttccccctggcccccagcagcaagtccaccagcggcggcaccgccgccctggggtgcctggtgaaggactacttccccgaacccgtgaccgtgtcttggaacagcggggccctgacctccggcgtgcacaccttccccgccgtgctgcagagcagcggcctgtacagcctgagcagcgtggtgaccgtgcctagctctagcctcggcacccagacttacatctgcaacgtgaaccataagcccagcaacacaaaggtcgataagcgagtggagcccaagagctgcgacaagacccacacctgccccccctgccccgcccccgagctgctgggcggacccagcgtgttcctgttcccccctaaacccaaagacaccctgatgatcagcagaacccccgaggtgacctgtgtggtggtggacgtcagccacgaggaccccgaggtgaagttcaactggtacgtggacggcgttgaggtgcacaacgccaagaccaaacccagggaggagcagtacaatagcacctatagagtggtgagcgtgctgaccgtgctgcaccaggactggctgaatggcaaggagtacaagtgcaaggtgagcaacaaggccttacccgcccccatcgagaagaccatctccaaggccaagggccagcccagagagccccaggtgtacaccctgcctcccagcagagaggagatgactaagaaccaggtcagccttacctgcctggtgaagggcttttacccctcagacatcgccgtggaatgggagagcaacggccagcccgaaaataactacaagacaacccctcccgtgctggacagcgacgggagcttcttcttgtacagcaagctcaccgtggacaagagcagatggcagcagggcaacgtgttcagctgcagcgtgatgcatgaggccctgcacaaccactatacacagaagagcctgagcctgagccccggcaagtgataataggctggagcctcggtggccatgcttcttgccccttgggcctccccccagcccctcctccccttcctgcacccgtaccccccaaacaccattgtcacactccagtggtctttgaataaagtctgagtgggcggc

SEQ ID NO: 262 - protein, 468 aa, Homo sapiens; identical to SEQ ID NO: 252

SEQ ID NO: 263 - DNA, 1404 bp, Homo sapiens
  source 1..1404: mol_type = other DNA
atggagacacccgcccagctgctcttcctgctgctgttgtggctgcccgacaccaccggacaggttcagctggtggaaagcggcggcggcgtggtgcagccaggcaggagcctgagactgtcctgcgccgcaagcggcttcaccttctccagctataccatgcactgggtgaggcaggcccccggcaaaggcctggagtgggtgacgttcatctcctacgacggtaacaataagtactacgccgacagcgtgaaaggcaggttcaccatcagcagagacaacagcaagaacactctgtacctgcagatgaactccctccgtgccgaggacaccgccatctactactgcgccaggaccggctggctgggccccttcgactactgggggcagggcaccctggtcaccgtgagtagcgccagcaccaagggacctagcgtgttccccctggcccccagcagcaagtccaccagcggcggcaccgccgccctggggtgcctggtgaaggactacttccccgaacccgtgaccgtgtcttggaacagcggggccctgacctccggcgtgcacaccttccccgccgtgctgcagagcagcggcctgtacagcctgagcagcgtggtgaccgtgcctagctctagcctcggcacccagacttacatctgcaacgtgaaccataagcccagcaacacaaaggtcgataagcgagtggagcccaagagctgcgacaagacccacacctgccccccctgccccgcccccgagctgctgggcggacccagcgtgttcctgttcccccctaaacccaaagacaccctgatgatcagcagaacccccgaggtgacctgtgtggtggtggacgtcagccacgaggaccccgaggtgaagttcaactggtacgtggacggcgttgaggtgcacaacgccaagaccaaacccagggaggagcagtacaatagcacctatagagtggtgagcgtgctgaccgtgctgcaccaggactggctgaatggcaaggagtacaagtgcaaggtgagcaacaaggccttacccgcccccatcgagaagaccatctccaaggccaagggccagcccagagagccccaggtgtacaccctgcctcccagcagagaggagatgactaagaaccaggtcagccttacctgcctggtgaagggcttttacccctcagacatcgccgtggaatgggagagcaacggccagcccgaaaataactacaagacaacccctcccgtgctggacagcgacgggagcttcttcttgtacagcaagctcaccgtggacaagagcagatggcagcagggcaacgtgttcagctgcagcgtgatgcatgaggccctgcacaaccactatacacagaagagcctgagcctgagccccggcaag

SEQ ID NO: 264 - DNA, 1696 bp, Homo sapiens
  source 1..1696: mol_type = other DNA
ggaaataagagagaaaagaagagtaagaagaaatataagagccaccatggagacacccgcccagctgctcttcctgctgctgttgtggctgcccgacaccaccggacaggttcagctggtggaaagcggcggcggcgtggtgcagccaggcaggagcctgagactgtcctgcgccgcaagcggcttcaccttctccagctataccatgcactgggtgaggcaggcccccggcaaaggcctggagtgggtgacgttcatctcctacgacggtaacaataagtactacgccgacagcgtgaaaggcaggttcaccatcagcagagacaacagcaagaacactctgtacctgcagatgaactccctccgtgccgaggacaccgccatctactactgcgccaggaccggctggctgggccccttcgactactgggggcagggcaccctggtcaccgtgagtagcgccagcaccaagggacctagcgtgttccccctggcccccagcagcaagtccaccagcggcggcaccgccgccctggggtgcctggtgaaggactacttccccgaacccgtgaccgtgtcttggaacagcggggccctgacctccggcgtgcacaccttccccgccgtgctgcagagcagcggcctgtacagcctgagcagcgtggtgaccgtgcctagctctagcctcggcacccagacttacatctgcaacgtgaaccataagcccagcaacacaaaggtcgataagcgagtggagcccaagagctgcgacaagacccacacctgccccccctgccccgcccccgagctgctgggcggacccagcgtgttcctgttcccccctaaacccaaagacaccctgatgatcagcagaacccccgaggtgacctgtgtggtggtggacgtcagccacgaggaccccgaggtgaagttcaactggtacgtggacggcgttgaggtgcacaacgccaagaccaaacccagggaggagcagtacaatagcacctatagagtggtgagcgtgctgaccgtgctgcaccaggactggctgaatggcaaggagtacaagtgcaaggtgagcaacaaggccttacccgcccccatcgagaagaccatctccaaggccaagggccagcccagagagccccaggtgtacaccctgcctcccagcagagaggagatgactaagaaccaggtcagccttacctgcctggtgaagggcttttacccctcagacatcgccgtggaatgggagagcaacggccagcccgaaaataactacaagacaacccctcccgtgctggacagcgacgggagcttcttcttgtacagcaagctcaccgtggacaagagcagatggcagcagggcaacgtgttcagctgcagcgtgatgcatgaggccctgcacaaccactatacacagaagagcctgagcctgagccccggcaagtgataataggctggagcctcggtggccatgcttcttgccccttgggcctccccccagcccctcctccccttcctgcacccgtaccccccaaacaccattgtcacactccagtggtctttgaataaagtctgagtgggcggcaaaaaaaaaaaaaaaaaaaaaaaaaaaaaaaaaaaaaaaaaaaaaaaaaaaaaaaaaaaaaaaaaaaaaaaaaaaaaaaaaaaaaaaaaaaaaaaaaaaatctag

SEQ ID NO: 265 - protein, 448 aa, Homo sapiens; identical to SEQ ID NO: 255

SEQ ID NO: 266 - DNA, 938 bp, Homo sapiens
  source 1..938: mol_type = other DNA
tcaagcttttggaccctcgtacagaagctaatacgactcactatagggaaataagagagaaaagaagagtaagaagaaatataagagccaccatggagacccccgcccagctgctgttcctgctgctgctgtggctgcccgacaccactggcgagatcgtgctgacccagtctcccggcacactgtctctgtctcccggcgagcgcgcaactctgagctgcagggcgagccagagcgtgggcagcagctacctggcctggtaccagcagaagccaggccaggcccctaggctgctgatctacggcgccttctcccgggcgaccgggatccccgacagattcagcggcagcggctccggcaccgacttcaccctgacaatcagcagactggagcccgaggacttcgccgtgtactactgccagcagtacggcagcagcccctggacatttggccagggcactaaggtggagatcaagagaaccgtggccgcccccagcgtgttcatcttcccccccagcgatgagcagctgaagagcggcaccgcctccgtggtctgcctgctgaacaacttctaccccagagaggccaaggttcagtggaaggtggacaacgccctgcagagcggcaacagccaggagtctgtgactgaacaggacagcaaggacagcacatacagcctgagcagcaccctcaccctgtccaaggccgattacgagaagcacaaggtgtacgcctgcgaggtgacccaccaaggcctgagcagccccgtgaccaagagcttcaacagaggcgagtgctgataataggctggagcctcggtggccatgcttcttgccccttgggcctccccccagcccctcctccccttcctgcacccgtaccccccaaacaccattgtcacactccagtggtctttgaataaagtctgagtgggcggc

SEQ ID NO: 267 - protein, 235 aa, Homo sapiens
METPAQLLFLLLLWLPDTTGEIVLTQSPGTLSLSPGERATLSCRASQSVGSSYLAWYQQKPGQAPRLLIYGAFSRATGIPDRFSGSGSGTDFTLTISRLEPEDFAVYYCQQYGSSPWTFGQGTKVEIKRTVAAPSVFIFPPSDEQLKSGTASVVCLLNNFYPREAKVQWKVDNALQSGNSQESVTEQDSKDSTYSLSSTLTLSKADYEKHKVYACEVTHQGLSSPVTKSFNRGEC

SEQ ID NO: 268 - DNA, 705 bp, Homo sapiens
  source 1..705: mol_type = other DNA
atggagacccccgcccagctgctgttcctgctgctgctgtggctgcccgacaccactggcgagatcgtgctgacccagtctcccggcacactgtctctgtctcccggcgagcgcgcaactctgagctgcagggcgagccagagcgtgggcagcagctacctggcctggtaccagcagaagccaggccaggcccctaggctgctgatctacggcgccttctcccgggcgaccgggatccccgacagattcagcggcagcggctccggcaccgacttcaccctgacaatcagcagactggagcccgaggacttcgccgtgtactactgccagcagtacggcagcagcccctggacatttggccagggcactaaggtggagatcaagagaaccgtggccgcccccagcgtgttcatcttcccccccagcgatgagcagctgaagagcggcaccgcctccgtggtctgcctgctgaacaacttctaccccagagaggccaaggttcagtggaaggtggacaacgccctgcagagcggcaacagccaggagtctgtgactgaacaggacagcaaggacagcacatacagcctgagcagcaccctcaccctgtccaaggccgattacgagaagcacaaggtgtacgcctgcgaggtgacccaccaaggcctgagcagccccgtgaccaagagcttcaacagaggcgagtgc

SEQ ID NO: 269 - DNA, 997 bp, Homo sapiens
  source 1..997: mol_type = other DNA
ggaaataagagagaaaagaagagtaagaagaaatataagagccaccatggagacccccgcccagctgctgttcctgctgctgctgtggctgcccgacaccactggcgagatcgtgctgacccagtctcccggcacactgtctctgtctcccggcgagcgcgcaactctgagctgcagggcgagccagagcgtgggcagcagctacctggcctggtaccagcagaagccaggccaggcccctaggctgctgatctacggcgccttctcccgggcgaccgggatccccgacagattcagcggcagcggctccggcaccgacttcaccctgacaatcagcagactggagcccgaggacttcgccgtgtactactgccagcagtacggcagcagcccctggacatttggccagggcactaaggtggagatcaagagaaccgtggccgcccccagcgtgttcatcttcccccccagcgatgagcagctgaagagcggcaccgcctccgtggtctgcctgctgaacaacttctaccccagagaggccaaggttcagtggaaggtggacaacgccctgcagagcggcaacagccaggagtctgtgactgaacaggacagcaaggacagcacatacagcctgagcagcaccctcaccctgtccaaggccgattacgagaagcacaaggtgtacgcctgcgaggtgacccaccaaggcctgagcagccccgtgaccaagagcttcaacagaggcgagtgctgataataggctggagcctcggtggccatgcttcttgccccttgggcctccccccagcccctcctccccttcctgcacccgtaccccccaaacaccattgtcacactccagtggtctttgaataaagtctgagtgggcggcaaaaaaaaaaaaaaaaaaaaaaaaaaaaaaaaaaaaaaaaaaaaaaaaaaaaaaaaaaaaaaaaaaaaaaaaaaaaaaaaaaaaaaaaaaaaaaaaaaaatctag

SEQ ID NO: 270 - protein, 215 aa, Homo sapiens
EIVLTQSPGTLSLSPGERATLSCRASQSVGSSYLAWYQQKPGQAPRLLIYGAFSRATGIPDRFSGSGSGTDFTLTISRLEPEDFAVYYCQQYGSSPWTFGQGTKVEIKRTVAAPSVFIFPPSDEQLKSGTASVVCLLNNFYPREAKVQWKVDNALQSGNSQESVTEQDSKDSTYSLSSTLTLSKADYEKHKVYACEVTHQGLSSPVTKSFNRGEC

SEQ ID NO: 271 - DNA, 938 bp, Homo sapiens
  source 1..938: mol_type = other DNA
tcaagcttttggaccctcgtacagaagctaatacgactcactatagggaaataagagagaaaagaagagtaagaagaaatataagagccaccatggagacccccgcccagctgctcttcctgctgctgctgtggctgcctgacaccaccggcgagatcgtgctgacccaaagccccggtaccctgtccctgagccccggggagagagccaccctgagctgccgggccagccagagcgtgggctctagctatctggcctggtaccagcagaaacctggccaggcccccagactgctgatctatggcgcctttagcagagccaccggcattcccgacagattcagcggaagcggcagcggcaccgacttcaccctgacgatcagcagactggaacccgaggatttcgccgtgtactactgccagcagtacggcagcagcccctggaccttcgggcagggcaccaaggtggagattaagagaaccgtggccgcccccagcgtgttcatctttcccccctctgacgagcagctgaagagcggcaccgccagcgtggtgtgcctcctgaacaacttctacccccgggaggctaaggtgcagtggaaggtggacaacgccctgcagagcggcaactcacaggagagcgtgacagagcaggactcaaaggacagcacctacagcctgtccagcaccctgaccctgtcaaaggccgactacgagaagcacaaggtgtacgcctgcgaggtcacccaccagggactgagctcacccgttaccaagagcttcaaccgcggcgagtgctgataataggctggagcctcggtggccatgcttcttgccccttgggcctccccccagcccctcctccccttcctgcacccgtaccccccaaacaccattgtcacactccagtggtctttgaataaagtctgagtgggcggc

SEQ ID NO: 272 - protein, 235 aa, Homo sapiens; identical to SEQ ID NO: 267

SEQ ID NO: 273 - DNA, 705 bp, Homo sapiens
  source 1..705: mol_type = other DNA
atggagacccccgcccagctgctcttcctgctgctgctgtggctgcctgacaccaccggcgagatcgtgctgacccaaagccccggtaccctgtccctgagccccggggagagagccaccctgagctgccgggccagccagagcgtgggctctagctatctggcctggtaccagcagaaacctggccaggcccccagactgctgatctatggcgcctttagcagagccaccggcattcccgacagattcagcggaagcggcagcggcaccgacttcaccctgacgatcagcagactggaacccgaggatttcgccgtgtactactgccagcagtacggcagcagcccctggaccttcgggcagggcaccaaggtggagattaagagaaccgtggccgcccccagcgtgttcatctttcccccctctgacgagcagctgaagagcggcaccgccagcgtggtgtgcctcctgaacaacttctacccccgggaggctaaggtgcagtggaaggtggacaacgccctgcagagcggcaactcacaggagagcgtgacagagcaggactcaaaggacagcacctacagcctgtccagcaccctgaccctgtcaaaggccgactacgagaagcacaaggtgtacgcctgcgaggtcacccaccagggactgagctcacccgttaccaagagcttcaaccgcggcgagtgc

SEQ ID NO: 274 - DNA, 997 bp, Homo sapiens
  source 1..997: mol_type = other DNA
ggaaataagagagaaaagaagagtaagaagaaatataagagccaccatggagacccccgcccagctgctcttcctgctgctgctgtggctgcctgacaccaccggcgagatcgtgctgacccaaagccccggtaccctgtccctgagccccggggagagagccaccctgagctgccgggccagccagagcgtgggctctagctatctggcctggtaccagcagaaacctggccaggcccccagactgctgatctatggcgcctttagcagagccaccggcattcccgacagattcagcggaagcggcagcggcaccgacttcaccctgacgatcagcagactggaacccgaggatttcgccgtgtactactgccagcagtacggcagcagcccctggaccttcgggcagggcaccaaggtggagattaagagaaccgtggccgcccccagcgtgttcatctttcccccctctgacgagcagctgaagagcggcaccgccagcgtggtgtgcctcctgaacaacttctacccccgggaggctaaggtgcagtggaaggtggacaacgccctgcagagcggcaactcacaggagagcgtgacagagcaggactcaaaggacagcacctacagcctgtccagcaccctgaccctgtcaaaggccgactacgagaagcacaaggtgtacgcctgcgaggtcacccaccagggactgagctcacccgttaccaagagcttcaaccgcggcgagtgctgataataggctggagcctcggtggccatgcttcttgccccttgggcctccccccagcccctcctccccttcctgcacccgtaccccccaaacaccattgtcacactccagtggtctttgaataaagtctgagtgggcggcaaaaaaaaaaaaaaaaaaaaaaaaaaaaaaaaaaaaaaaaaaaaaaaaaaaaaaaaaaaaaaaaaaaaaaaaaaaaaaaaaaaaaaaaaaaaaaaaaaaatctag

SEQ ID NO: 275 - protein, 215 aa, Homo sapiens; identical to SEQ ID NO: 270

SEQ ID NO: 276 - DNA, 938 bp, Homo sapiens
  source 1..938: mol_type = other DNA
tcaagcttttggaccctcgtacagaagctaatacgactcactatagggaaataagagagaaaagaagagtaagaagaaatataagagccaccatggagacacccgcccagttactgttcctcctgctgctgtggctgcctgacaccaccggcgagatcgtgctgacccagagccccggcaccctgagcctgtcccccggcgagagagccaccctgagctgccgcgcctcacagagcgtgggcagctcatacctggcctggtaccagcagaagcccggacaggctcccagactgctgatctacggcgccttttccagagccaccggcatccccgaccggttcagcggctctggaagcggcaccgacttcaccctgaccatcagccggttggagcccgaggatttcgctgtgtactactgtcagcaatacggaagcagcccctggaccttcggccagggcaccaaggtggagatcaagagaaccgtggccgcccccagcgtgttcatctttccccccagcgacgaacagctgaagagcggcaccgcctcagtggtctgcctgctcaataacttctacccccgggaggccaaagtgcagtggaaggtggacaacgccctgcagagcggcaacagccaggagagcgtgaccgagcaggacagcaaagactcaacatacagcctgagcagtaccctgactctgagcaaggccgactacgagaagcataaggtgtatgcctgcgaggtgacccaccagggcctgagcagccccgtgaccaagtcattcaaccgaggcgagtgctgataataggctggagcctcggtggccatgcttcttgccccttgggcctccccccagcccctcctccccttcctgcacccgtaccccccaaacaccattgtcacactccagtggtctttgaataaagtctgagtgggcggc

SEQ ID NO: 277 - protein, 235 aa, Homo sapiens; identical to SEQ ID NO: 267

SEQ ID NO: 278 - DNA, 705 bp, Homo sapiens
  source 1..705: mol_type = other DNA
atggagacacccgcccagttactgttcctcctgctgctgtggctgcctgacaccaccggcgagatcgtgctgacccagagccccggcaccctgagcctgtcccccggcgagagagccaccctgagctgccgcgcctcacagagcgtgggcagctcatacctggcctggtaccagcagaagcccggacaggctcccagactgctgatctacggcgccttttccagagccaccggcatccccgaccggttcagcggctctggaagcggcaccgacttcaccctgaccatcagccggttggagcccgaggatttcgctgtgtactactgtcagcaatacggaagcagcccctggaccttcggccagggcaccaaggtggagatcaagagaaccgtggccgcccccagcgtgttcatctttccccccagcgacgaacagctgaagagcggcaccgcctcagtggtctgcctgctcaataacttctacccccgggaggccaaagtgcagtggaaggtggacaacgccctgcagagcggcaacagccaggagagcgtgaccgagcaggacagcaaagactcaacatacagcctgagcagtaccctgactctgagcaaggccgactacgagaagcataaggtgtatgcctgcgaggtgacccaccagggcctgagcagccccgtgaccaagtcattcaaccgaggcgagtgc

SEQ ID NO: 279 - DNA, 997 bp, Homo sapiens
  source 1..997: mol_type = other DNA
ggaaataagagagaaaagaagagtaagaagaaatataagagccaccatggagacacccgcccagttactgttcctcctgctgctgtggctgcctgacaccaccggcgagatcgtgctgacccagagccccggcaccctgagcctgtcccccggcgagagagccaccctgagctgccgcgcctcacagagcgtgggcagctcatacctggcctggtaccagcagaagcccggacaggctcccagactgctgatctacggcgccttttccagagccaccggcatccccgaccggttcagcggctctggaagcggcaccgacttcaccctgaccatcagccggttggagcccgaggatttcgctgtgtactactgtcagcaatacggaagcagcccctggaccttcggccagggcaccaaggtggagatcaagagaaccgtggccgcccccagcgtgttcatctttccccccagcgacgaacagctgaagagcggcaccgcctcagtggtctgcctgctcaataacttctacccccgggaggccaaagtgcagtggaaggtggacaacgccctgcagagcggcaacagccaggagagcgtgaccgagcaggacagcaaagactcaacatacagcctgagcagtaccctgactctgagcaaggccgactacgagaagcataaggtgtatgcctgcgaggtgacccaccagggcctgagcagccccgtgaccaagtcattcaaccgaggcgagtgctgataataggctggagcctcggtggccatgcttcttgccccttgggcctccccccagcccctcctccccttcctgcacccgtaccccccaaacaccattgtcacactccagtggtctttgaataaagtctgagtgggcggcaaaaaaaaaaaaaaaaaaaaaaaaaaaaaaaaaaaaaaaaaaaaaaaaaaaaaaaaaaaaaaaaaaaaaaaaaaaaaaaaaaaaaaaaaaaaaaaaaaaatctag

SEQ ID NO: 280 - protein, 215 aa, Homo sapiens; identical to SEQ ID NO: 270

SEQ ID NO: 281 - DNA, 1658 bp, Homo sapiens
  source 1..1658: mol_type = other DNA
tcaagcttttggaccctcgtacagaagctaatacgactcactatagggaaataagagagaaaagaagagtaagaagaaatataagagccaccatggagacgcccgctcagctgctgttcctgctgctgctgtggctgcccgatacaactgggcaggtgcagttggtggaaagcggcggcggagtggtgcagccaggacggagcctgagactgagctgcgccgcctccggcttcactttctccagctatggcatgcattgggtgcggcaggcacccggcaagggcctggagtgggtggccgtcatctggtacgacggcagcaataagtactacgccgactccgtgaagggcaggttcaccatctccagggataacagcaagaatacactgtacctgcagatgaatagcctgagggctgaggacaccgccgtgtactactgtgcccgggaccccaggggcgccaccctgtactactactactacggaatggacgtgtggggccagggcaccacagtcacagtctctagcgcctccaccaagggccctagcgtgttccctctggcccccagcagcaagtctaccagcggcggcaccgccgccctgggctgcctggtgaaggactactttcccgagcccgtgaccgtcagctggaacagcggcgccctgaccagcggcgtccacaccttccccgccgtgctgcagagcagcggcctgtacagtctgagctccgtggtgacagttccctcaagcagcctgggcacacagacctatatctgcaacgtgaaccacaagcccagcaacacaaaggtggacaagagagtggagcccaagagctgcgacaagacccacacctgtcccccctgccccgccccggagctgctgggggggcccagcgtgttcctgttcccccccaaacccaaggacaccctgatgattagcaggactccagaagtcacctgcgtggtggtggacgtgtcgcacgaggaccccgaggtgaagttcaactggtatgtggacggcgtggaggtacacaatgccaagaccaagcctagggaggagcagtacaactccacctacagagtggtgagcgtgctgaccgtgctgcaccaggactggctgaacggcaaggagtacaagtgcaaagtgagcaataaggcactgcccgctcccatcgagaagaccatcagcaaggcaaaggggcagccccgcgagccccaggtgtacaccctgcccccctccagggaagagatgactaaaaatcaggtgagcctgacatgcctggtgaagggcttctacccaagcgatatcgccgtggagtgggagagcaacggccaacccgaaaacaactacaaaacgaccccaccggtcctggattcggatggcagcttcttcctgtatagcaagctgacagtggacaagtccagatggcagcagggaaacgtgttcagctgcagcgtcatgcacgaggccctgcacaaccactacacccagaagagcctcagcctgtcccccggcaagtgataataggctggagcctcggtggccatgcttcttgccccttgggcctccccccagcccctcctccccttcctgcacccgtaccccccaaacaccattgtcacactccagtggtctttgaataaagtctgagtgggcggc

SEQ ID NO: 282 - protein, 475 aa, Homo sapiens
METPAQLLFLLLLWLPDTTGQVQLVESGGGVVQPGRSLRLSCAASGFTFSSYGMHWVRQAPGKGLEWVAVIWYDGSNKYYADSVKGRFTISRDNSKNTLYLQMNSLRAEDTAVYYCARDPRGATLYYYYYGMDVWGQGTTVTVSSASTKGPSVFPLAPSSKSTSGGTAALGCLVKDYFPEPVTVSWNSGALTSGVHTFPAVLQSSGLYSLSSVVTVPSSSLGTQTYICNVNHKPSNTKVDKRVEPKSCDKTHTCPPCPAPELLGGPSVFLFPPKPKDTLMISRTPEVTCVVVDVSHEDPEVKFNWYVDGVEVHNAKTKPREEQYNSTYRVVSVLTVLHQDWLNGKEYKCKVSNKALPAPIEKTISKAKGQPREPQVYTLPPSREEMTKNQVSLTCLVKGFYPSDIAVEWESNGQPENNYKTTPPVLDSDGSFFLYSKLTVDKSRWQQGNVFSCSVMHEALHNHYTQKSLSLSPGK

SEQ ID NO: 283 - DNA, 1425 bp, Homo sapiens
  source 1..1425: mol_type = other DNA
atggagacgcccgctcagctgctgttcctgctgctgctgtggctgcccgatacaactgggcaggtgcagttggtggaaagcggcggcggagtggtgcagccaggacggagcctgagactgagctgcgccgcctccggcttcactttctccagctatggcatgcattgggtgcggcaggcacccggcaagggcctggagtgggtggccgtcatctggtacgacggcagcaataagtactacgccgactccgtgaagggcaggttcaccatctccagggataacagcaagaatacactgtacctgcagatgaatagcctgagggctgaggacaccgccgtgtactactgtgcccgggaccccaggggcgccaccctgtactactactactacggaatggacgtgtggggccagggcaccacagtcacagtctctagcgcctccaccaagggccctagcgtgttccctctggcccccagcagcaagtctaccagcggcggcaccgccgccctgggctgcctggtgaaggactactttcccgagcccgtgaccgtcagctggaacagcggcgccctgaccagcggcgtccacaccttccccgccgtgctgcagagcagcggcctgtacagtctgagctccgtggtgacagttccctcaagcagcctgggcacacagacctatatctgcaacgtgaaccacaagcccagcaacacaaaggtggacaagagagtggagcccaagagctgcgacaagacccacacctgtcccccctgccccgccccggagctgctgggggggcccagcgtgttcctgttcccccccaaacccaaggacaccctgatgattagcaggactccagaagtcacctgcgtggtggtggacgtgtcgcacgaggaccccgaggtgaagttcaactggtatgtggacggcgtggaggtacacaatgccaagaccaagcctagggaggagcagtacaactccacctacagagtggtgagcgtgctgaccgtgctgcaccaggactggctgaacggcaaggagtacaagtgcaaagtgagcaataaggcactgcccgctcccatcgagaagaccatcagcaaggcaaaggggcagccccgcgagccccaggtgtacaccctgcccccctccagggaagagatgactaaaaatcaggtgagcctgacatgcctggtgaagggcttctacccaagcgatatcgccgtggagtgggagagcaacggccaacccgaaaacaactacaaaacgaccccaccggtcctggattcggatggcagcttcttcctgtatagcaagctgacagtggacaagtccagatggcagcagggaaacgtgttcagctgcagcgtcatgcacgaggccctgcacaaccactacacccagaagagcctcagcctgtcccccggcaag

SEQ ID NO: 284 - DNA, 1717 bp, Homo sapiens
  source 1..1717: mol_type = other DNA
ggaaataagagagaaaagaagagtaagaagaaatataagagccaccatggagacgcccgctcagctgctgttcctgctgctgctgtggctgcccgatacaactgggcaggtgcagttggtggaaagcggcggcggagtggtgcagccaggacggagcctgagactgagctgcgccgcctccggcttcactttctccagctatggcatgcattgggtgcggcaggcacccggcaagggcctggagtgggtggccgtcatctggtacgacggcagcaataagtactacgccgactccgtgaagggcaggttcaccatctccagggataacagcaagaatacactgtacctgcagatgaatagcctgagggctgaggacaccgccgtgtactactgtgcccgggaccccaggggcgccaccctgtactactactactacggaatggacgtgtggggccagggcaccacagtcacagtctctagcgcctccaccaagggccctagcgtgttccctctggcccccagcagcaagtctaccagcggcggcaccgccgccctgggctgcctggtgaaggactactttcccgagcccgtgaccgtcagctggaacagcggcgccctgaccagcggcgtccacaccttccccgccgtgctgcagagcagcggcctgtacagtctgagctccgtggtgacagttccctcaagcagcctgggcacacagacctatatctgcaacgtgaaccacaagcccagcaacacaaaggtggacaagagagtggagcccaagagctgcgacaagacccacacctgtcccccctgccccgccccggagctgctgggggggcccagcgtgttcctgttcccccccaaacccaaggacaccctgatgattagcaggactccagaagtcacctgcgtggtggtggacgtgtcgcacgaggaccccgaggtgaagttcaactggtatgtggacggcgtggaggtacacaatgccaagaccaagcctagggaggagcagtacaactccacctacagagtggtgagcgtgctgaccgtgctgcaccaggactggctgaacggcaaggagtacaagtgcaaagtgagcaataaggcactgcccgctcccatcgagaagaccatcagcaaggcaaaggggcagccccgcgagccccaggtgtacaccctgcccccctccagggaagagatgactaaaaatcaggtgagcctgacatgcctggtgaagggcttctacccaagcgatatcgccgtggagtgggagagcaacggccaacccgaaaacaactacaaaacgaccccaccggtcctggattcggatggcagcttcttcctgtatagcaagctgacagtggacaagtccagatggcagcagggaaacgtgttcagctgcagcgtcatgcacgaggccctgcacaaccactacacccagaagagcctcagcctgtcccccggcaagtgataataggctggagcctcggtggccatgcttcttgccccttgggcctccccccagcccctcctccccttcctgcacccgtaccccccaaacaccattgtcacactccagtggtctttgaataaagtctgagtgggcggcaaaaaaaaaaaaaaaaaaaaaaaaaaaaaaaaaaaaaaaaaaaaaaaaaaaaaaaaaaaaaaaaaaaaaaaaaaaaaaaaaaaaaaaaaaaaaaaaaaaatctag

SEQ ID NO: 285 - protein, 455 aa, Homo sapiens
QVQLVESGGGVVQPGRSLRLSCAASGFTFSSYGMHWVRQAPGKGLEWVAVIWYDGSNKYYADSVKGRFTISRDNSKNTLYLQMNSLRAEDTAVYYCARDPRGATLYYYYYGMDVWGQGTTVTVSSASTKGPSVFPLAPSSKSTSGGTAALGCLVKDYFPEPVTVSWNSGALTSGVHTFPAVLQSSGLYSLSSVVTVPSSSLGTQTYICNVNHKPSNTKVDKRVEPKSCDKTHTCPPCPAPELLGGPSVFLFPPKPKDTLMISRTPEVTCVVVDVSHEDPEVKFNWYVDGVEVHNAKTKPREEQYNSTYRVVSVLTVLHQDWLNGKEYKCKVSNKALPAPIEKTISKAKGQPREPQVYTLPPSREEMTKNQVSLTCLVKGFYPSDIAVEWESNGQPENNYKTTPPVLDSDGSFFLYSKLTVDKSRWQQGNVFSCSVMHEALHNHYTQKSLSLSPGK

SEQ ID NO: 286 - DNA, 1658 bp, Homo sapiens
  source 1..1658: mol_type = other DNA
tcaagcttttggaccctcgtacagaagctaatacgactcactatagggaaataagagagaaaagaagagtaagaagaaatataagagccaccatggaaaccccagcccagctcctgttcctgctgctgctgtggctgcccgacaccaccggccaggtgcagctggtggagtcaggcggcggcgtggtgcaaccaggccgcagcctgaggctcagctgcgccgcctccggcttcaccttcagttcctacggcatgcactgggtgagacaggcccccggcaagggcctggagtgggtggccgtgatctggtacgacggcagcaacaaatactatgctgacagcgtgaagggccggttcaccatctccagggacaatagcaaaaacaccctgtacctgcaaatgaatagcctgagggccgaggacaccgctgtgtactactgcgccagggaccctaggggcgccaccctttactactactactacggcatggacgtgtggggccagggcactaccgtcaccgtgtccagcgccagcaccaagggccccagcgtgttcccactggcacccagctctaagagcaccagcggcggcaccgccgccctgggctgcctggtgaaggactacttccccgagcccgtgaccgtgagctggaacagcggcgccctgacttccggcgtccacacattccccgccgtgctgcagagcagcgggctgtacagcctgtcatccgtggtgaccgtgcctagcagcagtctgggcactcagacctatatttgcaacgtgaaccacaagccctccaacaccaaagtggataagagagtggagcctaagagctgtgataagacccacacctgccctccttgcccagctccggagctgctgggcggccccagcgtgttcctgttccccccgaagcccaaggacacactgatgatcagcagaacccccgaagttacttgcgtggtggtggacgtcagccacgaagaccccgaggtcaagttcaattggtatgtggacggcgtggaggtgcacaacgccaagacaaagccgagagaggagcagtacaattccacctatagagtggtgagcgtgctgacagtcctccaccaggactggctgaacggcaaggagtacaagtgcaaggtcagcaacaaagccctgcctgctcccatcgagaagaccatctccaaggctaaaggccagcctagagagccccaggtgtacaccctgcccccctccagagaggagatgaccaagaaccaggtgagcctgacatgcctggtgaagggcttctaccccagcgacatcgctgtggagtgggagagcaatggccagcccgagaataactacaagaccaccccccccgtgctcgacagcgacggcagcttcttcctgtacagcaagctgaccgtggataagagcagatggcaacagggtaatgtgtttagctgctccgtgatgcacgaggccctccacaaccattacacccagaaaagcctgtccctgagccccggcaagtgataataggctggagcctcggtggccatgcttcttgccccttgggcctccccccagcccctcctccccttcctgcacccgtaccccccaaacaccattgtcacactccagtggtctttgaataaagtctgagtgggcggc

SEQ ID NO: 287 - protein, 475 aa, Homo sapiens; identical to SEQ ID NO: 282

SEQ ID NO: 288 - DNA, 1425 bp, Homo sapiens
  source 1..1425: mol_type = other DNA
atggaaaccccagcccagctcctgttcctgctgctgctgtggctgcccgacaccaccggccaggtgcagctggtggagtcaggcggcggcgtggtgcaaccaggccgcagcctgaggctcagctgcgccgcctccggcttcaccttcagttcctacggcatgcactgggtgagacaggcccccggcaagggcctggagtgggtggccgtgatctggtacgacggcagcaacaaatactatgctgacagcgtgaagggccggttcaccatctccagggacaatagcaaaaacaccctgtacctgcaaatgaatagcctgagggccgaggacaccgctgtgtactactgcgccagggaccctaggggcgccaccctttactactactactacggcatggacgtgtggggccagggcactaccgtcaccgtgtccagcgccagcaccaagggccccagcgtgttcccactggcacccagctctaagagcaccagcggcggcaccgccgccctgggctgcctggtgaaggactacttccccgagcccgtgaccgtgagctggaacagcggcgccctgacttccggcgtccacacattccccgccgtgctgcagagcagcgggctgtacagcctgtcatccgtggtgaccgtgcctagcagcagtctgggcactcagacctatatttgcaacgtgaaccacaagccctccaacaccaaagtggataagagagtggagcctaagagctgtgataagacccacacctgccctccttgcccagctccggagctgctgggcggccccagcgtgttcctgttccccccgaagcccaaggacacactgatgatcagcagaacccccgaagttacttgcgtggtggtggacgtcagccacgaagaccccgaggtcaagttcaattggtatgtggacggcgtggaggtgcacaacgccaagacaaagccgagagaggagcagtacaattccacctatagagtggtgagcgtgctgacagtcctccaccaggactggctgaacggcaaggagtacaagtgcaaggtcagcaacaaagccctgcctgctcccatcgagaagaccatctccaaggctaaaggccagcctagagagccccaggtgtacaccctgcccccctccagagaggagatgaccaagaaccaggtgagcctgacatgcctggtgaagggcttctaccccagcgacatcgctgtggagtgggagagcaatggccagcccgagaataactacaagaccaccccccccgtgctcgacagcgacggcagcttcttcctgtacagcaagctgaccgtggataagagcagatggcaacagggtaatgtgtttagctgctccgtgatgcacgaggccctccacaaccattacacccagaaaagcctgtccctgagccccggcaag

SEQ ID NO: 289 - DNA, 1717 bp, Homo sapiens
  source 1..1717: mol_type = other DNA
ggaaataagagagaaaagaagagtaagaagaaatataagagccaccatggaaaccccagcccagctcctgttcctgctgctgctgtggctgcccgacaccaccggccaggtgcagctggtggagtcaggcggcggcgtggtgcaaccaggccgcagcctgaggctcagctgcgccgcctccggcttcaccttcagttcctacggcatgcactgggtgagacaggcccccggcaagggcctggagtgggtggccgtgatctggtacgacggcagcaacaaatactatgctgacagcgtgaagggccggttcaccatctccagggacaatagcaaaaacaccctgtacctgcaaatgaatagcctgagggccgaggacaccgctgtgtactactgcgccagggaccctaggggcgccaccctttactactactactacggcatggacgtgtggggccagggcactaccgtcaccgtgtccagcgccagcaccaagggccccagcgtgttcccactggcacccagctctaagagcaccagcggcggcaccgccgccctgggctgcctggtgaaggactacttccccgagcccgtgaccgtgagctggaacagcggcgccctgacttccggcgtccacacattccccgccgtgctgcagagcagcgggctgtacagcctgtcatccgtggtgaccgtgcctagcagcagtctgggcactcagacctatatttgcaacgtgaaccacaagccctccaacaccaaagtggataagagagtggagcctaagagctgtgataagacccacacctgccctccttgcccagctccggagctgctgggcggccccagcgtgttcctgttccccccgaagcccaaggacacactgatgatcagcagaacccccgaagttacttgcgtggtggtggacgtcagccacgaagaccccgaggtcaagttcaattggtatgtggacggcgtggaggtgcacaacgccaagacaaagccgagagaggagcagtacaattccacctatagagtggtgagcgtgctgacagtcctccaccaggactggctgaacggcaaggagtacaagtgcaaggtcagcaacaaagccctgcctgctcccatcgagaagaccatctccaaggctaaaggccagcctagagagccccaggtgtacaccctgcccccctccagagaggagatgaccaagaaccaggtgagcctgacatgcctggtgaagggcttctaccccagcgacatcgctgtggagtgggagagcaatggccagcccgagaataactacaagaccaccccccccgtgctcgacagcgacggcagcttcttcctgtacagcaagctgaccgtggataagagcagatggcaacagggtaatgtgtttagctgctccgtgatgcacgaggccctccacaaccattacacccagaaaagcctgtccctgagccccggcaagtgataataggctggagcctcggtggccatgcttcttgccccttgggcctccccccagcccctcctccccttcctgcacccgtaccccccaaacaccattgtcacactccagtggtctttgaataaagtctgagtgggcggcaaaaaaaaaaaaaaaaaaaaaaaaaaaaaaaaaaaaaaaaaaaaaaaaaaaaaaaaaaaaaaaaaaaaaaaaaaaaaaaaaaaaaaaaaaaaaaaaaaaatctag

SEQ ID NO: 290 - protein, 455 aa, Homo sapiens; identical to SEQ ID NO: 285

SEQ ID NO: 291 - DNA, 1658 bp, Homo sapiens
  source 1..1658: mol_type = other DNA
tcaagcttttggaccctcgtacagaagctaatacgactcactatagggaaataagagagaaaagaagagtaagaagaaatataagagccaccatggaaacccccgctcagctgctgtttctgcttctgctgtggctccctgacactaccggacaggtgcagctcgtggagagcggcggcggcgtggtgcagcccggcaggagcctgagactgagctgcgccgcctctggcttcacattcagcagctacggcatgcactgggtgcggcaggcccccggcaagggactggagtgggtggccgtgatctggtacgacggatcaaacaagtactacgccgactcggtgaagggcaggttcaccatcagccgcgacaacagcaagaacaccctgtacctgcagatgaacagcctgagagccgaggacaccgcggtgtactactgcgcccgggatcccaggggcgccaccctgtactactactactacggcatggacgtgtggggccagggcaccacagtgacagtgagcagcgccagcaccaagggccctagcgtgtttcctctggccccaagctcaaagagcaccagtggcggaaccgccgccctgggctgcctggtgaaggactactttcccgagcccgtgaccgtgtcctggaacagcggcgccctgacaagcggagtgcacaccttcccagcggttctgcagtcatcagggctgtacagcctgagctccgtggtgaccgtgcccagctccagcctgggtacccagacctacatctgcaatgtgaaccacaagcccagcaacaccaaggtggacaagcgcgtcgagcctaaaagctgcgacaagacccacacctgccccccctgccccgcccccgagctgctggggggccccagcgtcttcctattcccccctaagcccaaggacaccctcatgatcagcagaacccccgaggtgacctgcgtggtggtggacgtgagccatgaggaccccgaggtgaagttcaattggtacgtggacggggtggaagtgcataacgccaagaccaagccaagagaggagcagtacaacagcacctaccgcgtggtgtccgtgctgaccgtgttgcatcaggattggcttaacggcaaggagtataagtgtaaagtgtctaacaaggctctccccgcccccattgagaagaccatctccaaggccaagggccagcccagagagccccaggtgtatacactgccccccagcagagaggagatgaccaagaaccaggtgagcctgacctgtctggtgaagggcttctaccctagcgacattgccgtggagtgggagtccaacggccagcccgaaaataactacaagaccactcctcccgtgcttgacagcgacgggagcttcttcctgtacagcaagctgaccgtggacaagagcaggtggcagcagggcaacgtgttctcttgcagcgtgatgcacgaggcgctccacaatcactacacccagaagagcctgtccctgtctcccggcaagtgataataggctggagcctcggtggccatgcttcttgccccttgggcctccccccagcccctcctccccttcctgcacccgtaccccccaaacaccattgtcacactccagtggtctttgaataaagtctgagtgggcggc

SEQ ID NO: 292 - protein, 475 aa, Homo sapiens; identical to SEQ ID NO: 282

SEQ ID NO: 293 - DNA, 1425 bp, Homo sapiens
  source 1..1425: mol_type = other DNA
atggaaacccccgctcagctgctgtttctgcttctgctgtggctccctgacactaccggacaggtgcagctcgtggagagcggcggcggcgtggtgcagcccggcaggagcctgagactgagctgcgccgcctctggcttcacattcagcagctacggcatgcactgggtgcggcaggcccccggcaagggactggagtgggtggccgtgatctggtacgacggatcaaacaagtactacgccgactcggtgaagggcaggttcaccatcagccgcgacaacagcaagaacaccctgtacctgcagatgaacagcctgagagccgaggacaccgcggtgtactactgcgcccgggatcccaggggcgccaccctgtactactactactacggcatggacgtgtggggccagggcaccacagtgacagtgagcagcgccagcaccaagggccctagcgtgtttcctctggccccaagctcaaagagcaccagtggcggaaccgccgccctgggctgcctggtgaaggactactttcccgagcccgtgaccgtgtcctggaacagcggcgccctgacaagcggagtgcacaccttcccagcggttctgcagtcatcagggctgtacagcctgagctccgtggtgaccgtgcccagctccagcctgggtacccagacctacatctgcaatgtgaaccacaagcccagcaacaccaaggtggacaagcgcgtcgagcctaaaagctgcgacaagacccacacctgccccccctgccccgcccccgagctgctggggggccccagcgtcttcctattcccccctaagcccaaggacaccctcatgatcagcagaacccccgaggtgacctgcgtggtggtggacgtgagccatgaggaccccgaggtgaagttcaattggtacgtggacggggtggaagtgcataacgccaagaccaagccaagagaggagcagtacaacagcacctaccgcgtggtgtccgtgctgaccgtgttgcatcaggattggcttaacggcaaggagtataagtgtaaagtgtctaacaaggctctccccgcccccattgagaagaccatctccaaggccaagggccagcccagagagccccaggtgtatacactgccccccagcagagaggagatgaccaagaaccaggtgagcctgacctgtctggtgaagggcttctaccctagcgacattgccgtggagtgggagtccaacggccagcccgaaaataactacaagaccactcctcccgtgcttgacagcgacgggagcttcttcctgtacagcaagctgaccgtggacaagagcaggtggcagcagggcaacgtgttctcttgcagcgtgatgcacgaggcgctccacaatcactacacccagaagagcctgtccctgtctcccggcaag

SEQ ID NO: 294 - DNA, 1717 bp, Homo sapiens
  source 1..1717: mol_type = other DNA
ggaaataagagagaaaagaagagtaagaagaaatataagagccaccatggaaacccccgctcagctgctgtttctgcttctgctgtggctccctgacactaccggacaggtgcagctcgtggagagcggcggcggcgtggtgcagcccggcaggagcctgagactgagctgcgccgcctctggcttcacattcagcagctacggcatgcactgggtgcggcaggcccccggcaagggactggagtgggtggccgtgatctggtacgacggatcaaacaagtactacgccgactcggtgaagggcaggttcaccatcagccgcgacaacagcaagaacaccctgtacctgcagatgaacagcctgagagccgaggacaccgcggtgtactactgcgcccgggatcccaggggcgccaccctgtactactactactacggcatggacgtgtggggccagggcaccacagtgacagtgagcagcgccagcaccaagggccctagcgtgtttcctctggccccaagctcaaagagcaccagtggcggaaccgccgccctgggctgcctggtgaaggactactttcccgagcccgtgaccgtgtcctggaacagcggcgccctgacaagcggagtgcacaccttcccagcggttctgcagtcatcagggctgtacagcctgagctccgtggtgaccgtgcccagctccagcctgggtacccagacctacatctgcaatgtgaaccacaagcccagcaacaccaaggtggacaagcgcgtcgagcctaaaagctgcgacaagacccacacctgccccccctgccccgcccccgagctgctggggggccccagcgtcttcctattcccccctaagcccaaggacaccctcatgatcagcagaacccccgaggtgacctgcgtggtggtggacgtgagccatgaggaccccgaggtgaagttcaattggtacgtggacggggtggaagtgcataacgccaagaccaagccaagagaggagcagtacaacagcacctaccgcgtggtgtccgtgctgaccgtgttgcatcaggattggcttaacggcaaggagtataagtgtaaagtgtctaacaaggctctccccgcccccattgagaagaccatctccaaggccaagggccagcccagagagccccaggtgtatacactgccccccagcagagaggagatgaccaagaaccaggtgagcctgacctgtctggtgaagggcttctaccctagcgacattgccgtggagtgggagtccaacggccagcccgaaaataactacaagaccactcctcccgtgcttgacagcgacgggagcttcttcctgtacagcaagctgaccgtggacaagagcaggtggcagcagggcaacgtgttctcttgcagcgtgatgcacgaggcgctccacaatcactacacccagaagagcctgtccctgtctcccggcaagtgataataggctggagcctcggtggccatgcttcttgccccttgggcctccccccagcccctcctccccttcctgcacccgtaccccccaaacaccattgtcacactccagtggtctttgaataaagtctgagtgggcggcaaaaaaaaaaaaaaaaaaaaaaaaaaaaaaaaaaaaaaaaaaaaaaaaaaaaaaaaaaaaaaaaaaaaaaaaaaaaaaaaaaaaaaaaaaaaaaaaaaaatctag

SEQ ID NO: 295 - protein, 455 aa, Homo sapiens; identical to SEQ ID NO: 285

SEQ ID NO: 296 - DNA, 1646 bp, Homo sapiens
  source 1..1646: mol_type = other DNA
tcaagcttttggaccctcgtacagaagctaatacgactcactatagggaaataagagagaaaagaagagtaagaagaaatataagagccaccatggagacccccgcccagctgctgttcctgctgctgctgtggctgcccgataccaccggccaggtccagctcgtggagagcggcggcggcgtggttcagcccggcagaagcctgagactgagctgcgccgccagcggcttcaccttctcaagctacggcatgcactgggtgagacaggccccgggcaagggcctcgaatgggtggccgtgatctggtacgacggaagcaacaagtactacgccgatagtgtgaagggcaggttcactatcagccgagataacagcaaaaacaccctgtatctgcagatgaactcactgcgtgccgaggataccgctgtgtactattgcgccagggaccctagaggagccacgctgtactactactactacggcatggacgtttggggccagggaaccaccgtcaccgtgagcagcgcctccaccaaaggccccagcgtgttccccctggccccttgctccaggagtaccagcgagagcaccgccgccctgggctgcctggtgaaggactatttccccgagcccgtgaccgtgtcctggaactctggcgccctgaccagcggggtgcacaccttccccgccgtcctgcagagtagcggactgtacagcctgagcagcgtagtgactgtgccctccagcaacttcggcactcagacctatacttgtaacgtcgaccacaagccttccaacacaaaggtggacaaaaccgtggagaggaagtgttgcgttgagtgccccccctgtccggccccgcccgtggcggggcctagcgtgttcctcttccctcccaagccaaaggacaccctgatgatcagcaggacccccgaggtgacctgcgtggtggtggatgtgagccatgaggaccccgaggtgcagtttaactggtacgtggacggagtggaggtgcataacgccaagaccaagcctagggaggagcagttcaacagcaccttcagagtggttagcgtgctgaccgtggtgcaccaggattggctgaacgggaaggagtacaagtgcaaggtgagcaacaagggcctgcccgccccaatcgagaagaccatctcaaagaccaaggggcagcctagagagccccaggtgtacaccctgccccctagcagagaggagatgaccaagaaccaggtgagcctcacctgcctcgtgaagggcttctaccccagcgacatcgctgtggagtgggagtccaacggccagcccgagaacaactacaaaaccacacccccaatgctggactccgacggcagcttcttcctgtacagcaagctgacagtggacaaaagcagatggcagcagggcaacgtgttcagctgctctgtgatgcacgaggccctgcacaatcattatactcagaagagcctgagcctgtcccccggaaagtgataataggctggagcctcggtggccatgcttcttgccccttgggcctccccccagcccctcctccccttcctgcacccgtaccccccaaacaccattgtcacactccagtggtctttgaataaagtctgagtgggcggc

SEQ ID NO: 297 - protein, 471 aa, Homo sapiens; identical to SEQ ID NO: 235

SEQ ID NO: 298 - DNA, 1413 bp, Homo sapiens
  source 1..1413: mol_type = other DNA
atggagacccccgcccagctgctgttcctgctgctgctgtggctgcccgataccaccggccaggtccagctcgtggagagcggcggcggcgtggttcagcccggcagaagcctgagactgagctgcgccgccagcggcttcaccttctcaagctacggcatgcactgggtgagacaggccccgggcaagggcctcgaatgggtggccgtgatctggtacgacggaagcaacaagtactacgccgatagtgtgaagggcaggttcactatcagccgagataacagcaaaaacaccctgtatctgcagatgaactcactgcgtgccgaggataccgctgtgtactattgcgccagggaccctagaggagccacgctgtactactactactacggcatggacgtttggggccagggaaccaccgtcaccgtgagcagcgcctccaccaaaggccccagcgtgttccccctggccccttgctccaggagtaccagcgagagcaccgccgccctgggctgcctggtgaaggactatttccccgagcccgtgaccgtgtcctggaactctggcgccctgaccagcggggtgcacaccttccccgccgtcctgcagagtagcggactgtacagcctgagcagcgtagtgactgtgccctccagcaacttcggcactcagacctatacttgtaacgtcgaccacaagccttccaacacaaaggtggacaaaaccgtggagaggaagtgttgcgttgagtgccccccctgtccggccccgcccgtggcggggcctagcgtgttcctcttccctcccaagccaaaggacaccctgatgatcagcaggacccccgaggtgacctgcgtggtggtggatgtgagccatgaggaccccgaggtgcagtttaactggtacgtggacggagtggaggtgcataacgccaagaccaagcctagggaggagcagttcaacagcaccttcagagtggttagcgtgctgaccgtggtgcaccaggattggctgaacgggaaggagtacaagtgcaaggtgagcaacaagggcctgcccgccccaatcgagaagaccatctcaaagaccaaggggcagcctagagagccccaggtgtacaccctgccccctagcagagaggagatgaccaagaaccaggtgagcctcacctgcctcgtgaagggcttctaccccagcgacatcgctgtggagtgggagtccaacggccagcccgagaacaactacaaaaccacacccccaatgctggactccgacggcagcttcttcctgtacagcaagctgacagtggacaaaagcagatggcagcagggcaacgtgttcagctgctctgtgatgcacgaggccctgcacaatcattatactcagaagagcctgagcctgtcccccggaaag

SEQ ID NO: 299 - DNA, 1705 bp, Homo sapiens
  source 1..1705: mol_type = other DNA
ggaaataagagagaaaagaagagtaagaagaaatataagagccaccatggagacccccgcccagctgctgttcctgctgctgctgtggctgcccgataccaccggccaggtccagctcgtggagagcggcggcggcgtggttcagcccggcagaagcctgagactgagctgcgccgccagcggcttcaccttctcaagctacggcatgcactgggtgagacaggccccgggcaagggcctcgaatgggtggccgtgatctggtacgacggaagcaacaagtactacgccgatagtgtgaagggcaggttcactatcagccgagataacagcaaaaacaccctgtatctgcagatgaactcactgcgtgccgaggataccgctgtgtactattgcgccagggaccctagaggagccacgctgtactactactactacggcatggacgtttggggccagggaaccaccgtcaccgtgagcagcgcctccaccaaaggccccagcgtgttccccctggccccttgctccaggagtaccagcgagagcaccgccgccctgggctgcctggtgaaggactatttccccgagcccgtgaccgtgtcctggaactctggcgccctgaccagcggggtgcacaccttccccgccgtcctgcagagtagcggactgtacagcctgagcagcgtagtgactgtgccctccagcaacttcggcactcagacctatacttgtaacgtcgaccacaagccttccaacacaaaggtggacaaaaccgtggagaggaagtgttgcgttgagtgccccccctgtccggccccgcccgtggcggggcctagcgtgttcctcttccctcccaagccaaaggacaccctgatgatcagcaggacccccgaggtgacctgcgtggtggtggatgtgagccatgaggaccccgaggtgcagtttaactggtacgtggacggagtggaggtgcataacgccaagaccaagcctagggaggagcagttcaacagcaccttcagagtggttagcgtgctgaccgtggtgcaccaggattggctgaacgggaaggagtacaagtgcaaggtgagcaacaagggcctgcccgccccaatcgagaagaccatctcaaagaccaaggggcagcctagagagccccaggtgtacaccctgccccctagcagagaggagatgaccaagaaccaggtgagcctcacctgcctcgtgaagggcttctaccccagcgacatcgctgtggagtgggagtccaacggccagcccgagaacaactacaaaaccacacccccaatgctggactccgacggcagcttcttcctgtacagcaagctgacagtggacaaaagcagatggcagcagggcaacgtgttcagctgctctgtgatgcacgaggccctgcacaatcattatactcagaagagcctgagcctgtcccccggaaagtgataataggctggagcctcggtggccatgcttcttgccccttgggcctccccccagcccctcctccccttcctgcacccgtaccccccaaacaccattgtcacactccagtggtctttgaataaagtctgagtgggcggcaaaaaaaaaaaaaaaaaaaaaaaaaaaaaaaaaaaaaaaaaaaaaaaaaaaaaaaaaaaaaaaaaaaaaaaaaaaaaaaaaaaaaaaaaaaaaaaaaaaatctag

SEQ ID NO: 300 - protein, 451 aa, Homo sapiens; identical to SEQ ID NO: 21

SEQ ID NO: 301 - DNA, 1646 bp, Homo sapiens
  source 1..1646: mol_type = other DNA
tcaagcttttggaccctcgtacagaagctaatacgactcactatagggaaataagagagaaaagaagagtaagaagaaatataagagccaccatggagaccccagcccagctgctgttcctgcttctgctgtggctgccagataccaccggccaggtgcagctggttgagtcaggcggcggcgtggtgcagcccggcagaagcctgcggctgagctgcgccgccagcggcttcaccttcagcagctacggcatgcactgggtgagacaggcccctggcaaggggctggagtgggtggccgtgatctggtatgacggaagtaacaagtactacgccgacagcgtgaagggcagattcacgatcagcagagacaactccaagaacacgctgtacttgcagatgaacagcctgagagccgaggacacagccgtgtattactgcgccagagaccccagaggcgccaccctgtactactactactacggcatggacgtgtggggccagggcaccaccgtgaccgtgagcagtgccagcaccaagggccccagcgtgttccccctggccccctgcagtcggagcaccagcgaaagcaccgccgccctgggctgcctggtgaaagactatttccccgagcctgtgacagtgagctggaacagcggggccctcacctctggcgtgcacacgttcccagccgtgctgcagagcagcgggctgtacagcctgtcctctgtggtgaccgtgcccagcagcaatttcggcacccagacctacacgtgcaatgtggatcacaagcccagcaacacaaaagtggacaaaaccgtggagagaaagtgttgcgtggagtgccccccttgccccgccccccccgtggctggcccgtcagtgttcctgttccctcctaagcccaaggacaccctcatgatcagcagaacccccgaggtgacctgcgtggtcgtggacgtgagtcacgaggaccccgaggtccagttcaactggtacgtggatggagtggaggtgcacaacgccaagaccaagccccgggaggagcagtttaatagcacctttagggtggtgagcgtgctgaccgttgtacaccaggactggctgaacggcaaagagtacaaatgcaaggtttcaaataagggcctgcccgccccaattgagaagacaatcagcaagactaagggccagcctagggaaccccaggtctacactctgcccccctctcgggaggagatgaccaagaaccaggtgagcctgacctgcctggtgaagggcttctacccttctgacatcgctgtggagtgggagagcaatggacaacccgagaacaactacaagaccacccccccaatgctggactctgatggcagcttctttctgtacagcaagctgacagtggataaaagcaggtggcagcagggtaatgtgttcagctgcagcgtgatgcacgaggcactgcacaatcactacacccagaagagcctgtccctgtcccccggcaagtgataataggctggagcctcggtggccatgcttcttgccccttgggcctccccccagcccctcctccccttcctgcacccgtaccccccaaacaccattgtcacactccagtggtctttgaataaagtctgagtgggcggc

SEQ ID NO: 302 - protein, 471 aa, Homo sapiens; identical to SEQ ID NO: 235

SEQ ID NO: 303 - DNA, 1413 bp, Homo sapiens
  source 1..1413: mol_type = other DNA
atggagaccccagcccagctgctgttcctgcttctgctgtggctgccagataccaccggccaggtgcagctggttgagtcaggcggcggcgtggtgcagcccggcagaagcctgcggctgagctgcgccgccagcggcttcaccttcagcagctacggcatgcactgggtgagacaggcccctggcaaggggctggagtgggtggccgtgatctggtatgacggaagtaacaagtactacgccgacagcgtgaagggcagattcacgatcagcagagacaactccaagaacacgctgtacttgcagatgaacagcctgagagccgaggacacagccgtgtattactgcgccagagaccccagaggcgccaccctgtactactactactacggcatggacgtgtggggccagggcaccaccgtgaccgtgagcagtgccagcaccaagggccccagcgtgttccccctggccccctgcagtcggagcaccagcgaaagcaccgccgccctgggctgcctggtgaaagactatttccccgagcctgtgacagtgagctggaacagcggggccctcacctctggcgtgcacacgttcccagccgtgctgcagagcagcgggctgtacagcctgtcctctgtggtgaccgtgcccagcagcaatttcggcacccagacctacacgtgcaatgtggatcacaagcccagcaacacaaaagtggacaaaaccgtggagagaaagtgttgcgtggagtgccccccttgccccgccccccccgtggctggcccgtcagtgttcctgttccctcctaagcccaaggacaccctcatgatcagcagaacccccgaggtgacctgcgtggtcgtggacgtgagtcacgaggaccccgaggtccagttcaactggtacgtggatggagtggaggtgcacaacgccaagaccaagccccgggaggagcagtttaatagcacctttagggtggtgagcgtgctgaccgttgtacaccaggactggctgaacggcaaagagtacaaatgcaaggtttcaaataagggcctgcccgccccaattgagaagacaatcagcaagactaagggccagcctagggaaccccaggtctacactctgcccccctctcgggaggagatgaccaagaaccaggtgagcctgacctgcctggtgaagggcttctacccttctgacatcgctgtggagtgggagagcaatggacaacccgagaacaactacaagaccacccccccaatgctggactctgatggcagcttctttctgtacagcaagctgacagtggataaaagcaggtggcagcagggtaatgtgttcagctgcagcgtgatgcacgaggcactgcacaatcactacacccagaagagcctgtccctgtcccccggcaag

SEQ ID NO: 304 - DNA, 1705 bp, Homo sapiens
  source 1..1705: mol_type = other DNA
ggaaataagagagaaaagaagagtaagaagaaatataagagccaccatggagaccccagcccagctgctgttcctgcttctgctgtggctgccagataccaccggccaggtgcagctggttgagtcaggcggcggcgtggtgcagcccggcagaagcctgcggctgagctgcgccgccagcggcttcaccttcagcagctacggcatgcactgggtgagacaggcccctggcaaggggctggagtgggtggccgtgatctggtatgacggaagtaacaagtactacgccgacagcgtgaagggcagattcacgatcagcagagacaactccaagaacacgctgtacttgcagatgaacagcctgagagccgaggacacagccgtgtattactgcgccagagaccccagaggcgccaccctgtactactactactacggcatggacgtgtggggccagggcaccaccgtgaccgtgagcagtgccagcaccaagggccccagcgtgttccccctggccccctgcagtcggagcaccagcgaaagcaccgccgccctgggctgcctggtgaaagactatttccccgagcctgtgacagtgagctggaacagcggggccctcacctctggcgtgcacacgttcccagccgtgctgcagagcagcgggctgtacagcctgtcctctgtggtgaccgtgcccagcagcaatttcggcacccagacctacacgtgcaatgtggatcacaagcccagcaacacaaaagtggacaaaaccgtggagagaaagtgttgcgtggagtgccccccttgccccgccccccccgtggctggcccgtcagtgttcctgttccctcctaagcccaaggacaccctcatgatcagcagaacccccgaggtgacctgcgtggtcgtggacgtgagtcacgaggaccccgaggtccagttcaactggtacgtggatggagtggaggtgcacaacgccaagaccaagccccgggaggagcagtttaatagcacctttagggtggtgagcgtgctgaccgttgtacaccaggactggctgaacggcaaagagtacaaatgcaaggtttcaaataagggcctgcccgccccaattgagaagacaatcagcaagactaagggccagcctagggaaccccaggtctacactctgcccccctctcgggaggagatgaccaagaaccaggtgagcctgacctgcctggtgaagggcttctacccttctgacatcgctgtggagtgggagagcaatggacaacccgagaacaactacaagaccacccccccaatgctggactctgatggcagcttctttctgtacagcaagctgacagtggataaaagcaggtggcagcagggtaatgtgttcagctgcagcgtgatgcacgaggcactgcacaatcactacacccagaagagcctgtccctgtcccccggcaagtgataataggctggagcctcggtggccatgcttcttgccccttgggcctccccccagcccctcctccccttcctgcacccgtaccccccaaacaccattgtcacactccagtggtctttgaataaagtctgagtgggcggcaaaaaaaaaaaaaaaaaaaaaaaaaaaaaaaaaaaaaaaaaaaaaaaaaaaaaaaaaaaaaaaaaaaaaaaaaaaaaaaaaaaaaaaaaaaaaaaaaaaatctag

SEQ ID NO: 305 - protein, 451 aa, Homo sapiens; identical to SEQ ID NO: 21

SEQ ID NO: 306 - DNA, 1646 bp, Homo sapiens
  source 1..1646: mol_type = other DNA
tcaagcttttggaccctcgtacagaagctaatacgactcactatagggaaataagagagaaaagaagagtaagaagaaatataagagccaccatggaaacccccgctcagctgctgttcctgttgctgctgtggctgcccgacactaccgggcaagtgcagctggtggagagcggcggcggcgtggtgcagcccggcagaagccttaggctgagctgcgccgccagtggcttcaccttcagcagctacggcatgcactgggtgagacaggcccccggcaagggcctggagtgggtggctgtgatctggtacgacggcagcaacaagtactacgcagacagcgtgaagggaagattcaccatcagccgcgacaacagcaagaacaccctgtacctgcagatgaacagcctgagagctgaggacaccgcagtgtactactgcgccagagaccccaggggcgccaccctgtactactattattacggcatggatgtgtggggccagggcaccaccgtgaccgtgtccagcgccagcaccaagggcccaagcgtgttcccacttgccccatgcagcagaagcaccagcgagtcaaccgccgccctggggtgcttggtgaaagactacttccccgagcccgtgaccgtgagctggaacagcggagcactgaccagcggtgtgcacaccttccccgccgtgctgcagagcagcggactgtactccctgtccagcgtggtcaccgtgcccagcagcaacttcgggactcaaacttacacttgcaacgtggaccacaaaccctccaataccaaggtggataaaaccgtggagcggaagtgttgcgtggagtgccctccctgccccgcgcctcccgtggccggccccagcgtgttcctgttcccacccaagcctaaggatacactgatgatcagcagaacccccgaggtcacttgcgtggtggtggacgtgagccacgaggacccggaggtgcagtttaactggtacgttgacggggtggaggtgcacaacgctaagaccaagcccagagaagaacagttcaacagcaccttcagggtagtgagcgtgcttaccgtggtgcaccaggactggctgaacggcaaggagtacaagtgcaaggtgagcaacaagggattgcccgccccgatcgagaagacaatctctaagacgaagggccagcccagagagccccaggtgtacaccctgccccccagcagagaggagatgaccaagaatcaggtgagcctgacatgcttggtgaagggcttctaccccagcgacatcgccgtcgagtgggagagcaacggacagcccgagaacaactacaaaaccaccccacctatgctggacagcgacggcagcttcttcctgtactccaaactgaccgtggataagagcagatggcagcagggcaacgtgtttagctgcagcgtgatgcacgaggccctgcacaaccactacacccagaagagcctgtctttgagccccgggaagtgataataggctggagcctcggtggccatgcttcttgccccttgggcctccccccagcccctcctccccttcctgcacccgtaccccccaaacaccattgtcacactccagtggtctttgaataaagtctgagtgggcggc

SEQ ID NO: 307 - protein, 471 aa, Homo sapiens; identical to SEQ ID NO: 235

SEQ ID NO: 308 - DNA, 1413 bp, Homo sapiens
  source 1..1413: mol_type = other DNA
atggaaacccccgctcagctgctgttcctgttgctgctgtggctgcccgacactaccgggcaagtgcagctggtggagagcggcggcggcgtggtgcagcccggcagaagccttaggctgagctgcgccgccagtggcttcaccttcagcagctacggcatgcactgggtgagacaggcccccggcaagggcctggagtgggtggctgtgatctggtacgacggcagcaacaagtactacgcagacagcgtgaagggaagattcaccatcagccgcgacaacagcaagaacaccctgtacctgcagatgaacagcctgagagctgaggacaccgcagtgtactactgcgccagagaccccaggggcgccaccctgtactactattattacggcatggatgtgtggggccagggcaccaccgtgaccgtgtccagcgccagcaccaagggcccaagcgtgttcccacttgccccatgcagcagaagcaccagcgagtcaaccgccgccctggggtgcttggtgaaagactacttccccgagcccgtgaccgtgagctggaacagcggagcactgaccagcggtgtgcacaccttccccgccgtgctgcagagcagcggactgtactccctgtccagcgtggtcaccgtgcccagcagcaacttcgggactcaaacttacacttgcaacgtggaccacaaaccctccaataccaaggtggataaaaccgtggagcggaagtgttgcgtggagtgccctccctgccccgcgcctcccgtggccggccccagcgtgttcctgttcccacccaagcctaaggatacactgatgatcagcagaacccccgaggtcacttgcgtggtggtggacgtgagccacgaggacccggaggtgcagtttaactggtacgttgacggggtggaggtgcacaacgctaagaccaagcccagagaagaacagttcaacagcaccttcagggtagtgagcgtgcttaccgtggtgcaccaggactggctgaacggcaaggagtacaagtgcaaggtgagcaacaagggattgcccgccccgatcgagaagacaatctctaagacgaagggccagcccagagagccccaggtgtacaccctgccccccagcagagaggagatgaccaagaatcaggtgagcctgacatgcttggtgaagggcttctaccccagcgacatcgccgtcgagtgggagagcaacggacagcccgagaacaactacaaaaccaccccacctatgctggacagcgacggcagcttcttcctgtactccaaactgaccgtggataagagcagatggcagcagggcaacgtgtttagctgcagcgtgatgcacgaggccctgcacaaccactacacccagaagagcctgtctttgagccccgggaag

SEQ ID NO: 309 - DNA, 1705 bp, Homo sapiens
  source 1..1705: mol_type = other DNA
ggaaataagagagaaaagaagagtaagaagaaatataagagccaccatggaaacccccgctcagctgctgttcctgttgctgctgtggctgcccgacactaccgggcaagtgcagctggtggagagcggcggcggcgtggtgcagcccggcagaagccttaggctgagctgcgccgccagtggcttcaccttcagcagctacggcatgcactgggtgagacaggcccccggcaagggcctggagtgggtggctgtgatctggtacgacggcagcaacaagtactacgcagacagcgtgaagggaagattcaccatcagccgcgacaacagcaagaacaccctgtacctgcagatgaacagcctgagagctgaggacaccgcagtgtactactgcgccagagaccccaggggcgccaccctgtactactattattacggcatggatgtgtggggccagggcaccaccgtgaccgtgtccagcgccagcaccaagggcccaagcgtgttcccacttgccccatgcagcagaagcaccagcgagtcaaccgccgccctggggtgcttggtgaaagactacttccccgagcccgtgaccgtgagctggaacagcggagcactgaccagcggtgtgcacaccttccccgccgtgctgcagagcagcggactgtactccctgtccagcgtggtcaccgtgcccagcagcaacttcgggactcaaacttacacttgcaacgtggaccacaaaccctccaataccaaggtggataaaaccgtggagcggaagtgttgcgtggagtgccctccctgccccgcgcctcccgtggccggccccagcgtgttcctgttcccacccaagcctaaggatacactgatgatcagcagaacccccgaggtcacttgcgtggtggtggacgtgagccacgaggacccggaggtgcagtttaactggtacgttgacggggtggaggtgcacaacgctaagaccaagcccagagaagaacagttcaacagcaccttcagggtagtgagcgtgcttaccgtggtgcaccaggactggctgaacggcaaggagtacaagtgcaaggtgagcaacaagggattgcccgccccgatcgagaagacaatctctaagacgaagggccagcccagagagccccaggtgtacaccctgccccccagcagagaggagatgaccaagaatcaggtgagcctgacatgcttggtgaagggcttctaccccagcgacatcgccgtcgagtgggagagcaacggacagcccgagaacaactacaaaaccaccccacctatgctggacagcgacggcagcttcttcctgtactccaaactgaccgtggataagagcagatggcagcagggcaacgtgtttagctgcagcgtgatgcacgaggccctgcacaaccactacacccagaagagcctgtctttgagccccgggaagtgataataggctggagcctcggtggccatgcttcttgccccttgggcctccccccagcccctcctccccttcctgcacccgtaccccccaaacaccattgtcacactccagtggtctttgaataaagtctgagtgggcggcaaaaaaaaaaaaaaaaaaaaaaaaaaaaaaaaaaaaaaaaaaaaaaaaaaaaaaaaaaaaaaaaaaaaaaaaaaaaaaaaaaaaaaaaaaaaaaaaaaaatctag

SEQ ID NO: 310 - protein, 451 aa, Homo sapiens; identical to SEQ ID NO: 21

SEQ ID NO: 311 - DNA, 935 bp, Homo sapiens
  source 1..935: mol_type = other DNA
tcaagcttttggaccctcgtacagaagctaatacgactcactatagggaaataagagagaaaagaagagtaagaagaaatataagagccaccatggagacccctgcacagctgctgttcctgctgctgctgtggctgcccgacaccaccggcgacatccagatgacccagagccccagctccctgagcgccagcgtgggcgacagagtgaccatcacctgtagggccagccagagcatcaatagctacctggactggtaccagcagaagcctggcaaggcccccaagctgctgatctacgccgccagcagcctgcaaagcggcgtgcccagcagattcagcgggagcggcagcggcacagactttacactgaccatcagcagcctgcagcccgaggacttcgccacctactactgccaacagtattactccaccccctttaccttcggccccggaaccaaggtggagatcaagagaaccgtggccgcccccagcgtgttcatcttccccccctctgatgagcagctgaagagcggcaccgccagcgtggtgtgcctgctgaacaacttctatcccagagaggccaaggtgcagtggaaggtggacaacgccctgcagagcggcaacagccaggagagcgtgactgagcaggacagcaaggacagcacctacagcctgagcagcaccctgacactgtcaaaggccgattacgagaagcacaaagtgtacgcctgcgaggtgacccaccagggcctgagcagccccgtcaccaagagcttcaacaggggcgagtgctgataataggctggagcctcggtggccatgcttcttgccccttgggcctccccccagcccctcctccccttcctgcacccgtaccccccaaacaccattgtcacactccagtggtctttgaataaagtctgagtgggcggc

SEQ ID NO: 312 - protein, 234 aa, Homo sapiens; identical to SEQ ID NO: 236

SEQ ID NO: 313 - DNA, 702 bp, Homo sapiens
  source 1..702: mol_type = other DNA
atggagacccctgcacagctgctgttcctgctgctgctgtggctgcccgacaccaccggcgacatccagatgacccagagccccagctccctgagcgccagcgtgggcgacagagtgaccatcacctgtagggccagccagagcatcaatagctacctggactggtaccagcagaagcctggcaaggcccccaagctgctgatctacgccgccagcagcctgcaaagcggcgtgcccagcagattcagcgggagcggcagcggcacagactttacactgaccatcagcagcctgcagcccgaggacttcgccacctactactgccaacagtattactccaccccctttaccttcggccccggaaccaaggtggagatcaagagaaccgtggccgcccccagcgtgttcatcttccccccctctgatgagcagctgaagagcggcaccgccagcgtggtgtgcctgctgaacaacttctatcccagagaggccaaggtgcagtggaaggtggacaacgccctgcagagcggcaacagccaggagagcgtgactgagcaggacagcaaggacagcacctacagcctgagcagcaccctgacactgtcaaaggccgattacgagaagcacaaagtgtacgcctgcgaggtgacccaccagggcctgagcagccccgtcaccaagagcttcaacaggggcgagtgc

SEQ ID NO: 314 - DNA, 994 bp, Homo sapiens
  source 1..994: mol_type = other DNA
ggaaataagagagaaaagaagagtaagaagaaatataagagccaccatggagacccctgcacagctgctgttcctgctgctgctgtggctgcccgacaccaccggcgacatccagatgacccagagccccagctccctgagcgccagcgtgggcgacagagtgaccatcacctgtagggccagccagagcatcaatagctacctggactggtaccagcagaagcctggcaaggcccccaagctgctgatctacgccgccagcagcctgcaaagcggcgtgcccagcagattcagcgggagcggcagcggcacagactttacactgaccatcagcagcctgcagcccgaggacttcgccacctactactgccaacagtattactccaccccctttaccttcggccccggaaccaaggtggagatcaagagaaccgtggccgcccccagcgtgttcatcttccccccctctgatgagcagctgaagagcggcaccgccagcgtggtgtgcctgctgaacaacttctatcccagagaggccaaggtgcagtggaaggtggacaacgccctgcagagcggcaacagccaggagagcgtgactgagcaggacagcaaggacagcacctacagcctgagcagcaccctgacactgtcaaaggccgattacgagaagcacaaagtgtacgcctgcgaggtgacccaccagggcctgagcagccccgtcaccaagagcttcaacaggggcgagtgctgataataggctggagcctcggtggccatgcttcttgccccttgggcctccccccagcccctcctccccttcctgcacccgtaccccccaaacaccattgtcacactccagtggtctttgaataaagtctgagtgggcggcaaaaaaaaaaaaaaaaaaaaaaaaaaaaaaaaaaaaaaaaaaaaaaaaaaaaaaaaaaaaaaaaaaaaaaaaaaaaaaaaaaaaaaaaaaaaaaaaaaaatctag

SEQ ID NO: 315 - protein, 214 aa, Homo sapiens; identical to SEQ ID NO: 23

SEQ ID NO: 316 - DNA, 935 bp, Homo sapiens
  source 1..935: mol_type = other DNA
tcaagcttttggaccctcgtacagaagctaatacgactcactatagggaaataagagagaaaagaagagtaagaagaaatataagagccaccatggagacccccgcccagctgctgttcctgctgctgctgtggctgcccgacacaaccggcgacatccagatgacccagagccctagcagcctgagcgccagcgtgggcgacagagtgaccatcacctgcagagccagccagtccatcaacagctacctggactggtaccagcagaagcccggcaaggcccccaaactgctgatctatgctgccagctcactgcagagcggcgtgcctagcagattcagcggctctggcagcggaaccgacttcactctgaccatcagcagcctgcagcccgaggacttcgccacctactactgccagcagtactacagcacccccttcaccttcgggcccggcactaaggtggagatcaagagaaccgtggccgccccaagcgtgttcatcttccccccctccgacgagcagctgaagagcggcaccgccagcgtggtgtgcctgctcaacaacttctaccccagagaggccaaggtgcagtggaaggtggacaacgccctgcagtcgggcaacagccaggagagcgtgaccgagcaggacagcaaggacagcacctacagcctgagcagcactctgaccctgagcaaggctgattacgagaagcacaaggtctacgcctgcgaggtgacccaccagggcctcagcagcccagtgaccaagagcttcaacagaggagagtgctgataataggctggagcctcggtggccatgcttcttgccccttgggcctccccccagcccctcctccccttcctgcacccgtaccccccaaacaccattgtcacactccagtggtctttgaataaagtctgagtgggcggc

SEQ ID NO: 317 - protein, 234 aa, Homo sapiens; identical to SEQ ID NO: 236

SEQ ID NO: 318 - DNA, 702 bp, Homo sapiens
  source 1..702: mol_type = other DNA
atggagacccccgcccagctgctgttcctgctgctgctgtggctgcccgacacaaccggcgacatccagatgacccagagccctagcagcctgagcgccagcgtgggcgacagagtgaccatcacctgcagagccagccagtccatcaacagctacctggactggtaccagcagaagcccggcaaggcccccaaactgctgatctatgctgccagctcactgcagagcggcgtgcctagcagattcagcggctctggcagcggaaccgacttcactctgaccatcagcagcctgcagcccgaggacttcgccacctactactgccagcagtactacagcacccccttcaccttcgggcccggcactaaggtggagatcaagagaaccgtggccgccccaagcgtgttcatcttccccccctccgacgagcagctgaagagcggcaccgccagcgtggtgtgcctgctcaacaacttctaccccagagaggccaaggtgcagtggaaggtggacaacgccctgcagtcgggcaacagccaggagagcgtgaccgagcaggacagcaaggacagcacctacagcctgagcagcactctgaccctgagcaaggctgattacgagaagcacaaggtctacgcctgcgaggtgacccaccagggcctcagcagcccagtgaccaagagcttcaacagaggagagtgc

SEQ ID NO: 319 - DNA, 994 bp, Homo sapiens
  source 1..994: mol_type = other DNA
ggaaataagagagaaaagaagagtaagaagaaatataagagccaccatggagacccccgcccagctgctgttcctgctgctgctgtggctgcccgacacaaccggcgacatccagatgacccagagccctagcagcctgagcgccagcgtgggcgacagagtgaccatcacctgcagagccagccagtccatcaacagctacctggactggtaccagcagaagcccggcaaggcccccaaactgctgatctatgctgccagctcactgcagagcggcgtgcctagcagattcagcggctctggcagcggaaccgacttcactctgaccatcagcagcctgcagcccgaggacttcgccacctactactgccagcagtactacagcacccccttcaccttcgggcccggcactaaggtggagatcaagagaaccgtggccgccccaagcgtgttcatcttccccccctccgacgagcagctgaagagcggcaccgccagcgtggtgtgcctgctcaacaacttctaccccagagaggccaaggtgcagtggaaggtggacaacgccctgcagtcgggcaacagccaggagagcgtgaccgagcaggacagcaaggacagcacctacagcctgagcagcactctgaccctgagcaaggctgattacgagaagcacaaggtctacgcctgcgaggtgacccaccagggcctcagcagcccagtgaccaagagcttcaacagaggagagtgctgataataggctggagcctcggtggccatgcttcttgccccttgggcctccccccagcccctcctccccttcctgcacccgtaccccccaaacaccattgtcacactccagtggtctttgaataaagtctgagtgggcggcaaaaaaaaaaaaaaaaaaaaaaaaaaaaaaaaaaaaaaaaaaaaaaaaaaaaaaaaaaaaaaaaaaaaaaaaaaaaaaaaaaaaaaaaaaaaaaaaaaaatctag

SEQ ID NO: 320 - protein, 214 aa, Homo sapiens; identical to SEQ ID NO: 23

SEQ ID NO: 321 - DNA, 935 bp, Homo sapiens
  source 1..935: mol_type = other DNA
tcaagcttttggaccctcgtacagaagctaatacgactcactatagggaaataagagagaaaagaagagtaagaagaaatataagagccaccatggagactcccgcccagctgctgttcctgttgctgctgtggctgcccgacaccacaggggacatccagatgactcagagtcccagcagcctgagcgccagcgtcggcgacagagttaccatcacctgccgggccagccagagcattaacagctacctggactggtaccagcagaagcctggaaaggcccccaagctgctgatctacgccgccagcagcctgcagagcggcgtgcctagcagattcagcggcagcggaagcggcaccgacttcaccctaaccatcagcagtctgcagccagaggacttcgcgacctactactgccagcagtactactcaacacccttcaccttcggccccggcaccaaggtggagatcaagagaaccgtggccgccccctctgtgttcatcttcccccccagcgacgagcagctgaagtccggcaccgcaagcgtggtgtgcctgctgaacaacttctaccccagagaggccaaggtgcagtggaaggtggacaacgccctgcagtccggcaacagccaggagagcgtgaccgagcaggacagcaaggactccacctacagcctcagcagcacactgaccctgagcaaggccgactacgagaagcacaaggtgtacgcctgcgaggtgacccaccagggcctgagcagccccgtgaccaagagcttcaacagaggagagtgctgataataggctggagcctcggtggccatgcttcttgccccttgggcctccccccagcccctcctccccttcctgcacccgtaccccccaaacaccattgtcacactccagtggtctttgaataaagtctgagtgggcggc

SEQ ID NO: 322 - protein, 234 aa, Homo sapiens; identical to SEQ ID NO: 236

SEQ ID NO: 323 - DNA, 702 bp, Homo sapiens
  source 1..702: mol_type = other DNA
atggagactcccgcccagctgctgttcctgttgctgctgtggctgcccgacaccacaggggacatccagatgactcagagtcccagcagcctgagcgccagcgtcggcgacagagttaccatcacctgccgggccagccagagcattaacagctacctggactggtaccagcagaagcctggaaaggcccccaagctgctgatctacgccgccagcagcctgcagagcggcgtgcctagcagattcagcggcagcggaagcggcaccgacttcaccctaaccatcagcagtctgcagccagaggacttcgcgacctactactgccagcagtactactcaacacccttcaccttcggccccggcaccaaggtggagatcaagagaaccgtggccgccccctctgtgttcatcttcccccccagcgacgagcagctgaagtccggcaccgcaagcgtggtgtgcctgctgaacaacttctaccccagagaggccaaggtgcagtggaaggtggacaacgccctgcagtccggcaacagccaggagagcgtgaccgagcaggacagcaaggactccacctacagcctcagcagcacactgaccctgagcaaggccgactacgagaagcacaaggtgtacgcctgcgaggtgacccaccagggcctgagcagccccgtgaccaagagcttcaacagaggagagtgc

SEQ ID NO: 324 - DNA, 994 bp, Homo sapiens
  source 1..994: mol_type = other DNA
ggaaataagagagaaaagaagagtaagaagaaatataagagccaccatggagactcccgcccagctgctgttcctgttgctgctgtggctgcccgacaccacaggggacatccagatgactcagagtcccagcagcctgagcgccagcgtcggcgacagagttaccatcacctgccgggccagccagagcattaacagctacctggactggtaccagcagaagcctggaaaggcccccaagctgctgatctacgccgccagcagcctgcagagcggcgtgcctagcagattcagcggcagcggaagcggcaccgacttcaccctaaccatcagcagtctgcagccagaggacttcgcgacctactactgccagcagtactactcaacacccttcaccttcggccccggcaccaaggtggagatcaagagaaccgtggccgccccctctgtgttcatcttcccccccagcgacgagcagctgaagtccggcaccgcaagcgtggtgtgcctgctgaacaacttctaccccagagaggccaaggtgcagtggaaggtggacaacgccctgcagtccggcaacagccaggagagcgtgaccgagcaggacagcaaggactccacctacagcctcagcagcacactgaccctgagcaaggccgactacgagaagcacaaggtgtacgcctgcgaggtgacccaccagggcctgagcagccccgtgaccaagagcttcaacagaggagagtgctgataataggctggagcctcggtggccatgcttcttgccccttgggcctccccccagcccctcctccccttcctgcacccgtaccccccaaacaccattgtcacactccagtggtctttgaataaagtctgagtgggcggcaaaaaaaaaaaaaaaaaaaaaaaaaaaaaaaaaaaaaaaaaaaaaaaaaaaaaaaaaaaaaaaaaaaaaaaaaaaaaaaaaaaaaaaaaaaaaaaaaaaatctag

SEQ ID NO: 325 - protein, 214 aa, Homo sapiens; identical to SEQ ID NO: 23

SEQ ID NO: 326 - protein, 234 aa, Homo sapiens; identical to SEQ ID NO: 236

SEQ ID NO: 327 - protein, 20 aa, Homo sapiens
METPAQLLFLLLLWLPDTTG

SEQ ID NO: 328 - protein, 107 aa, Homo sapiens
DIQMTQSPSSLSASVGDRVTITCRASQSINSYLDWYQQKPGKAPKLLIYAASSLQSGVPSRFSGSGSGTDFTLTISSLQPEDFATYYCQQYYSTPFTFGPGTKVEIK

SEQ ID NO: 329 - protein, 107 aa, Homo sapiens [sequence omitted]

SEQ ID NO: 330 - DNA, 702 bp, synthetic construct
  misc_feature 1..702: note = Treme_LC-CO01
  source 1..702: mol_type = other DNA
atggagacgcccgcgcagctcctcttcctcctcctcctctggctccccgacaccaccggggatatccagatgacccagtccccgagctcactctccgccagcgttggggaccgggttaccattacctgccgggcgagccagagcatcaacagctacctcgactggtaccaacagaagcccggcaaggcccccaagctccttatttacgccgccagctccttacagagcggggtgccctccaggttcagcggctccggctccggcaccgacttcaccctaaccatcagcagcctccagcccgaagacttcgccacgtactactgccagcagtactacagcacccccttcaccttcgggcccggcaccaaggtggagatcaagaggaccgtggccgcccccagcgtgtttatcttcccgcccagcgacgagcagttaaagtccggcaccgcgagcgtggtgtgtctgctgaacaatttctacccccgggaggccaaggtgcagtggaaggtggataacgccctgcagagcggcaatagccaggagtccgtgaccgagcaggacagcaaggacagcacctactccctcagcagtaccctgactctgagcaaggccgattacgagaagcataaggtgtacgcctgcgaggtgacgcaccaagggctgagctcacccgtaaccaagagcttcaacaggggggagtgc

SEQ ID NO: 331 - DNA, 702 bp, synthetic construct
  misc_feature 1..702: note = Treme_LC-CO02
  source 1..702: mol_type = other DNA
atggagacacccgcccagcttctcttcctcttgctcctttggctccccgacaccacgggggacatccagatgacccagtcgcccagcagcctcagcgccagcgttggcgacagggtcaccataacctgtagggccagccagagcatcaacagctacctcgactggtaccagcagaagccgggcaaggcgcccaagctcctcatatacgccgcctccagcctccagtccggcgtccccagccgcttctcgggctcgggcagcggcaccgacttcacgctcaccatctcctcgctccagcccgaggactttgccacctactactgtcagcagtactattcgacccccttcaccttcgggccggggaccaaggtggagatcaaacggaccgtggccgcccccagcgtctttatcttccctcccagcgacgagcagttgaaaagcgggaccgcctccgtggtgtgcctgctgaacaacttttatcccagggaggccaaagtgcagtggaaggtggacaatgccctgcagagtggcaactcccaggagagcgtgaccgagcaagactccaaggattccacctatagcctgtccagcaccctcaccctgtccaaggccgactatgagaagcataaggtctacgcctgcgaggtcacccaccaggggctgtccagccccgtgaccaagagcttcaacaggggcgagtgc

SEQ ID NO: 332 - DNA, 702 bp, synthetic construct
  misc_feature 1..702: note = Treme_LC-CO03
  source 1..702: mol_type = other DNA
atggagacacccgcccagctcctcttcctcctccttctctggctccccgacaccaccggggatatccagatgacccagagccccagctccctatcggcctccgtaggcgaccgcgtcaccatcacgtgccgagcctcccaatccattaatagctatttggactggtaccaacagaagccgggcaaggcaccgaagctcttgatctacgccgccagctcgctccaaagcggcgtaccgagccgcttcagcggcagcggctccgggaccgatttcaccctcaccatcagcagcctccagcccgaggacttcgccacctactattgccagcagtattacagcacccccttcaccttcgggcccggaaccaaggtggagatcaagcgcaccgtggccgcccccagcgtgtttatctttcccccgagcgatgagcagctgaaaagcggcactgccagcgtggtgtgcctgctgaacaacttctacccgcgcgaggcgaaggtccaatggaaagtggacaatgccctgcagagcgggaatagccaggagtccgtgaccgagcaggacagcaaggacagcacctacagcctgtccagcaccctgacgctgtccaaagccgactacgagaagcacaaggtctacgcctgcgaggtgacccaccagggcctgagcagccccgtgaccaagagcttcaataggggggagtgc

SEQ ID NO: 333 - DNA, 702 bp, synthetic construct
  misc_feature 1..702: note = Treme_LC-CO04
  source 1..702: mol_type = other DNA
atggagacgcccgcccagctcctcttcctcctcctcctctggctccccgacaccaccggggatatccagatgacccagtcccccagcagcctcagcgcctccgtcggggacagggtcaccatcacctgccgggcctcccagtccatcaattcctacctcgactggtaccagcagaagcccggcaaggcccccaagctcctcatctacgccgccagcagcttgcagagcggcgtcccttcccgtttcagcggcagcgggagcggcacggacttcaccctcaccatctcgagcctccaacccgaggatttcgccacctactactgccagcagtattacagcacccccttcacctttggcccagggaccaaggtggagataaagcggacggtggccgcccccagcgtgttcatcttcccgcccagcgacgaacagctgaaaagcgggaccgccagcgtggtgtgcctgctgaacaacttctaccccagggaggccaaggtacagtggaaggtggacaatgccctgcaaagcgggaacagccaggagagcgtgaccgagcaggactccaaagattccacctacagcctgtccagcaccctgactctatccaaggccgactacgaaaaacacaaggtgtacgcctgcgaagtcacccaccagggtctgagcagccccgtgaccaagagctttaacaggggggagtgc

SEQ ID NO: 334 - DNA, 702 bp, synthetic construct
  misc_feature 1..702: note = Treme_LC-CO05
  source 1..702: mol_type = other DNA
atggaaacccccgcccagctcctcttcctcttactcctctggctccccgataccacaggggacatccagatgacccagagccccagctccctctccgccagcgtcggcgaccgggtcaccatcacgtgcagggccagccagagcatcaactcgtacctcgactggtatcagcagaagcccgggaaggcccccaagctcctcatctacgccgcctcctccctccagagcggcgtcccgtcgaggttcagcgggtcggggtcgggcaccgacttcaccctaaccatctccagcctacagccggaggactttgccacctactactgccagcaatactactccacgcccttcaccttcggccccggcaccaaggtggaaatcaagaggaccgtggccgccccctccgtgtttatcttcccgcccagcgacgagcagctcaagagcgggaccgccagcgtggtgtgcctgctcaataacttctacccccgggaggccaaagtgcagtggaaggtggacaacgcgctgcagagcggtaacagccaggagtccgtgacggagcaggactccaaggattcgacctactccctgagctcgacgctgaccctgagcaaggccgactacgagaagcacaaggtgtacgcctgcgaggtgacccaccaagggctgtccagccccgtgaccaaatccttcaacagaggggagtgc

SEQ ID NO: 335 - DNA, 702 bp, synthetic construct
  misc_feature 1..702: note = Treme_LC-CO06
  source 1..702: mol_type = other DNA
atggagacgcccgcccagctcctctttcttttgctcctctggctcccggacacaaccggcgatatccagatgacccaatcccccagcagcctcagcgccagcgtcggggacagggtcaccatcacctgccgggccagccagagcatcaacagctatctcgactggtaccagcagaagcccggcaaggcccccaagcttctaatatacgccgccagctccctccaaagcggcgtaccgagccggttctccggcagcggcagcgggaccgacttcaccctcacgatcagcagcctccagcccgaagacttcgcgacctattactgccaacagtattacagcaccccgttcaccttcgggcccgggaccaaggtagagatcaagcgcaccgtggccgcaccctccgtgtttatcttccccccgagcgatgagcagctgaaaagcgggaccgccagcgtggtgtgcctgctgaataatttttaccccagggaagccaaggtgcagtggaaggtggacaacgccctgcagtccggcaactcccaggagtccgtgacggagcaggacagcaaggacagcacctacagcctgtccagcaccctcaccctgagcaaggccgactacgaaaagcacaaggtctacgcctgtgaggtgacgcaccaggggctgagctcccccgtcaccaagagcttcaatcgcggggagtgt

SEQ ID NO: 336 - DNA, 702 bp, synthetic construct
  misc_feature 1..702: note = Treme_LC-CO07
  source 1..702: mol_type = other DNA
atggagactcccgcccagctccttttcctccttctcctctggttgcccgataccacgggcgacatccagatgacgcagagcccctccagcctcagcgcctccgttggcgatagggtcaccatcacgtgtcgagccagccagagcatcaactcctaccttgactggtaccagcagaagcccggaaaggcgcccaagctcctaatctacgccgccagcagcctccaaagcggcgtccccagccgcttcagcgggtccgggtccggcaccgacttcaccctcaccatatcgagcctacagcccgaggattttgcaacgtactattgccagcaatattatagcacccccttcaccttcggccccggcaccaaggtcgagattaagcggaccgtggcggcccccagcgtgttcatcttccctccgagcgatgagcagctgaaaagcgggaccgccagcgtggtctgcctgctgaacaacttctaccccagggaggccaaggtccagtggaaggtcgacaacgccctccagtctggcaacagccaggagtccgtgaccgagcaggacagcaaggactccacgtactccctgtcgagcaccctgaccctgagcaaggccgactacgagaagcacaaggtctacgcctgtgaggtgacccatcagggcctgtccagccccgtgaccaagagctttaacaggggagagtgc

SEQ ID NO: 337 - DNA, 702 bp, synthetic construct
  misc_feature 1..702: note = Treme_LC-CO08
  source 1..702: mol_type = other DNA
atggagacacccgcccagctcctcttcctcctcctcctatggcttccagacaccaccggagacatccagatgacccagagccccagctccctctccgccagcgtcggcgaccgagtcaccatcacctgcagggcgagccagagcataaacagctacctcgactggtatcagcagaagccgggcaaagccccgaagctgctcatttacgccgccagcagtctccagagcggcgtacccagcaggttcagcggcagcggctccggcaccgacttcaccctcacgataagcagcctccagcccgaggacttcgcgacctactactgccagcagtattactccacgcccttcacctttggccccgggaccaaggtggagatcaagcgcaccgtggccgccccgagcgtgttcatcttcccacccagcgatgagcagctgaaaagcggcacggccagcgtcgtctgcctgctgaataatttctacccccgggaggccaaggtgcagtggaaagtggacaatgccctccagagcggcaacagccaggagagcgtgaccgagcaggactccaaggacagcacctacagcctgtcctcgacgctgaccctgtccaaggccgactacgagaaacacaaagtgtatgcctgcgaggtcacccaccagggactgagcagcccggtcacgaagtccttcaaccggggcgagtgc

SEQ ID NO: 338 - DNA, 702 bp, synthetic construct
  misc_feature 1..702: note = Treme_LC-CO09
  source 1..702: mol_type = other DNA
atggagacgcccgcgcagctcctcttcctcctcctcctctggctccccgacaccaccggcgacatccagatgacccagtctccgagctccctctccgcgagcgtcggcgaccgggtcaccataacctgcagggccagccagagcatcaacagctatctcgactggtaccagcagaagcccggcaaggcccccaaactcctcatctacgccgcctccagcctccagagcggcgttcccagccggttcagcgggtccggcagcggcacggactttaccctcaccatcagcagcctccaaccggaggacttcgccacctactactgccagcagtattacagcacccccttcacctttgggcccggcactaaggtggagatcaagcgcaccgtggccgcccccagcgtgttcatcttcccgcccagcgacgaacagctgaagtccggcacagccagcgtggtgtgcctgctgaacaatttctaccccagggaagccaaggtgcagtggaaggtggacaacgccctgcagtccggcaacagccaggagtccgtgacggaacaggactccaaggactccacctacagcctatcctccactctcaccctgtccaaggccgactacgagaagcacaaggtgtacgcctgcgaggtgacccaccagggcctctccagccccgttaccaaaagcttcaaccggggagagtgc

SEQ ID NO: 339 - DNA, 702 bp, synthetic construct
  misc_feature 1..702: note = Treme_LC-CO10
  source 1..702: mol_type = other DNA
atggagacgcccgcccagcttctcttcctcctcctcctctggcttccggacaccaccggcgacatccagatgacgcagtcgcccagcagcctcagcgcctccgtcggggacagggtcaccatcacctgcagggcctcccagtccatcaactcctacctcgactggtaccagcagaagccggggaaagcccccaagctcttaatctacgccgcgagcagcctccagagcggggtaccctcgaggttcagcggcagcggcagcggcacggacttcacccttaccatcagcagcctccagcccgaggatttcgccacctactactgtcagcagtactacagcacccccttcaccttcggccccggtaccaaggtggagatcaagaggaccgtggccgcccccagcgtcttcatcttcccgcccagcgatgagcagctgaaatccggcaccgccagcgtggtttgcctgctgaacaacttctaccctcgggaggccaaggtgcaatggaaggtggacaacgcgctgcagtcgggcaacagccaggaaagcgtgaccgagcaggactccaaggacagcacctatagcctgagctccacgctgaccctgtccaaggcggattacgagaagcacaaggtgtacgcctgcgaggtcacgcaccagggcctgtcaagtccggtgaccaaaagcttcaacaggggcgagtgc

SEQ ID NO: 340 - DNA, 702 bp, synthetic construct
  misc_feature 1..702: note = Treme_LC-CO11
  source 1..702: mol_type = other DNA
atggagactcccgcccagctccttttcctcctcctcctctggctcccggacaccaccggcgatatccagatgacccagagcccgtcctccctaagcgccagcgtaggcgacagggtcacaatcacctgcagggccagccagagcatcaacagctatttggactggtaccagcagaagcccggcaaagccccaaagctcctaatctacgccgccagctcccttcagagcggcgtcccctcccggttttccggtagcggatccgggaccgactttaccttgaccatcagcagcctccagccggaagatttcgccacctattactgccagcagtactacagcacccccttcaccttcggccccggcaccaaggtggaaatcaaaaggaccgtggccgcccccagcgtgttcattttccctcccagcgatgagcagctgaagtcggggaccgcctccgtggtctgcctgctgaacaacttttatcccagggaggccaaggtgcaatggaaagtggacaacgccctgcaaagcgggaacagccaggagagcgtgaccgagcaggacagcaaggactccacctacagcctgtcctccaccctgaccctcagcaaggcggactacgaaaagcataaggtgtatgcctgcgaggtgacccaccaggggctgtccagcccggtgacgaagtccttcaacaggggggagtgc

SEQ ID NO: 341 - DNA, 702 bp, synthetic construct
  misc_feature 1..702: note = Treme_LC-CO12
  source 1..702: mol_type = other DNA
atggaaacgcccgcccaactacttttcctcctcctcctctggctccccgacaccacgggcgacatccagatgacccaatcccccagcagcctcagcgccagcgtaggggatagggtcaccataacctgccgcgccagccagagcatcaatagctatctcgactggtaccagcagaagccggggaaggccccgaagctcctcatctacgccgcctcctcactccagagcggggtcccctctcgcttcagcggaagcgggagcggcaccgacttcacgctcaccatctcctccctccagcccgaggactttgctacctactactgccagcagtactatagcacccccttcaccttcgggcccggcaccaaggtggagatcaagaggacggtggccgccccctccgtgttcatattccccccgagcgacgagcagctgaaaagcggcaccgccagcgtggtgtgcctgctgaataacttctaccccagggaagccaaggtgcagtggaaggtggacaacgccctgcagagcggcaacagccaggagtccgtcaccgaacaggactcgaaggacagcacgtacagcctcagcagcaccctgaccctgagtaaggccgactacgagaagcataaggtgtacgcatgcgaagtcacccaccagggcctgagcagccccgtgacaaagtccttcaaccggggggagtgt

SEQ ID NO: 342 - DNA, 702 bp, synthetic construct
  misc_feature 1..702: note = Treme_LC-CO13
  source 1..702: mol_type = other DNA
atggaaacccccgcccagctcctcttcctcctcctcctctggctccccgacaccacgggggacatccagatgacccagagccccagctccctctccgccagcgtcggagatcgggtcacgatcacctgccgggccagccagtccatcaacagctacctcgactggtaccagcagaagcccggcaaggcccccaagctccttatatacgccgcctccagccttcagagcggggtcccgagccgattcagcggctccgggtccggcacagatttcaccctcaccatcagctccctacagccggaagacttcgccacctactactgccagcagtactactcaaccccgttcacgtttggccccggtacaaaggtggagatcaaaaggaccgtcgccgcccccagcgtgttcattttcccgcccagcgacgagcagctgaaaagcggcactgccagcgtggtgtgcctgctcaacaacttttaccccagggaggccaaggtgcagtggaaagtggacaacgccctccagagcgggaacagccaggagagcgtcaccgagcaggacagcaaagacagcacgtactctctgtccagcaccctgaccctcagcaaggcggactatgagaaacacaaggtgtacgcctgcgaagtgacccaccagggcctgagcagcccggtgaccaagtccttcaacaggggcgagtgc

SEQ ID NO: 343 - DNA, 702 bp, synthetic construct
  misc_feature 1..702: note = Treme_LC-CO14
  source 1..702: mol_type = other DNA
atggagactcccgcccagctcctctttcttctcctcctatggctccccgacaccacaggcgacatccagatgacccagagcccctccagcctcagcgcctcggtcggcgacagggtcaccatcacctgcagggccagccagtccatcaatagctacctcgactggtaccagcagaagcccggcaaggcccccaagctccttatctacgccgccagcagcctccagagcggggtcccgagccgtttcagcggcagcggtagcggcacggacttcaccctcaccatcagcagcctccagcccgaggattttgccacctactactgccagcagtattactccacccccttcaccttcggacccgggacgaaggtagagatcaagaggacggtggcggccccctcggtgttcatcttcccgcccagcgatgagcagctaaagtccggcaccgccagcgtggtgtgcctgctgaacaacttttacccgagggaggccaaggttcagtggaaggtggacaacgccctgcagagcgggaactcccaggagtccgtgacggagcaggacagcaaggacagcacctacagcctgagcagcaccctgaccctgagcaaggccgattacgagaagcacaaggtgtacgcctgcgaggtgacccatcagggcctgagctccccggtcaccaagagcttcaacaggggcgagtgc

SEQ ID NO: 344 - DNA, 702 bp, synthetic construct
  misc_feature 1..702: note = Treme_LC-CO15
  source 1..702: mol_type = other DNA
atggaaacgcccgcccagctcctctttctcctcctcctctggctccccgacaccacgggcgacatccagatgacccagtcccccagcagcctctccgccagcgtcggcgatagggtcaccatcacctgccgggcgtcccaaagcatcaactcctacctggactggtaccagcagaagcccggcaaggcgcccaagctccttatctacgccgccagcagcctccagagcggcgtccccagcaggttctccgggagcgggtccggcaccgacttcaccctcacgatctccagcctccagcccgaggacttcgccacgtactattgtcagcagtactactccaccccgttcaccttcggcccgggcaccaaggtggagatcaagaggacggtggccgcgcccagcgtgttcatcttccctccctccgatgagcagctgaagtccggcaccgcctccgtggtctgtctgctgaacaacttctacccccgggaggccaaggtgcagtggaaggtggataatgccctgcagagcggcaacagccaggagagcgtgaccgagcaggactccaaggacagcacctacagcctcagctccaccctgaccctgagcaaggccgactacgagaagcacaaggtgtatgcctgtgaggtcacccatcaagggctgtcctcccccgtgaccaagagcttcaaccgtggcgagtgt

SEQ ID NO: 345 - DNA, 702 bp, synthetic construct
  misc_feature 1..702: note = Treme_LC-CO16
  source 1..702: mol_type = other DNA
atggagacgcccgcccaattgctgttcttgctcctcctctggctccccgacacgacgggcgacatccagatgacccagagccccagctccctatccgccagcgtcggcgacagggtcaccatcacctgccgcgcctcccagagcatcaatagctacctcgactggtaccagcagaagcccggcaaggcccccaaactcctaatctacgccgcctcctcgctccaatccggagtccccagccggttcagcgggagcggcagcggaacggatttcaccctcacgatcagctccctccagccggaggactttgccacctactactgtcagcagtactactccacgccctttacctttgggcccggcaccaaggttgagatcaagcggacggtggccgcgcccagcgtgttcatcttcccgccctccgacgagcagctcaagagcgggaccgccagcgtggtctgtctgctgaacaacttctacccgagggaggccaaggtgcagtggaaggtggacaacgccctgcagagcggcaactcccaggagagcgtcaccgagcaagactcgaaggacagcacctactcactgtccagcaccctgaccctgtcgaaggccgactatgagaagcacaaggtctacgcctgcgaggtgacccaccagggccttagcagcccggtgaccaagagcttcaacaggggcgagtgc

SEQ ID NO: 346 - DNA, 702 bp, synthetic construct
  misc_feature 1..702: note = Treme_LC-CO17
  source 1..702: mol_type = other DNA
atggagacacccgcccagcttctcttcctcctcctcctctggctccccgacaccaccggcgacatccagatgacccaaagccccagcagcctctccgccagcgtcggcgacagggtcaccataacttgccgggcctcccagtccatcaatagctacctagactggtatcagcagaagcccggcaaggcccccaaattactcatctacgccgccagctccctccagtccggcgtccccagccggttcagcgggagcggctcgggcaccgacttcacgctcaccatttccagcctccagccggaggacttcgcgacatactactgccagcagtactacagcacccccttcacgttcgggcccggcaccaaggtggagatcaagcggaccgtggccgccccgagcgtgttcatcttcccgccctccgatgagcagctgaagtccggcaccgcttccgtggtgtgtctcctgaacaacttttacccaagggaggccaaggtgcagtggaaagttgacaacgctctgcagagcggcaacagccaggagagcgtgaccgagcaggacagcaaagactccacctacagccttagcagcacactgaccctgtccaaggccgactacgagaagcacaaggtgtacgcctgtgaggtgacccaccaggggctgtccagccccgtgaccaagagcttcaataggggggagtgc

SEQ ID NO: 347 - DNA, 702 bp, synthetic construct
  misc_feature 1..702: note = Treme_LC-CO18
  source 1..702: mol_type = other DNA
atggagacgccggcccagctcctctttctcctcctcctctggctcccggacacgacgggggatatccagatgacccagagccccagctccctcagcgccagcgtcggcgatcgagtcacgatcacctgccgggcgtcccagagcatcaacagttacctcgactggtaccagcagaagcccggcaaggcccccaagctcttaatctacgccgccagcagcctccagagcggcgttccgtccaggttcagcggctccggctcggggaccgacttcaccttgaccatcagcagcctccagcccgaggacttcgccacctactactgtcagcagtactattccaccccattcaccttcggccccggcaccaaggtcgagatcaagcgaaccgtggccgcccccagcgtgtttatcttcccgcccagcgacgagcagctgaaaagcggcaccgccagcgtggtgtgcctgctgaacaacttctacccgagggaggccaaggtgcagtggaaggtggacaatgccctgcagagcggcaactcccaggagagcgtgacggagcaggacagcaaggactccacctacagcttgtcaagcaccctgacgcttagcaaggctgactatgagaagcacaaggtttacgcctgcgaagtgacccatcaagggctgagctcacccgtgacgaaaagcttcaataggggtgagtgc

SEQ ID NO: 348 - DNA, 702 bp, synthetic construct
  misc_feature 1..702: note = Treme_LC-CO19
  source 1..702: mol_type = other DNA
atggagacgcccgcccagctcctcttcctcctcctcctctggctccccgataccaccggcgacatccagatgacccagtcaccctccagcctcagcgcgagcgtcggggatcgagtaactatcacctgccgggccagccagagcatcaacagctacctcgattggtaccagcaaaagcccggcaaggcccccaaattactcatatacgcggccagctccctccagtccggagtcccgtcccggttcagcggcagcgggagcgggaccgacttcaccctcacaatctcaagcctccagcccgaggacttcgccacgtactattgccagcagtactacagcacccccttcaccttcggccccggcaccaaggtggagatcaagaggacggtggccgcgcccagcgtcttcatctttcccccctccgacgaacagctgaaaagcgggaccgcctcggtggtgtgcctgctgaacaacttttacccaagggaggccaaggtgcagtggaaggtggacaacgccctccagtccgggaactcccaggagtccgtgaccgagcaggactctaaggacagcacctactccctgtccagcacgctgacgctcagcaaggcggactacgagaagcacaaggtgtacgcctgtgaggtgacccaccagggcctgtcgagccccgtcaccaagagcttcaacaggggcgagtgt

SEQ ID NO: 349 - DNA, 702 bp, synthetic construct
  misc_feature 1..702: note = Treme_LC-CO20
  source 1..702: mol_type = other DNA
atggagactcccgcccagctcctctttctcctcctcctctggctccccgacacgaccggggacatccaaatgacccagagccccagcagcctcagcgcaagcgtaggcgatcgggtcaccatcacctgcagggccagccagtccatcaactcgtacctcgactggtaccagcagaagcccggcaaagctcccaagctcctcatatacgccgctagctccctccagagcggggtccctagtaggttcagcgggtccgggagcggcaccgacttcacgctcaccatctccagcttgcagcccgaggacttcgccacttactactgccagcagtactacagcaccccctttacgtttggccccggcaccaaggtggagatcaagaggaccgtggccgcccccagcgtgttcatcttcccgcccagcgacgagcagctgaagtcgggcaccgcttcagttgtctgtctgctgaacaacttttacccccgcgaggccaaggtgcagtggaaggtggacaacgccctccagagcgggaacagccaggagagcgtgacggagcaggactccaaggatagcacctacagcctgagttcgaccctcacgctgagcaaggccgactacgagaaacacaaggtgtatgcctgcgaggtgacccaccaggggctttcctcccccgtcaccaagagcttcaataggggggagtgc

SEQ ID NO: 350 - DNA, 702 bp, synthetic construct
  misc_feature 1..702: note = Treme_LC-CO21
  source 1..702: mol_type = other DNA
atggagacgcccgcgcaacttctcttcctactcctcctctggctccccgacaccaccggggacatccagatgacccagtccccctcgagcctctcagcctccgtaggggaccgggtcaccatcacttgcagggccagccaaagcatcaacagctacctcgactggtaccagcagaagcccgggaaggccccgaagctcctcatctacgccgccagcagcctccagtccggcgtacccagcaggttctccggctccgggagcggaaccgacttcacactcaccatctcgtccctccagcccgaggattttgccacctactactgtcagcagtactacagcaccccctttacctttggccccggcaccaaagtggagatcaaacggaccgtggccgccccctcggtgttcatattcccgccaagcgacgagcagctgaaaagcggcacggcctccgtggtgtgcctgctgaacaacttctatccccgcgaagccaaggtgcagtggaaggtcgataacgccctgcaatcagggaacagccaggagtcggtgaccgagcaggacagcaaagatagcacctactccctgagcagcaccctgaccctgtccaaggcggactacgagaaacataaggtgtacgcgtgcgaggtgacccatcagggactgagcagccccgtgacgaagtccttcaaccggggcgagtgc

SEQ ID NO: 351 - DNA, 702 bp, synthetic construct
  misc_feature 1..702: note = Treme_LC-CO22
  source 1..702: mol_type = other DNA
atggagacacccgcccagctcctcttcctcctcttgctctggctccccgacacgaccggggacatccagatgacgcagagcccttcttcgttgtccgcctccgtcggcgaccgggtcaccatcacctgcagagcctcccagagcatcaatagctacctcgactggtaccagcagaagccgggcaaggcccccaagctcctcatctacgccgccagcagcttacagagcggggtacccagccggttctcggggagcgggagcggcaccgacttcaccctcaccatcagcagcctccagcccgaggacttcgccacctattactgccagcagtactatagcacccccttcacctttgggccgggcacgaaggtggaaattaagcggaccgtggccgcccccagcgtgttcatcttcccaccctccgacgagcagctcaagagcggaaccgccagcgtggtgtgtctgctgaataacttctacccgcgcgaggccaaggtccagtggaaggtggacaacgccctgcagagcgggaacagccaggagtccgtgaccgagcaggacagcaaggacagcacgtacagcctgtccagcaccctgaccctgtccaaggccgactatgagaagcacaaggtgtatgcctgcgaggtgacccaccaagggctgtccagccccgtgaccaagtccttcaacaggggtgagtgc

SEQ ID NO: 352 - DNA, 702 bp, synthetic construct
  misc_feature 1..702: note = Treme_LC-CO23
  source 1..702: mol_type = other DNA
atggagacgcccgcgcaactcctcttcctcctcctcctctggttacccgacaccacgggcgatatccagatgacccagtcgcccagcagcttgtccgccagcgtaggggacagggtcaccatcacctgccgggcatctcagagcatcaactcctacctcgactggtaccagcagaagcccggcaaggcccccaagctcttgatctacgccgccagcagcctccagagcggcgtcccctcgcggttcagcgggagcggcagcgggacggacttcaccctcaccataagctctctccagccagaggatttcgccacgtactactgtcagcagtattacagcaccccgttcacgttcggccccggcacgaaggtggagatcaagcggaccgtggccgccccctcggtgttcatctttcccccctccgacgaacagctgaagtcgggcaccgccagcgtggtgtgcctgctgaacaacttctacccgcgcgaagccaaggtgcagtggaaggtagacaatgcactgcagtccggcaacagccaagagtccgtaaccgagcaggactccaaggacagcacatacagcctgagcagtaccctcacgctcagcaaggcagactacgagaagcacaaggtctatgcctgcgaggtgacccaccagggcctgagctcccccgtgaccaagagctttaacaggggcgagtgc

SEQ ID NO: 353 - DNA, 702 bp, synthetic construct
  misc_feature 1..702: note = Treme_LC-CO24
  source 1..702: mol_type = other DNA
atggagacgcccgcccagctcctctttctcctcctcctctggctccccgacaccacgggggacatccagatgacccagagcccctccagcctcagcgcctcggtaggcgacagggttaccatcacctgccgggcctcccagtcgatcaattcctacctcgactggtaccagcagaagccgggcaaggcccccaagctcctcatttacgccgcgagctccctccagtccggcgtccccagccggttttccggctcgggcagcggcaccgattttaccctcacgatctccagcttgcagcccgaggacttcgccacctactactgtcagcagtattactccaccccgttcacctttggccccgggaccaaagtggagatcaagcgtacggtcgccgcccccagcgtgttcattttcccacccagcgacgagcaactcaagtccggcaccgccagcgtggtgtgcctcctgaacaacttttatccccgcgaggccaaggtgcagtggaaggtggacaacgccctgcaaagcggcaacagccaggaaagcgtgacggagcaggactccaaagactccacgtacagcctctccagcaccctgaccctgagcaaagcagactacgagaaacacaaggtgtacgcctgcgaggtgacccaccaggggctcagcagccccgtgaccaagagctttaaccggggtgagtgc

SEQ ID NO: 354 - DNA, 702 bp, synthetic construct
  misc_feature 1..702: note = Treme_LC-CO25
  source 1..702: mol_type = other DNA
atggaaacgcccgcccagcttctcttcctcctactcctctggctccccgacaccaccggggacatccagatgacccagagcccctccagcctctcggcctcggttggcgacagagtaaccataacctgccgggcctcccagagcatcaacagctacctcgactggtaccagcagaagcccggcaaggcgcccaagctcttgatttacgcggcaagcagcttgcagtccggcgtcccctcacggttcagcgggagcgggtcaggcaccgactttacgctcaccatctcgagcctccagccagaggactttgccacctactactgccaacagtattacagcaccccgttcaccttcggcccaggaaccaaggtggagatcaagcgcaccgtggccgcccccagcgtcttcatcttcccgcccagcgacgagcagctgaaaagcggcaccgcctccgtggtgtgcctgctgaataacttttacccgcgggaggccaaggtgcagtggaaggtggacaacgccctccagagcgggaactcccaggagagcgtgaccgaacaggacagcaaggactccacgtactcccttagcagcaccctgaccctgtcgaaggccgattacgagaagcacaaggtgtacgcctgcgaggtgacccaccagggtttatcctcgcccgtgaccaagtccttcaaccgaggcgagtgc

SEQ ID NO: 355 - protein, 471 aa, Homo sapiens; identical to SEQ ID NO: 235

SEQ ID NO: 356 - protein, 20 aa, Homo sapiens
METPAQLLFLLLLWLPDTTG

SEQ ID NO: 357 - protein, 125 aa, Homo sapiens
QVQLVESGGGVVQPGRSLRLSCAASGFTFSSYGMHWVRQAPGKGLEWVAVIWYDGSNKYYADSVKGRFTISRDNSKNTLYLQMNSLRAEDTAVYYCARDPRGATLYYYYYGMDVWGQGTTVTVSS

SEQ ID NO: 358 - protein, 326 aa, Homo sapiens
ASTKGPSVFPLAPCSRSTSESTAALGCLVKDYFPEPVTVSWNSGALTSGVHTFPAVLQSSGLYSLSSVVTVPSSNFGTQTYTCNVDHKPSNTKVDKTVERKCCVECPPCPAPPVAGPSVFLFPPKPKDTLMISRTPEVTCVVVDVSHEDPEVQFNWYVDGVEVHNAKTKPREEQFNSTFRVVSVLTVVHQDWLNGKEYKCKVSNKGLPAPIEKTISKTKGQPREPQVYTLPPSREEMTKNQVSLTCLVKGFYPSDIAVEWESNGQPENNYKTTPPMLDSDGSFFLYSKLTVDKSRWQQGNVFSCSVMHEALHNHYTQKSLSLSPGK

SEQ ID NO: 359 - DNA, 1413 bp, synthetic construct
  misc_feature 1..1413: note = Treme_HC_IgG2-CO01
  source 1..1413: mol_type = other DNA
atggagacgccggcccagctattgttcctcctcctcctctggctccccgacaccaccgggcaggtccagctagttgagagcggcgggggcgtcgtccagcccggcaggtccctcaggctcagctgcgccgcctcggggttcaccttcagctcctacggcatgcactgggtcaggcaggcccccggcaaggggctcgagtgggtcgccgtcatctggtacgacggtagcaataagtattacgccgatagcgtcaagggccggtttaccataagcagggacaacagcaagaacaccctctacctgcagatgaacagtctgagggccgaggataccgccgtgtactactgtgctcgggaccccaggggtgccactctgtactactactactacggcatggacgtgtggggccagggcacgacggtgaccgtgagctccgcctccaccaagggcccctctgtgttcccgctggccccctgcagccggtccaccagcgaaagcaccgccgccctgggctgcctggtgaaggactacttccccgagcccgtgaccgtcagctggaacagcggagctctgaccagcggcgtgcacacctttcccgccgtgctccagagcagcggcttgtacagcctgtccagcgtggtgaccgtgccgagcagcaacttcggcacccaaacgtacacctgcaacgtggaccataagcccagcaacaccaaggtggacaagaccgtggagcggaaatgctgcgtggagtgcccaccctgtcccgccccgccggtggccggcccctccgtgtttctgtttccgcccaagccgaaggacaccctgatgatcagccgcaccccggaggtgacctgcgtggtggtggacgtgagccacgaggaccccgaggtgcaattcaactggtacgttgatggcgtggaggtccacaacgccaagaccaagcccagggaggaacagtttaactccaccttccgggtcgtgagcgtgctgactgtggtgcaccaggactggctgaacggcaaggagtacaagtgcaaggtgagcaacaaggggctgcccgcccccatcgagaagacgatctccaagaccaagggccagccccgcgaaccccaagtgtacaccctgccccccagccgggaggaaatgaccaaaaaccaggtgagccttacctgtctggtgaagggcttttaccccagcgacatcgccgtggaatgggagtcgaacggccagccggagaacaactataaaaccacccctcccatgctggacagcgacggctctttcttcctgtatagcaagctgactgtggacaagagccgctggcagcagggcaacgtgttctcatgctccgtgatgcacgaagccctacacaaccactacacccagaaaagcctcagcctcagccccggcaag

SEQ ID NO: 360 - DNA, 1413 bp, synthetic construct
  misc_feature 1..1413: note = Treme_HC_IgG2-CO02
  source 1..1413: mol_type = other DNA
atggagacgcccgcccaactcctctttctcctcctcctctggctccccgacacgaccggccaagtccagctcgtcgagagcggcggcggcgtcgtccagccggggaggtccctcaggctctcgtgcgccgccagcggcttcaccttcagttcctacggcatgcactgggtcaggcaggcccccggcaagggtctggagtgggtcgccgtcatctggtacgacggcagcaacaagtactacgccgacagcgtaaagggccggttcaccatcagcagggacaattcgaagaacaccctgtatctgcagatgaactccctcagggccgaggacaccgccgtgtactactgcgccagggaccccaggggggccaccctctactattactactacggcatggacgtgtgggggcaggggaccaccgtcaccgtgtccagcgccagcacgaaggggcccagcgtcttcccgctggccccctgcagcaggagcaccagcgagagcaccgctgccctggggtgcctggtgaaggactactttccggagcccgtgacagtgagctggaacagcggcgccctgaccagcggggtgcacacgttccccgcagtgctgcagagcagcgggctgtacagcctctccagcgtggtgaccgtgcccagcagcaactttggcacccagacgtacacctgcaacgtggaccacaagccctcaaataccaaggtcgacaagaccgtggagcggaagtgctgtgtggagtgcccaccctgcccagccccgcccgtggccggcccctccgtgttcctgtttcccccgaagccgaaggacaccctcatgatctccaggacccccgaagtgacctgcgtggtggtggacgtgagccacgaggaccccgaggtgcagttcaactggtacgttgacggggtggaggtgcacaacgccaagaccaagccccgcgaggagcaattcaacagcaccttcagggtggtgagcgtactgaccgtagtgcaccaggactggctgaacggcaaggagtacaagtgtaaggtgagcaacaagggcctgcccgcccccatcgaaaagacaatttccaagacgaaggggcaacccagggagccccaggtgtataccctgccccccagcagggaggagatgacgaagaaccaggtgtcgctgacctgtctcgtcaagggcttctatccgagcgacatcgccgtggagtgggagtcgaacgggcaacccgagaacaactataagaccacgccccccatgctggactccgacgggagcttcttcctctacagcaagctgaccgtggacaaaagccggtggcagcaggggaacgtgttcagctgctccgtgatgcacgaggcgctgcataatcactacacccagaagtccctgagcctgagcccgggcaag

SEQ ID NO: 361 - DNA, 1413 bp, synthetic construct
  misc_feature 1..1413: note = Treme_HC_IgG2-CO03
  source 1..1413: mol_type = other DNA
atggagacgccagcccagctcctctttctcttactcctctggctaccggacaccaccggccaggtccagctcgtcgagagcggcggcggcgtcgtccagccgggcaggtccctcaggctcagctgcgccgccagcggcttcaccttcagctcctacggcatgcactgggtaaggcaggcgccgggcaagggcctagagtgggtcgccgttatctggtacgacgggagcaacaaatactacgccgacagcgtcaagggaaggttcaccatcagcagggataactccaaaaataccctctacctccagatgaactccctgagggcggaggataccgcggtgtactactgcgccagggatcccaggggcgccaccctctactattactactacggcatggatgtatggggccaggggaccaccgtgaccgtcagctccgcctccaccaaaggcccgtccgtgttccccctggcgccctgcagcaggagcaccagcgagagcaccgctgccctgggctgcctggtgaaggactacttcccggagcccgtgaccgtgtcatggaactccggggccctgaccagcggcgtccacaccttccccgccgtgctgcagtcctccggactgtactcgctgagctccgtggtgacggtccccagctccaatttcgggacccagacctacacctgcaacgtggaccacaagcccagcaacaccaaggtggacaagaccgtggaacgaaagtgctgcgtcgagtgtcccccctgccccgccccgcccgtcgccggccccagcgtgttcctgttcccacccaagcccaaggacacgctgatgatctcccggacccccgaggtgacctgcgtggtcgtggacgtgtctcacgaggaccccgaggtgcagttcaattggtacgtggacggggtcgaggtccacaacgccaagactaagccccgggaggagcagttcaacagcacgttcagggtggtgtccgtgctgaccgtcgtccaccaggactggctcaacggcaaggagtacaagtgcaaggtttccaacaaggggctccccgcccccatcgagaagacgatttccaagaccaagggccaaccccgcgagccccaggtgtacaccctgccccccagcagggaggagatgaccaaaaaccaggtgtccctgacctgcctggtgaaggggttctacccgagcgacatcgccgtggagtgggagagcaacgggcagcccgagaacaactacaagaccaccccgccgatgctggatagcgacgggagcttcttcctctactccaagctcaccgtggacaagagccgctggcagcagggcaacgtgttcagctgcagcgtgatgcacgaggccctgcataaccactacacccagaaaagcctgtccctgagccccggcaag

SEQ ID NO: 362 - DNA, 1413 bp, synthetic construct
  misc_feature 1..1413: note = Treme_HC_IgG2-CO04
  source 1..1413: mol_type = other DNA
atggagacacccgcccaactcctctttttgctcctcctttggctccccgacaccaccggccaggtccagctcgtcgagagcggcggcggggttgtccagccgggccgctccctcaggctcagctgtgccgccagcggcttcactttcagcagctacggcatgcactgggtcaggcaggcccccggcaagggcttggagtgggttgccgttatctggtacgacggcagcaacaagtactacgccgattccgtcaagggccgcttcaccataagcagagacaacagcaaaaacacgctctatctgcagatgaacagcctgcgggccgaggacaccgccgtgtattactgtgccagggatccgcgcggcgccaccctgtactactattactacgggatggacgtgtggggccagggcaccactgttaccgtctccagcgccagcacgaaggggcccagcgtctttccgctggccccctgcagccggagcacgtccgagagcactgccgccctggggtgcctggtgaaggactacttccccgagcccgtgaccgtctcatggaactccggcgctctgacctccggggtgcataccttccccgccgtgcttcagtccagcggcctgtacagcctgagctccgtggtgaccgtgccctccagcaactttgggactcagacctacacctgcaacgtcgaccacaagccaagcaacaccaaggtagacaagaccgtggagcggaagtgctgcgtggagtgcccgccctgccctgcccctcccgtcgccggcccaagcgtgttcctgttcccacccaagcccaaggataccctgatgatttcccggacccccgaggtgacctgcgtcgtggtggacgtcagccacgaagaccccgaggtgcagttcaattggtacgtggatggcgtggaagtgcacaacgccaagacgaagccaagggaggagcagtttaactccaccttccgggtggtgagcgtgctcaccgtcgtccaccaggactggctcaatgggaaggagtacaagtgcaaggtgtccaataagggcctgcccgcccccatcgagaaaacgatcagcaagaccaaggggcagccaagggagccccaggtgtacaccctcccacccagccgggaggagatgaccaagaatcaggtcagcctcacttgcctggtgaagggcttttacccctccgacatcgccgtggagtgggagagcaacggccagcccgaaaataactacaagaccaccccaccgatgctggatagcgacggcagcttcttcctgtacagcaagctgaccgtggacaagtcccgctggcagcagggcaacgtgttctcgtgcagcgtgatgcacgaggctctgcataaccactacacccagaaatccctctccctgtcccccggcaag

SEQ ID NO: 363 - DNA, 1413 bp, synthetic construct
  misc_feature 1..1413: note = Treme_HC_IgG2-CO05
  source 1..1413: mol_type = other DNA
atggagacacccgcccagctcctcttcctcctcctattgtggctcccggataccaccgggcaggtccagctggtggagagcggcgggggcgtcgtacagcccggcaggagcctcaggctcagctgcgccgccagcggcttcaccttcagcagctacggcatgcactgggtcaggcaggccccagggaaggggttggagtgggtcgccgtcatctggtacgacgggagcaacaaatactacgcagacagcgtcaagggccgattcaccattagccgggataacagcaagaacaccctctacctgcaaatgaacagcctgagggccgaggacacggccgtatactattgcgccagggacccccgtggcgccacactgtactattactactacggtatggacgtttgggggcagggtactaccgtgaccgtctcgagcgccagcaccaaaggccccagcgtgttccccctggccccctgctccaggagcaccagcgagtccaccgccgcgctgggctgcctggtgaaggattacttccccgagcccgtgacggtgagctggaacagcggggccctgacaagcggagtgcataccttcccggcagtgctgcaaagcagcggcctctacagcctgagcagcgtcgtgaccgtgcccagcagcaacttcggcacacagacctacacctgcaacgtggaccacaagcccagcaacacgaaggtggacaagaccgtggagaggaagtgctgcgtggaatgcccaccctgccccgccccgcccgtggccggccccagtgtgtttctgttcccacccaagccgaaggataccctgatgatctcccggacccccgaggtgacctgcgtggtggtggatgtgagccacgaggaccccgaagtgcagttcaactggtatgtcgacggcgtggaggtacacaatgccaagaccaagcccagggaggaacagttcaacagcacgtttcgggtggtgagcgtgctcactgtcgtccaccaagactggctgaacggcaaggagtacaagtgcaaggtgagcaacaaggggctgcccgcgcccatcgagaaaaccatctccaagaccaaaggccagccgcgggagccccaggtgtataccctgccaccgagcagggaggagatgaccaaaaatcaagtgtcgctgacctgcctcgtcaagggcttttacccaagcgatatcgcggtggagtgggaaagcaacggccagcccgaaaacaactacaagaccaccccgcccatgctcgactcagatggtagcttctttctgtacagcaagctgaccgtggacaagagcaggtggcagcagggcaacgtgttctcctgcagcgtgatgcacgaggccctgcacaaccactatacccaaaagagcctaagcctgagccccggcaag

SEQ ID NO: 364 - DNA, 1413 bp, synthetic construct
  misc_feature 1..1413: note = Treme_HC_IgG2-CO06
  source 1..1413: mol_type = other DNA
atggagacgcccgcccagctcctcttcctcctattgctgtggctccccgataccaccgggcaggtccagctcgtagagtcgggcggcggagtagtccaaccggggaggagcctcaggctcagctgcgcagcctccggcttcaccttcagcagctacggcatgcactgggtacggcaggccccgggaaagggcctcgagtgggtcgccgtcatctggtacgacggcagcaacaagtactacgccgacagcgtcaagggccgcttcaccatctccagggataacagcaagaacaccctttacctgcagatgaacagcctcagggccgaggacaccgccgtgtattactgcgcgcgggatccccgcggcgcgacgctgtactactactactatgggatggacgtgtggggccagggcactaccgtcaccgtgtccagcgctagcacgaagggcccgtccgtgttccccctggccccctgctcccggagcacctccgagagcaccgccgccctgggttgcctggtgaaggactatttccccgagcccgtcaccgtgagctggaacagcggcgccctcacatccggcgtgcataccttcccggccgtgctccagagcagcggcctgtattcactgtcgagcgtggtgaccgtgcccagcagcaactttggcacccagacgtacacctgcaacgtggaccacaagccgagcaacaccaaggtggacaagaccgtggagcggaagtgctgcgtggagtgtcccccgtgtcccgccccgcccgtagccggcccctccgtattcctcttccctcccaagcccaaggacacgctcatgatctcgcggacacccgaggtgacctgcgtggtggtggacgtcagccacgaggatcccgaggtgcagttcaactggtatgtggacggagtggaggtgcataacgccaaaaccaagcccagggaagaacagttcaacagcaccttcagggtggtgagcgttctgaccgtcgtgcaccaggactggctcaacggcaaggagtacaagtgtaaggtgtccaacaaggggctgcccgcccccatcgagaagaccatctcgaaaaccaaaggccagccccgcgagccccaggtgtacaccctccccccgtcccgggaggagatgaccaagaaccaggtaagcctgacctgtctggtgaagggcttctaccccagcgacatcgctgtggagtgggagagcaacgggcagcccgagaataactacaaaaccaccccgcccatgctggacagcgacggaagctttttcttgtactccaagctgaccgtcgacaagagccggtggcagcagggcaacgtgttcagctgcagcgtgatgcacgaggccctgcacaaccactacacccagaaaagcctcagcctgagccccgggaag

SEQ ID NO: 365 - DNA, 1413 bp, synthetic construct
  misc_feature 1..1413: note = Treme_HC_IgG2-CO07
  source 1..1413: mol_type = other DNA
atggaaaccccggcccaactcctcttccttcttctcctctggctccccgacaccaccggccaggtccagctcgttgagtccggcggcggcgtagtccagcccgggcgttcgctcaggctcagctgcgccgcgtccggcttcacctttagcagctacggcatgcactgggtacggcaggcccccggcaaagggctcgagtgggtcgccgtcatttggtacgacggcagcaataagtactacgcagacagcgtcaagggaaggttcaccatcagcagggataactccaagaataccctctacctgcaaatgaactccctgcgggccgaggacaccgccgtgtactattgcgcccgggaccccaggggggccaccctgtactactactactacggcatggatgtgtggggccagggcaccaccgtgaccgtcagctcagccagcaccaagggccccagcgtgttccccctcgccccgtgtagccggagcacctccgagagcaccgcggccctggggtgcctggtgaaggactacttccccgaacccgtcaccgtgagctggaacagcggggccctgaccagcggagtgcacaccttcccggccgtgctacagagcagcggcctgtactccctgtcatccgtggtgaccgtgccctcgtccaacttcggcacccagacctatacctgcaacgtggaccacaaaccctccaacaccaaggtggacaagaccgtggagaggaagtgctgcgtggaatgccctccctgccccgcgcccccagtggccgggccctccgtcttcctgttccccccgaagccgaaagatacgctgatgatcagcaggacccccgaggtgacctgtgtggtggtggacgtgagccacgaagatcccgaggtgcagtttaactggtacgtcgacggggtggaagtccacaacgccaagaccaagcccagagaggaacagttcaacagcacgttccgggtggtgtcggtgctcaccgtggtccaccaggattggctgaacggaaaggagtataagtgcaaggtgagcaacaaggggctcccggccccgatcgagaagaccatctccaaaaccaaagggcagccccgggaaccccaggtatacaccctgccaccaagcagggaggagatgaccaagaaccaggtgagcctgacctgtctggtgaagggcttctaccccagcgacatcgcagtggagtgggagagcaacggccagcccgagaacaactacaagacaacaccgcccatgctggacagcgacggctccttttttctgtactccaagctgacggtggacaagagccgctggcagcagggcaacgtgttcagctgcagcgtgatgcatgaggccctgcacaaccactacacccagaagtccctgtccctcagcccgggcaag

SEQ ID NO: 366 - DNA, 1413 bp, synthetic construct
  misc_feature 1..1413: note = Treme_HC_IgG2-CO08
  source 1..1413: mol_type = other DNA
atggagacgcccgcccagctcctcttcctccttttgctgtggctccccgacaccacgggccaggtccagctcgtagagtccggcggcggcgtcgtacagcccggccggagcctcaggttgtcgtgcgccgcctccggtttcaccttctccagctacgggatgcattgggttcggcaggcccccgggaagggcctagagtgggtcgccgtcatctggtacgacggctccaataaatactacgccgacagcgtcaaggggcgattcactatcagcagggacaacagcaagaacaccctctacctgcagatgaacagcctgcgcgcggaggacaccgcggtgtactattgcgccagggacccgcgaggcgccaccctgtactactactactacggcatggacgtgtggggtcagggcaccaccgtgaccgtgagcagcgccagcacgaagggtcccagcgtgttccccctggcgccctgctccaggagcacgtccgagagcaccgccgcactgggctgcctggtgaaggattacttcccggagcccgtgaccgtcagctggaactccggggccctcacgagcggcgtgcataccttccccgccgtcctgcagagctccggcctgtacagcctctcctccgtggtcaccgtcccaagcagcaatttcggcacccagacctacacctgcaacgtggatcataagcccagcaataccaaggtggacaagaccgtggagcgcaagtgctgtgtcgagtgccctccctgcccggccccacccgtcgccggcccgagcgtgttcctcttccctcccaagcccaaggacacgctgatgatcagccgcacccccgaggtgacctgtgtcgtcgtggatgtgagccacgaggatcccgaggtgcagtttaactggtacgtagacggcgtggaggtacacaacgcgaagaccaagcctagggaggagcagtttaactccaccttccgggtggtgagcgtcctgacggtggtgcatcaggactggctcaatggtaaggagtacaagtgcaaggtgagcaacaagggcttgcccgcccctatcgagaagacaatcagcaagaccaagggccagccccgggagccgcaggtgtacaccctgcccccttcgagggaggaaatgaccaagaaccaggtgagcctgacctgtctggtgaagggtttttaccccagcgacatcgcggtggagtgggagagcaacgggcagcccgagaacaactataagaccaccccacccatgctggacagcgacgggagcttcttcctgtacagcaagctgaccgtcgacaagtcccgatggcagcagggcaacgtgttcagctgcagcgtgatgcacgaggcgctgcacaatcattacacccagaaaagcctgagcctgagccccggcaaa

SEQ ID NO: 367 - DNA, 1413 bp, synthetic construct
  misc_feature 1..1413: note = Treme_HC_IgG2-CO09
  source 1..1413: mol_type = other DNA
atggagacgcccgcccagctcctcttcctcctcctcctctggctaccggacaccaccgggcaggtccagctagtcgagtcgggcggcggggtcgttcagcccggccgtagcctccggctcagctgcgccgcctccggcttcaccttcagtagctacggtatgcattgggtccgccaagcccccggcaagggcctcgagtgggtcgccgtcatctggtacgacggctccaataagtactacgcggatagcgtcaaagggcggttcaccatcagccgcgacaacagcaaaaacaccctctacctgcagatgaacagcctgagggcggaggacaccgccgtgtactactgcgccagggaccctcgtggggccacgctgtattactactactatggcatggatgtgtgggggcagggcaccaccgtgaccgtcagctccgccagcaccaaggggcccagcgtcttcccgctggctccgtgctcccggtccacctccgagagcaccgcagccctgggctgcctggtgaaagactactttcccgaacccgtgaccgtcagctggaacagcggcgccctgacgagcggggtgcacaccttccccgcagtgctgcagagcagcggcctgtactcgctctcctccgtggtcacggtgcccagttccaacttcggaacccagacatatacgtgcaacgtggaccacaagcccagcaacaccaaggtggacaaaaccgtggagcggaaatgctgcgtggagtgcccgccctgtcccgcccctcccgtcgccggacccagcgtgtttctgttcccgcccaagcccaaggacacccttatgatctcgcgcacccctgaggtaacctgcgtcgtggtagacgtgtcccacgaggaccccgaggtgcagttcaactggtacgtggatggcgtggaggtccacaacgccaaaaccaagccgcgggaggaacaattcaacagcaccttcagggtggtgtccgtgctgaccgtggtgcaccaggactggctgaacggaaaggagtacaagtgcaaggtgtccaacaagggcctgcccgcgcccatcgagaagacgatcagcaaaaccaagggccagcctagggaaccccaggtctacaccctgccccccagcagggaggagatgaccaagaaccaggtaagcctgacctgcctggtgaagggtttctatccgtccgacatcgcagtggagtgggaaagcaacggccagcccgagaacaactataagaccaccccacccatgctggacagcgacggcagcttcttcctgtacagcaagctgactgtcgacaaaagcaggtggcagcagggcaacgtgtttagctgcagcgtcatgcacgaggccctgcataaccactacacccagaagtccctgagcctctcccccggcaag

SEQ ID NO: 368 - DNA, 1413 bp, synthetic construct
  misc_feature 1..1413: note = Treme_HC_IgG2-CO10
  source 1..1413: mol_type = other DNA
atggagactcccgcccaactcctctttctactcctcctatggctccccgacaccaccgggcaggtccagctcgtagagtccgggggcggcgtcgttcaacccgggaggagcctcaggctcagctgcgccgccagcgggttcaccttcagctcctacggcatgcactgggtccggcaggcccccggcaagggcctagagtgggtcgccgtcatctggtacgacggctccaacaagtactacgccgacagcgtcaagggcaggttcacgatcagcagggacaacagcaagaacaccttgtacctccagatgaattccctgcgggccgaggacacagccgtgtactactgcgcccgcgaccccaggggtgccacgctgtactattactactacggcatggacgtgtgggggcagggcaccacagtgaccgtcagctcagccagcaccaagggcccctcggtgtttcccctggccccatgcagcaggagcacgagcgagtccaccgccgcgctcggctgcctagtgaaggactacttccccgagcccgtgacggtgagctggaatagcggtgccctgaccagcggcgtgcacaccttccccgccgtgctgcaaagcagcgggctgtactccctgagctccgtggtcacggtgcccagctccaactttggcactcagacctacacctgcaacgtggaccacaagcccagcaatacgaaggtggacaagaccgtggagcggaagtgttgcgtggagtgcccgccctgtcccgccccacctgtggccggtcccagcgtgttcctgtttccccccaagcccaaggacaccctcatgataagcaggacacccgaggtgacctgcgtcgtggtcgacgtgtcccacgaggaccccgaggtgcagttcaattggtacgtggacggcgtggaggtgcacaacgccaagaccaagccgagggaggagcagttcaactcaaccttccgggtcgtcagcgtcctgactgtggtgcaccaggactggctgaatggcaaagagtacaagtgcaaggtgagcaacaagggcctccccgcccccatcgagaagaccatctcgaagacgaagggccagccccgggagccccaggtgtacaccctgccccctagcagggaggagatgaccaagaaccaggtgtccctgacctgcctggtgaagggcttctacccctccgacatcgcggtggagtgggagagcaacggccagcccgagaacaactacaagacgacgccccccatgctggacagcgacgggagcttcttcctgtacagcaagctgaccgtggacaaatctcgctggcagcagggcaacgtattcagctgctcggtgatgcacgaggcgctgcacaaccactacacgcagaagtccctgagcctgagccccgggaaa

SEQ ID NO: 369 - DNA, 1413 bp, synthetic construct
  misc_feature 1..1413: note = Treme_HC_IgG2-CO11
  source 1..1413: mol_type = other DNA
atggagacgcccgcacagctcctcttcctcctcctactctggctcccggacacaaccgggcaggtacagctcgtagagtccggcggcggcgtcgtccagccggggaggagcctcaggctcagctgcgccgccagcggctttaccttctccagctacggcatgcactgggtaaggcaggcgcccggaaagggcctcgagtgggtcgcggtcatctggtacgacggcagcaataagtactacgccgacagcgttaagggtcggttcaccatcagcagggacaattccaagaatacgctctacctgcagatgaacagcctgcgggccgaggacaccgccgtctactactgcgcgcgagatccccggggggccaccctgtactactactattacggaatggacgtgtggggccagggtaccaccgtgacggtgtcaagcgccagcaccaaaggccccagcgtgttcccgctggccccctgctcccggagcaccagcgagagcaccgccgccctcggctgcctggtgaaggactacttccccgaacccgtgaccgtgagctggaacagcggcgccctgacaagcggcgtccacaccttccccgccgtgttgcagagcagcggtctgtactccctgagcagcgtggtcaccgtgcccagtagcaatttcggcacccagacctacacctgcaacgtggaccataagcccagcaacaccaaggtggacaagaccgtggagaggaaatgctgcgtggagtgcccgccctgccccgccccgcccgtggcgggccccagcgtgttcctgtttccacccaagcccaaggacacactgatgataagcaggacccccgaggtaacctgcgtggtggtggacgtgagccatgaggaccccgaagtgcagtttaactggtacgtggatggcgtggaggtccacaacgccaagaccaagccgcgtgaagaacagtttaactccaccttccgggtggtgtccgtgctcaccgtcgtccaccaggactggctgaacgggaaggaatacaaatgcaaggtcagcaacaagggccttcccgcccccatcgagaaaaccatctccaagacgaaggggcagccccgggagccccaggtctacaccctcccaccctccagggaggagatgaccaagaaccaagtctccctcacttgcttagtgaagggcttttaccccagcgacatcgccgtggagtgggagtccaacggccagcccgagaacaactacaaaacgaccccacccatgctggacagcgacggcagcttcttcctttactccaagctgacggtggataagagcaggtggcagcagggcaacgtgttctcgtgctccgtgatgcacgaggccctgcacaaccactacacccagaaaagcctttccctgagccccggcaag

SEQ ID NO: 370 - DNA, 1413 bp, synthetic construct
  misc_feature 1..1413: note = Treme_HC_IgG2-CO12
  source 1..1413: mol_type = other DNA
atggagacgccggcccaactcctcttcctcctcctcctctggctcccggacaccaccgggcaggtccagctcgtcgagagcggcggcggcgtcgtacagcccgggaggtccctacgcctcagctgcgcagccagcggctttaccttcagcagctacggcatgcactgggtcaggcaggcccccggcaaggggctcgagtgggtcgccgttatctggtacgacgggtccaataagtactacgccgacagcgtaaagggccgcttcaccatcagcagggacaactcgaagaacaccctctacctgcagatgaactcactgcgggccgaggacaccgccgtgtactactgcgccagggacccccggggcgccaccctgtactactactattacgggatggatgtgtggggccagggcaccaccgtgaccgtgagcagcgcctccaccaagggcccgtccgtcttccccctggccccctgctccaggagcacgagcgagagcacggcggccctgggctgcctcgtgaaggactacttccccgaacccgtgaccgtcagctggaactccggcgccctcacctccggggtccataccttccccgccgtgttacagagcagcggcctgtatagcctgagcagcgtggtgaccgtgccgagcagcaacttcggcacccagacctatacctgtaacgtggaccacaagcccagcaacaccaaggtggacaagaccgtggagaggaagtgctgcgtagagtgcccgccctgtccggccccgcccgtggcgggccccagcgtgtttctgttccctcccaaaccgaaggacaccctgatgatcagcaggacccccgaggtgacctgcgtggtcgtggatgtgtcccatgaagaccccgaggtgcagttcaactggtacgtggacggtgtggaggtgcataatgccaagacgaagccacgtgaggagcagttcaattccactttccgcgtggtgtccgtgctgaccgtggtgcatcaggactggctcaacggcaaggagtataagtgcaaggtgtctaacaagggcctgcccgcccccatcgagaagactatctccaagactaaggggcagccgagggagccccaggtgtataccctgccccccagcagggaggagatgaccaagaaccaggtcagcctgacctgcctggtgaagggcttctacccctccgacatcgccgtggagtgggagagcaacgggcagcccgagaacaactacaagaccaccccgcccatgctggactccgacgggagcttttttctgtattccaagctgaccgtggacaagtccaggtggcagcaggggaacgtgttctcctgctccgtgatgcacgaagccctgcacaaccactatacccagaaaagccttagcctgagccccgggaag

SEQ ID NO: 371 - DNA, 1413 bp, synthetic construct
  misc_feature 1..1413: note = Treme_HC_IgG2-CO13
  source 1..1413: mol_type = other DNA
atggaaacccccgcccaattactcttccttctcctcctctggctccccgacaccaccggccaggtccaactcgtcgagtccggaggcggcgtcgtccagcccggcaggagcctacggctcagctgcgccgccagcggcttcaccttctccagctacggcatgcactgggttcgccaggccccaggcaaggggctcgagtgggtcgccgtcatctggtacgacggcagcaataagtactacgccgactccgttaagggtaggttcaccatcagcagggacaactccaagaacaccctctacctgcagatgaacagcctgcgtgccgaggatacggccgtctactactgcgcccgggacccccggggggccaccctctactactattactacggtatggacgtctggggccagggcacgaccgtgaccgtgtccagcgcctcgaccaagggccccagcgtcttccccctggccccctgcagcaggagcaccagcgagagcaccgccgccctggggtgcctcgtgaaggattattttccggaacccgtgaccgtaagctggaacagcggcgccctgacctccggcgtgcacaccttccccgccgtactccagtccagcggactgtacagcctgagctccgtggtgaccgtgccctccagcaacttcggcacccagacctacacctgcaacgtggaccacaaacccagcaataccaaggtggataagaccgtggagaggaaatgctgcgtggagtgtcccccttgccccgccccgcccgtggccgggccgtctgtgttcctgttcccacccaagcctaaggacaccctcatgatctccaggacccccgaggtgacctgcgtggtcgtggacgtgagccacgaggaccccgaggtccagttcaactggtatgtggatggcgtggaggtgcataacgccaagaccaagccccgtgaggagcagttcaacagcaccttccgcgtcgtgtccgtgctgaccgtggtccaccaggattggctgaacgggaaagagtacaagtgcaaggtgtccaacaagggcttgcccgcccccatcgaaaagaccatctcgaagaccaagggccagcccagggagccccaggtttacaccctcccgccctccagggaggagatgaccaagaaccaggtgagcctcacctgtctggtgaaaggcttttatcccagcgacatcgccgtggagtgggagagcaacggccagcccgagaacaactacaagaccaccccacccatgctggacagcgacggcagcttcttcctttacagcaagctgaccgtagacaagagcaggtggcagcagggcaatgtgttcagctgcagcgtgatgcatgaagccctgcataaccactacacccaaaagtccctgagcctgagcccggggaag

SEQ ID NO: 372 - DNA, 1413 bp, synthetic construct
  misc_feature 1..1413: note = Treme_HC_IgG2-CO14
  source 1..1413: mol_type = other DNA
atggagactcccgcccagctcctattcctcctcctcctctggctcccggacaccaccggccaggtacagcttgtggagtccggcggcggagttgtccagcccgggaggtccctcaggctcagctgcgccgccagcgggttcaccttcagcagctacggcatgcactgggtcaggcaggcccccgggaaaggactcgagtgggtcgcagttatctggtacgacgggagcaacaagtactacgccgacagcgtcaagggcaggttcaccatctccagggataatagcaagaacaccctttacctgcagatgaacagcctgcgggccgaggacacagccgtgtactactgcgcccgtgacccccgcggcgccaccctctactactactactacggcatggacgtgtggggccagggcacgaccgtgaccgtcagctccgccagcaccaagggcccctcggtgttccccctggccccgtgcagcaggagcaccagcgagagcaccgcggccctgggctgtctggtgaaggactactttcccgagcccgtgactgtctcgtggaacagcggggccctgacgagcggcgtgcacacgttccccgccgtgctgcagagcagcgggctgtacagcctcagcagcgtggtaaccgtgcccagctccaacttcggcacccagacctacacctgtaacgtggaccacaagccgagcaacaccaaggtggacaagaccgtggagcggaagtgctgcgtggagtgtcccccgtgccccgcccctccggtcgccggccccagcgtgttcctgttcccgcccaagccgaaggacaccctgatgatcagcaggacccctgaggtcacctgcgtggtggtggacgtcagccatgaggatcccgaggtgcagttcaactggtacgtggatggcgtggaagtgcataacgccaagacaaagcccagggaggagcagttcaacagcaccttcagggtggtgagcgtcctgaccgtggtgcaccaagattggctgaacgggaaggagtacaagtgtaaagtgagcaacaaagggctgcccgcccccatcgagaaaaccatctccaagaccaagggccagcccagggagccccaggtgtacaccctgcccccctcacgcgaggagatgaccaagaaccaggtgagcctgacctgcctcgtgaaaggcttctatcccagcgacatcgcggtcgaatgggagagcaacggccagcccgagaacaactacaagacgaccccgcccatgctggacagcgatggcagctttttcctgtacagcaagctgaccgtcgacaagtccaggtggcagcagggcaacgtgttctcctgtagcgtgatgcacgaggccctccacaaccactacacccagaaatccctgagcctgagccccggcaag

SEQ ID NO: 373 - DNA, 1413 bp, synthetic construct
  misc_feature 1..1413: note = Treme_HC_IgG2-CO15
  source 1..1413: mol_type = other DNA
atggagacaccggcccagctcctcttcctcctcctcctttggctccccgacacgaccgggcaggtccaattggtggagtccggcggcggcgtcgttcagcccggcaggagccttcggctcagctgcgccgccagcggttttaccttcagctcctacggcatgcactgggtcaggcaggcccccggtaagggcctcgagtgggtcgccgtcatctggtacgacgggagcaacaaatactacgccgacagcgtaaagggcaggttcaccatctcgagggacaacagcaagaacaccctctacctgcagatgaacagcctgagggcggaggacaccgcagtgtactactgcgcccgggaccctaggggcgccaccctctactattactactacggcatggacgtgtggggccaaggaactaccgtgaccgtgtcgtccgccagcaccaagggccccagcgtcttccccctggccccctgctcccgtagcacatccgagagcaccgccgccttgggttgcctggtgaaggattacttcccggagccggtgaccgtgtcctggaacagcggggcgctgacctccggagtgcacaccttccccgccgtgctgcagtctagcggtctgtatagcctgtcctccgtggtgaccgtcccctccagcaacttcggtacacaaacctacacctgcaacgtcgaccacaagccctctaacaccaaggtggacaaaaccgtggaaaggaagtgctgcgtcgagtgcccaccctgccctgccccgcccgtggccgggcccagcgtgttccttttcccacccaaacccaaggacaccctgatgatcagccggacccccgaggtgacctgcgtggtggtggatgtgagccacgaggatcccgaagtgcagttcaactggtacgtggacggcgtggaggtgcataacgcgaagaccaagccccgggaggagcagttcaactccacgttcagggtcgtgtcggtcctcaccgtcgtgcaccaggactggctgaacggaaaggagtacaagtgcaaggtgagcaacaaaggcctgcccgcccccatcgagaagaccatctccaagaccaaggggcagcccagggagccccaggtctacaccctgccgcccagccgggaggagatgaccaaaaaccaggtcagcctgacctgcctggtcaagggcttctaccccagcgacatcgccgtggagtgggagagcaacggccagcccgagaacaactacaaaactaccccgccaatgctggacagcgacggctccttctttctgtacagcaagctgaccgtcgacaagtccaggtggcaacagggcaacgtgtttagctgcagtgtgatgcacgaggccctgcacaaccactacacgcagaaaagcctcagcctcagcccaggcaag

SEQ ID NO: 374 - DNA, 1413 bp, synthetic construct
  misc_feature 1..1413: note = Treme_HC_IgG2-CO16
  source 1..1413: mol_type = other DNA
atggagactcccgcccagctcctcttcctcctcctcctctggctcccggataccaccgggcaggtccaattggtcgaaagcggcggcggggtcgtccagccggggcgcagcctcaggctcagctgcgcggcctccggcttcaccttcagcagctacggaatgcactgggtccggcaggccccggggaagggcctcgagtgggtcgccgtcatctggtacgacggcagcaataagtactacgccgacagcgtcaagggtaggttcaccatcagccgggacaactcaaagaacaccctctatctgcagatgaacagcctgagggccgaagataccgccgtatactattgcgcccgcgaccccaggggcgccaccctctactattattactatgggatggacgtgtggggccaggggaccaccgtgaccgtgagctccgccagcaccaagggcccgtcggtgttcccgctggccccctgctcccggagcacaagcgagagcaccgccgccctggggtgtctggtcaaggactacttccccgagcccgtgacggtgagctggaacagcggcgccctgacctccggggtgcacacgttccccgccgtgctccagagcagcgggctgtacagcctgagctccgtggtgaccgtgccctccagcaacttcggcacccagacgtacacctgcaacgtggaccacaagcctagcaataccaaggtggacaagacggtggagaggaagtgctgcgtggagtgcccgccctgccccgccccgcccgtcgcaggcccctccgtgttcctgttcccgcccaaacccaaggacacgctgatgatcagccggacccccgaggtgacctgcgtggtggtcgatgtgagccacgaggatcccgaggtgcagttcaattggtacgtcgacggcgtcgaagtgcacaacgccaagaccaagccccgggaggagcaattcaacagcaccttccgtgtcgtgtcggtgcttaccgtggtgcaccaggactggctgaacggcaaagagtataagtgcaaggtcagcaacaaaggcctgcccgcccccatcgagaagaccatcagcaagaccaaagggcagccgagggagccccaggtgtataccctgccgccctccagggaggagatgacaaagaaccaggtgtccctcacctgcctggtgaaaggtttctacccctcggacatagccgtggagtgggagtccaacggccagcccgagaacaactacaaaaccacgccccccatgctggatagcgacggcagcttctttctgtacagcaagctgacggtggacaagagccgctggcagcagggcaacgtcttctcctgcagcgtgatgcacgaggccctgcacaaccactacacccagaagtccctgagcctgagcccagggaag

SEQ ID NO: 375 - DNA, 1413 bp, synthetic construct
  misc_feature 1..1413: note = Treme_HC_IgG2-CO17
  source 1..1413: mol_type = other DNA
atggagactcccgcccagctcctctttctcctcctcctctggcttcccgacaccaccgggcaggtccagctcgtcgagagcggcggcggcgtcgtacagcccggcaggagcctcaggctcagctgcgccgccagcggcttcaccttttcctcctacggaatgcactgggtccggcaggcccccggcaaggggctcgagtgggtagccgtcatctggtacgacggttccaacaagtactacgccgacagcgtcaaaggcaggttcacgatctccagggataacagtaagaacactctctacctgcagatgaactcgctgagggccgaggacaccgccgtctactactgcgccagggaccccaggggggccaccctttactattactattacgggatggacgtgtgggggcaggggaccaccgtgaccgtgtcatccgcctcgaccaaggggcccagcgtcttcccgctcgcgccctgcagcaggtcaacctccgagtcgaccgcagccctgggctgcctggtgaaggattacttccccgagcccgtgaccgtgagctggaacagcggcgcgctgacgagcggggtccacaccttccccgctgtgctgcagagcagcgggctgtactcgctgagcagcgtcgtcaccgtgcccagcagcaactttgggacacagacctacacctgcaacgtggaccataagcctagcaacaccaaggtggacaagaccgtggaacgtaagtgttgtgtggaatgtcccccctgccccgccccacccgtggccggccccagcgtgtttctgttcccacccaaacccaaggacaccctgatgatcagcaggacccccgaggtgacatgcgtggtggtggacgtgagccacgaggatcccgaggtgcagtttaactggtatgtggacggggtggaggtgcacaatgccaagaccaagccccgggaggagcagttcaactcgaccttccgcgtggtgagcgtcctcaccgtggtccaccaggactggctgaatggcaaagagtataaatgcaaggtgagcaacaagggcctgcccgcccccatcgagaagaccatctccaaaaccaaagggcagcccagggagccccaggtctacaccctgccccccagcagggaagagatgaccaagaaccaggtcagcctgacctgcctcgtgaaaggcttctacccctccgatatagccgtggagtgggagagtaacggccagccagagaacaattacaagacgaccccacccatgctggattccgacgggagcttcttcctctacagcaaactgaccgtggataagagcaggtggcagcaggggaacgtgttcagctgcagcgtgatgcacgaggcactgcacaaccactacacccagaaaagcctgtccctgagccccgggaag

SEQ ID NO: 376 - DNA, 1413 bp, synthetic construct
  misc_feature 1..1413: note = Treme_HC_IgG2-CO18
  source 1..1413: mol_type = other DNA
atggaaacccccgcccagcttctcttccttctcctcctatggctccccgatactaccggccaagtccagctcgtcgagagcggagggggcgtcgttcagcccggccggagcctcaggctcagctgcgccgccagcgggttcaccttcagcagctacggcatgcattgggtccggcaggcccccggcaaaggcctcgagtgggtcgccgttatctggtacgacgggagcaacaagtactacgccgatagcgtcaagggcaggttcaccatctccagggacaattccaaaaatacactctacctgcagatgaatagcctgcgggcagaggacaccgccgtgtactactgcgccagggatccccggggcgcaaccctgtattactactactacgggatggacgtctgggggcagggtaccaccgtgaccgtgtccagcgccagcaccaagggcccctccgtgttccccctcgccccctgcagcaggtccaccagcgagagcaccgccgccctgggctgcctcgtgaaagactacttccccgagcccgtgacggtgtcctggaatagcggagccctgaccagcggcgtgcacaccttccccgccgtgctgcaatccagcggcctgtattcgctgagcagcgtggtgaccgtcccttcctcgaatttcggcacgcagacctacacgtgcaacgtggaccacaagccaagcaataccaaggtggacaagactgtggaacgcaaatgctgcgtggagtgcccgccctgccccgccccaccggtggccgggcccagcgtcttcctgttcccgcccaagccgaaagacacactgatgatcagccggacccccgaggtgacctgcgtggtggtcgacgtgagccatgaggacccggaggtgcagttcaactggtacgtggacggggtggaggtccacaacgccaagaccaagcccagggaggagcaattcaacagcaccttccgagtggtcagcgtgctgaccgtggtgcaccaggactggctgaacggtaaagaatacaagtgcaaggtgtccaataaggggctccccgcgcccatcgaaaaaaccatctccaaaacgaagggccagccaagggagccccaggtgtacaccctgccccccagccgcgaggaaatgaccaagaaccaggtgagcctgacctgtctcgtgaaggggttctaccccagcgacatcgccgtggagtgggagtccaacgggcagccggaaaacaactacaaaaccacgccgcccatgcttgactcagatgggtccttcttcctgtacagcaagctgaccgtggacaaaagccggtggcagcagggcaatgtcttttcctgctcagtgatgcacgaggccctgcacaaccactacacccagaaatcactgagcctgagcccgggcaaa

SEQ ID NO: 377 - DNA, 1413 bp, synthetic construct
  misc_feature 1..1413: note = Treme_HC_IgG2-CO19
  source 1..1413: mol_type = other DNA
atggagacgcccgcccagctcctcttcctcctcctcctttggctcccggacaccaccggccaggtccagctcgtagagagcggcggcggcgtagtacagcccgggaggagcctcaggctcagctgtgcggcgagcggctttaccttcagcagctacggcatgcactgggtccgccaggcgccgggcaagggactcgagtgggtagccgtcatctggtacgacggaagcaacaagtattacgccgacagcgtcaagggccggtttaccatcagcagggacaactccaagaacacgctctacctgcagatgaatagcctccgggccgaggacacggccgtttactactgcgccagggaccccaggggcgccaccctgtactactactactacggcatggacgtctgggggcaggggaccaccgtgaccgtgagcagcgcctccaccaagggccccagcgtgttccccctcgccccgtgcagccgtagcacgagcgagagcaccgcagccctgggctgcctggtgaaagactacttccccgagcccgtcaccgtctcctggaacagcggcgcgctcacgtccggggtgcacaccttccccgccgtcctgcaatcctcagggctctattccctgagcagcgtagtgaccgtgcccagctccaacttcggcacccagacctacacatgcaatgtggatcacaagccctcaaacaccaaagtggacaagaccgtggagcggaagtgctgcgtggagtgccctccctgccccgccccacccgtggccggccccagcgtgttcctgtttccccccaagcccaaggacaccctgatgatcagcaggacccccgaggtgacctgcgtcgtggtggacgtgagccacgaggatcccgaggtgcagttcaattggtatgtcgacggggtggaggtgcacaacgcgaagacgaagcccagggaggagcagttcaacagcaccttcagggtcgtctccgtgctgaccgtggtgcaccaggactggctgaacggcaaggagtacaagtgtaaagtgagcaataagggcctcccggccccgatcgagaagaccatcagcaagaccaagggccagccgagggagccgcaggtgtacaccctccctcccagccgagaggagatgaccaaaaaccaggtgtccctgacgtgcctggtgaaggggttctacccaagcgacatcgccgtcgagtgggagagcaatggccagcccgagaataactacaagaccacgccccccatgctggacagcgacggctcctttttcctgtacagcaaactgaccgtggacaagagcaggtggcagcagggcaacgtgttcagctgcagcgtgatgcatgaggccctgcacaaccactacacccagaagtccctctccctaagccccggtaag

SEQ ID NO: 378 - DNA, 1413 bp, synthetic construct
  misc_feature 1..1413: note = Treme_HC_IgG2-CO20
  source 1..1413: mol_type = other DNA
atggagacgcccgcccaactcctcttcctactcctcctctggctcccggacacaaccggccaggttcagctcgtcgagagcggagggggcgttgtccagcccggcaggtccctcaggctcagctgcgccgcgagcggcttcaccttcagcagctacggcatgcattgggtccggcaggcccccggcaagggcctcgagtgggttgccgtcatctggtacgacggcagcaacaagtactacgccgacagcgtcaaggggaggttcaccatcagcagggacaactccaagaataccctctatctgcagatgaacagcctgagggccgaggacaccgcggtgtactactgcgcccgggatcccagaggcgccaccctctattactactactacggcatggacgtctgggggcaggggaccaccgtgacggtgagcagcgccagcaccaaggggccctcggtgttccccctcgcgccctgctcacgttccaccagcgagagcaccgccgccctcggctgtctggtgaaggactacttccccgagccggtcaccgtgtcctggaatagcggcgccctgacgagcggcgtccacaccttccccgccgtcctccagagctccggtctgtatagcctgtccagcgtggtgaccgtgcccagcagcaatttcggaacccagacctatacttgcaatgtggaccacaagccgtccaacaccaaggtggacaagacggtcgaacgcaaatgctgcgttgagtgcccaccctgccccgccccgcccgtcgcggggccaagcgtcttcctgtttccgcccaagcctaaagacaccctcatgatcagccggacccccgaggtgacctgcgtggtggtcgacgtgtcccacgaagaccccgaagtgcagttcaattggtacgtggacggggtggaggtgcacaacgccaagacgaaacccagggaggagcagttcaactctactttccgggtggtgagcgtgctgacggtggtgcaccaggactggctgaacgggaaggagtacaagtgcaaggtgtccaacaagggactgccggcccccatcgagaagaccatcagcaagaccaagggccagccccgagagccccaagtgtacacgctccctcccagcagggaagagatgaccaagaaccaggtgagcctgacatgcctggtgaagggtttctacccatccgacatcgcggtggagtgggagtccaacgggcagcccgaaaacaattacaagaccacccctcccatgctggactcggacggcagcttctttctgtactccaagctgaccgtggacaagagcaggtggcagcagggcaacgtgttcagctgcagcgtgatgcacgaggccctgcacaaccattacacccagaagtccctcagcctgagccccggaaag

SEQ ID NO: 379 - DNA, 1413 bp, synthetic construct
  misc_feature 1..1413: note = Treme_HC_IgG2-CO21
  source 1..1413: mol_type = other DNA
atggagactcccgcccagcttttgttcctcctcctcctatggctcccggacaccaccggacaggtccagctcgtagagagcgggggaggcgtcgttcagcccggtcggtcgctaaggctctcgtgcgcggccagcggcttcacctttagcagctacggcatgcactgggtcaggcaggcccccggtaagggtctggagtgggtcgccgtcatctggtacgacggctccaacaagtattacgccgattccgttaaagggcggttcaccatttccagggacaactccaagaacaccctctacctgcagatgaattccctgcgggccgaagacaccgccgtgtattactgcgcgcgggacccccggggggccaccctgtattattactattacgggatggacgtctggggccagggcaccaccgtcacggtcagctccgccagcacaaagggtccgagcgttttccccctggccccctgctcgcgctccaccagcgagtccaccgccgccctgggctgtctggtcaaggactacttccccgagccggtgactgtcagctggaactccggcgcgctcacgagcggggtgcatacgttccccgccgtcctacagagttcggggctgtactccctgagcagcgtggtgacggtgcccagctccaacttcgggacccagacctacacctgcaacgtggaccacaagcccagcaacaccaaggtggataagacggtggagaggaagtgctgcgtggagtgcccgccctgtccggccccgcccgtggccggccccagcgtgttcctctttccccccaagcccaaggacaccctgatgatctcgaggacgcccgaggtgacctgcgtggtggtcgacgtgagccacgaggatcccgaggtgcaattcaactggtacgtggacggggtggaggtgcacaacgccaaaaccaagccaagggaagaacagttcaatagcacctttagggtggtaagcgtgctgaccgtcgtgcaccaggattggctgaacgggaaggagtacaagtgcaaggtgagcaacaagggcctccccgccccaatcgagaagaccatcagcaaaaccaaggggcaacccagggagccccaggtgtataccctgcccccgtccagggaggagatgacaaagaaccaggtgtccctgacctgtctggtcaagggcttttatcccagcgacatcgccgtggagtgggaaagcaacgggcagccagaaaacaactacaagaccacgccccccatgctggacagcgatggttcctttttcctgtacagcaagctgaccgtggacaagagtaggtggcaacaggggaacgtgttctcctgcagcgtgatgcatgaggccctccacaaccactacacccagaaaagcctgtcactgtcgcccgggaag

SEQ ID NO: 380 - DNA, 1413 bp, synthetic construct
  misc_feature 1..1413: note = Treme_HC_IgG2-CO22
  source 1..1413: mol_type = other DNA
atggagactcccgcacagttgctgttcctcctactcctctggctccccgacaccacgggacaggtccagttggtcgagtccgggggcggggtcgtccaacccgggcgatccctcaggctcagctgtgccgccagcggcttcacgttcagcagctacggcatgcactgggtcaggcaggcccccggcaaggggctcgagtgggtcgccgtcatttggtacgacggctccaacaagtactacgccgacagcgtcaagggccgcttcaccatcagccgggataacagcaagaacactctctatctgcagatgaacagcctgagggccgaagacacggccgtgtactactgcgccagggacccccgcggcgccaccctgtactactactattacggcatggacgtctggggccagggtaccaccgtgaccgtgagcagcgcctccaccaagggccccagcgtgttcccactcgccccctgcagccggagcacaagcgaatccaccgccgctctcggatgcctggtgaaggactacttccccgagcccgtgaccgtgtcgtggaatagcggcgccctgaccagcggcgtccacaccttccccgccgtgctgcagagcagcgggctgtactccctgagctccgtggtcacggtgccctcctccaatttcggcacccagacctacacctgcaatgtagaccacaagccctccaataccaaagtggacaagaccgtggagaggaagtgttgcgtggagtgtcccccctgccccgccccgcccgtggccggccccagcgtgttcctctttccgccgaagcccaaggacaccctgatgatcagccgcacgccggaggtgacctgcgtggtggtggacgtgagccacgaagaccccgaggtccagtttaactggtatgtggacggcgtggaggtgcacaacgccaagaccaagcccagggaggagcagttcaacagcacctttagggtggtgagcgtgctgacggtcgtgcaccaggactggctgaatggcaaagagtacaagtgcaaggtgtccaacaagggcctgcccgccccgatcgagaagacgatctccaagaccaagggccagccccgcgagccccaggtctataccctccctcccagcagggaggaaatgaccaaaaatcaggtgtccctgacctgcctggtgaaggggttttaccccagcgatatcgccgtggaatgggagtcgaacggccagccagagaacaactataaaaccaccccgcccatgctggactccgacggcagcttcttcctgtacagcaagctgaccgtagacaagtcgcgctggcagcagggcaatgtcttcagctgctcggtgatgcacgaggccctgcataatcactacacccagaaaagcctgagcctgtcccccgggaag

SEQ ID NO: 381 - DNA, 1413 bp, synthetic construct
  misc_feature 1..1413: note = Treme_HC_IgG2-CO23
  source 1..1413: mol_type = other DNA
atggagacacccgcccagctcctcttcctcctcctactctggttgcccgacaccaccggacaggtacagctcgtagaatccggcggcggcgtcgtacagcccggcaggtccctacggctctcctgtgccgccagcgggttcacgttcagcagctacggcatgcattgggtccgtcaagccccgggcaagggtttagagtgggtcgccgtcatctggtacgacggctccaacaagtactacgccgacagcgtcaagggcaggttcaccatttcacgggacaatagcaagaacacgctctacctgcagatgaacagcctgcgagccgaggacaccgccgtgtactactgcgcccgggaccccaggggcgccaccctctactattactactacgggatggatgtctggggccagggaaccaccgtgaccgtgtcctccgccagcacaaaggggccctccgtgttccccctggccccctgcagcaggagcacctcggagagcaccgccgccctgggctgcctggtgaaggactatttccccgagcccgtgaccgtcagctggaacagcggcgcgctgacctccggcgtgcatacctttccggccgtgctgcagagcagcggcctgtactcactgagcagcgtggtcaccgtcccgtccagcaacttcgggacccagacctatacctgcaacgtggaccacaagcccagcaacaccaaggtcgacaagaccgtggagcggaagtgctgcgtggaatgccccccgtgcccggcgccgcccgtggccggccccagcgtcttcctgttcccacccaagccgaaggataccctgatgatcagcaggacccccgaggtcacctgcgtcgtggtggacgtgtcccacgaggaccccgaggtgcagttcaactggtacgtcgacggcgtcgaggtccacaacgccaagacaaagccaagggaggagcagtttaacagtacgttccgggtggtgagcgtgctgaccgtggtccaccaggactggctgaacggcaaggagtataagtgcaaggtcagcaacaaggggctgcccgcccccatcgaaaagactatcagcaagaccaaagggcagccccgggaaccccaggtgtacaccctccccccaagcagggaggagatgaccaagaaccaggtgagcttgacatgcctggtgaaggggttctaccccagcgacatcgccgtcgagtgggagtccaatggccagcccgagaacaactacaagaccaccccgcccatgctcgatagcgacggcagcttcttcctgtacagcaagctgaccgtggacaagtccaggtggcagcagggcaacgtgttctcgtgcagcgtgatgcacgaggccctgcataaccactacacccagaaaagcctcagcctatcccccggcaag

SEQ ID NO: 382 - DNA, 1413 bp, synthetic construct
  misc_feature 1..1413: note = Treme_HC_IgG2-CO24
  source 1..1413: mol_type = other DNA
atggagacgcccgcccaactcctcttcctcctcctcctctggctcccggacaccaccggccaggtccagctcgtcgagagcggcggcggggtcgtccagccaggcaggagcctaaggctttcctgcgccgccagcggcttcacctttagcagctacggcatgcactgggttcgccaggcccccggcaagggcctcgagtgggtcgccgttatctggtacgacggcagcaacaagtactacgcggacagcgtcaagggcaggtttaccataagcagggacaactccaagaacaccttgtacctgcagatgaacagcctgcgagccgaggacactgccgtgtactactgcgcgcgcgacccccgcggcgcgaccctgtactactactactacgggatggatgtctggggccaggggaccaccgtgacggtaagctccgcgagcaccaaggggccctcggtgttccccctggccccctgctccaggtccaccagcgagtccaccgccgccctggggtgtctggtgaaggactacttccccgagcccgtgacagtctcctggaacagcggggccctcacaagcggcgtgcacaccttccccgccgtgctgcagtcaagcggactgtacagcctgtccagcgtggtgaccgtgccgtccagcaatttcggcacccagacctacacctgtaacgtcgaccacaagcccagcaacaccaaggtggacaagaccgtggagcgcaagtgctgcgtggaatgccccccgtgcccggccccacccgtggccggcccctccgtgtttctgttcccacccaaacccaaggacacgctgatgatcagcaggacccccgaggtcacctgcgtggtggtggacgtgagccacgaagaccccgaggtgcagttcaactggtacgtggacggcgtggaggtgcacaacgccaagaccaagccgcgggaggagcagttcaatagcacctttagggtggtgagcgtactgaccgtggtgcaccaggactggctgaacgggaaggaatacaagtgtaaggtcagcaacaaggggctccccgcccccatcgagaaaaccatcagcaaaaccaaggggcaaccgcgagagccccaggtgtacaccctgccaccgagcagggaagagatgaccaagaatcaggtgagcctgacctgcctggtgaaaggcttctacccaagcgatatcgccgtggagtgggagagcaatgggcagcctgagaataactacaaaaccaccccgcccatgctggactccgacgggagcttctttctgtatagcaagctgaccgtggataagagccgttggcagcaggggaacgtgttcagctgttcagtgatgcacgaggccctccataaccactacactcaaaagtccctcagccttagccccggcaag

SEQ ID NO: 383 - DNA, 1413 bp, synthetic construct
  misc_feature 1..1413: note = Treme_HC_IgG2-CO25
  source 1..1413: mol_type = other DNA
atggagactcccgcccagctcctctttctactcctcctctggctccccgacacgaccgggcaggtccagctcgtcgagagcggcgggggcgtcgtacagcccggcaggagcctcaggcttagctgcgccgcctccgggttcacatttagcagctacgggatgcactgggtcaggcaggcaccgggcaagggcctcgagtgggtcgccgtcatctggtacgacggctccaacaagtactacgccgatagcgtcaagggccggttcacgatcagcagggacaacagcaagaacacgctttacctgcagatgaacagcctgagggccgaggataccgccgtttattactgcgccagggacccccggggggccaccctgtactactactactacggcatggacgtgtggggacagggtaccaccgtgaccgtgagcagcgcctccacgaaggggcccagtgtgttccccctggccccctgcagcaggtccaccagcgagagcaccgcggccctgggctgcctagtgaaggactacttccccgagcccgtgaccgtgagctggaactccggcgccctcaccagcggggtccacacctttccggcggtgctccagagcagcggcctgtactccctcagcagcgtcgtgacggtacccagcagcaacttcggcacccaaacctacacctgtaatgtggaccacaagcccagcaacaccaaggtcgacaagaccgtggagcgaaagtgctgcgtggagtgccctccctgccctgccccgcccgtggccgggcccagcgtgttcctgttccctcccaagccgaaggacaccctgatgatttcccggacccccgaggtgacgtgcgtggtggtggacgtgtcccacgaggaccccgaagtgcagttcaactggtacgtggacggggtggaggtgcacaacgcgaagacgaagccccgggaggagcagttcaacagcaccttcagagtcgtgagcgtgctgaccgtcgtgcaccaggattggctgaacggcaaggagtacaagtgtaaggtgagcaacaaggggctgcccgcccccatcgagaagacgatctcaaagaccaagggccagcccagggaaccgcaggtgtacacgctgccccccagcagggaggagatgaccaagaaccaggtgtccctgacgtgcctggtcaagggcttctacccctccgatatcgccgtggagtgggaatccaacggtcagcccgagaacaactacaaaaccactccgcccatgctggactccgacggcagcttctttctgtactccaagctgaccgtggacaaatccaggtggcagcagggcaacgtgttttcctgctccgtgatgcacgaggccctgcacaaccactacacccagaagtccctctccctgtcccccggcaag

SEQ ID NO: 384 - protein, 475 aa, synthetic construct; identical to SEQ ID NO: 282
  REGION 1..475: note = Treme_HC_IgG1 (tremelimumab IgG1 heavy chain)

SEQ ID NO: 385 - protein, 20 aa, synthetic construct
  REGION 1..20: note = Treme_HC_IgG1 (signal peptide)
METPAQLLFLLLLWLPDTTG

SEQ ID NO: 386 - protein, 125 aa, synthetic construct; identical to SEQ ID NO: 357
  REGION 1..125: note = Treme_HC_IgG1 (variable region, VH)

SEQ ID NO: 387 - protein, 330 aa, synthetic construct
  REGION 1..330: note = Treme_HC_IgG1 (constant region)
ASTKGPSVFPLAPSSKSTSGGTAALGCLVKDYFPEPVTVSWNSGALTSGVHTFPAVLQSSGLYSLSSVVTVPSSSLGTQTYICNVNHKPSNTKVDKRVEPKSCDKTHTCPPCPAPELLGGPSVFLFPPKPKDTLMISRTPEVTCVVVDVSHEDPEVKFNWYVDGVEVHNAKTKPREEQYNSTYRVVSVLTVLHQDWLNGKEYKCKVSNKALPAPIEKTISKAKGQPREPQVYTLPPSREEMTKNQVSLTCLVKGFYPSDIAVEWESNGQPENNYKTTPPVLDSDGSFFLYSKLTVDKSRWQQGNVFSCSVMHEALHNHYTQKSLSLSPGK

SEQ ID NO: 388 - DNA, 1425 bp, synthetic construct
  misc_feature 1..1425: note = Treme_HC_IgG1-CO01
  source 1..1425: mol_type = other DNA
atggagactcccgcccagctcctcttcctcctcctactctggcttcccgacaccaccgggcaggtacagctcgtcgaatccgggggcggcgtagtccagccgggcaggtcgctccggctcagctgcgccgcctccgggtttaccttcagcagctacggcatgcattgggtcaggcaggcccccggcaaggggctcgagtgggttgccgtcatctggtacgacggctcaaataaatactacgccgacagcgtcaagggcaggttcaccatcagcagggacaatagcaagaacacgctctacctgcagatgaacagcctgcgggccgaagacaccgccgtgtattactgcgccagggacccccgcggcgcgaccctgtactactactactacggcatggacgtgtggggccagggcacgaccgtgaccgtgtcctctgccagcactaagggccccagcgttttccccctggccccgagcagcaagagcacctccggcggcacggccgccctggggtgcctggtgaaggactatttccccgagcccgtgaccgtgagctggaactccggcgccctgacctctggcgtccacaccttccccgccgtgctgcagagtagcggcctgtacagcctgtcctccgtggtcaccgtgcccagcagctcgctgggcacccagacctacatctgcaatgttaaccacaagccctccaataccaaggtggataagagggtggagccaaagagctgcgacaagacacacacctgccccccgtgtcccgcccccgagctgctgggcggcccctccgtgttcctgttcccacccaagccgaaggacaccctcatgataagccggacccccgaggtgacctgcgtggtggtggatgtgagccacgaggaccccgaagtgaagttcaactggtacgtggacggcgtggaggtgcacaatgccaagaccaaaccgcgtgaggagcagtacaacagcacctaccgcgtggtgagcgtgcttaccgtccttcatcaagactggctgaacggcaaggagtacaagtgcaaggtgtccaataaggccctgccggcccccatcgagaagaccatctccaaggccaaggggcagccccgggagccccaggtgtacacgctgccccccagcagggaggagatgaccaagaaccaggtgtccctcacctgcctggtgaagggcttctaccccagcgacatagccgtggaatgggaatccaacgggcagcccgaaaataactacaagacgacccctcccgtgctggactccgatggcagctttttcctgtactcaaagctgaccgtggacaagagcaggtggcagcagggcaacgtgtttagctgttccgtgatgcatgaggctctgcacaaccactacacccagaaaagcctgagcctgagccccggcaag

SEQ ID NO: 389 - DNA, 1425 bp, synthetic construct
  misc_feature 1..1425: note = Treme_HC_IgG1-CO02
  source 1..1425: mol_type = other DNA
atggagacgccggcccaactccttttcctccttctcttgtggctccccgacaccaccggccaggtccagctcgtcgaatccggaggcggggtcgtccagcccggcaggagcctccggctcagctgcgcggcctccgggttcacgtttagcagctacggcatgcactgggtacgtcaggcccccggcaagggtctggagtgggtcgcggtcatctggtacgacggtagcaacaagtattacgcggactcggtcaaggggcggttcaccatcagcagggataacagcaagaacacgctctacctgcagatgaacagcctgagggccgaggacacggccgtgtactactgcgccagggacccccgaggcgccaccctgtactactactattacggcatggacgtgtggggccagggcaccacagtgacggtgagcagcgcctccaccaaaggcccctccgtcttccccctggcccccagctccaagagcacaagcggcggcaccgccgcgctcggctgcctggtgaaggattacttccccgagcccgtgaccgtgagctggaacagcggcgccctgacctccggcgtgcataccttccccgccgtgctgcagtccagcgggctgtactccctgagcagcgtggtgaccgtgcccagctccagcctcggcacccagacctacatctgcaatgtgaatcacaagccgtccaacaccaaggtggacaagcgtgtggaacccaagtcgtgcgacaagacccacacctgcccgccctgccccgccccggagctcctgggcggcccgtccgtgttcctgttccctcccaagcccaaggatacactgatgatcagcaggacccccgaggtgacctgcgtggtggtggacgtgagccacgaggaccccgaggtgaaatttaactggtacgtggacggggtggaggtccacaacgccaaaacgaagccgcgagaagaacagtacaactccacctaccgggtggtcagcgtcctgaccgtcctgcatcaagactggctgaacggaaaagagtacaagtgcaaggtcagcaacaaggcgctgcccgccccgatcgagaagacgatcagcaaggccaaaggccagccccgcgagccccaggtctacaccctgccccccagcagagaggagatgacgaagaaccaggtgtccctcacctgtctggtgaagggcttctacccctccgacatcgccgtcgagtgggagagcaatgggcagcccgagaacaattataagaccaccccgcccgtgctggactccgacggcagcttctttctgtacagcaagctgaccgtggacaagtcgcggtggcagcagggcaacgtgttcagctgctcggtgatgcacgaagccctgcacaaccactatacccagaaaagcctgagcctctcccccgggaag

SEQ ID NO: 390 - DNA, 1425 bp, synthetic construct
  misc_feature 1..1425: note = Treme_HC_IgG1-CO03
  source 1..1425: mol_type = other DNA
atggaaacccccgcccaactcctcttcctcctcctcctatggcttccggacaccaccgggcaggtccagctcgtcgagtccggcgggggcgtcgtccagccgggcaggagcctcaggctctcctgcgccgcatcaggcttcacctttagctcgtacgggatgcactgggtccggcaggcgcccggcaagggcttggagtgggttgccgtaatctggtacgacggcagcaacaagtactacgccgactccgtcaagggccggttcaccatctccagggacaacagcaagaacaccctctacctgcagatgaacagcctgagggcggaggacaccgccgtgtactattgcgccagggaccccaggggcgccaccctgtattactactactacggcatggacgtgtggggccagggcacaacagtcacggtgtcgtcagccagcaccaaaggcccgtccgtcttccccctggcccccagcagcaagagcacatccgggggaaccgccgccctgggctgtctggtgaaggactacttccccgagcccgtgaccgtgtcgtggaacagcggcgccctgaccagtggggtgcatacgttccccgccgtgcttcaaagcagcggcctgtacagcctgagctccgtggtgaccgtgcccagcagctcgctggggacccagacctacatctgtaatgtgaaccacaagcccagcaataccaaggtggacaagcgagtggagcccaagtcctgtgataagacccacacctgcccgccctgccccgcgcccgaactgctgggcggccctagcgtgttcctgttccctcccaaacccaaagacactcttatgatcagccggacccccgaggtgacctgtgtggtggtggacgtcagccatgaggacccggaagtgaagtttaactggtacgtggacggcgtggaggtgcataacgccaaaaccaaaccccgggaggagcagtacaacagcacgtacagggtcgtgtccgtgctcaccgtgctgcaccaggattggcttaacggcaaggagtacaagtgcaaggtgagcaacaaggccctgcccgccccgatcgagaagaccatctccaaggctaagggccagcctagggagccacaggtgtacacactgcccccctccagggaggaaatgacgaaaaatcaggtgagcctgacctgcctggtgaaggggttctacccctccgacatcgccgtggagtgggaaagcaacgggcaacccgagaataactacaaaaccaccccgcccgtgctggatagcgacggcagcttcttcctgtactccaagctgaccgtggataagagccgatggcagcagggcaacgtgttcagctgctcagtgatgcacgaggcgctgcataaccactacacccagaagagtctgtcgctgagccccggcaaa

SEQ ID NO: 391 - DNA, 1425 bp, synthetic construct
  misc_feature 1..1425: note = Treme_HC_IgG1-CO04
  source 1..1425: mol_type = other DNA
atggagactcccgcccaactcctattcctactcctcctctggctcccggacaccacggggcaagtccagctcgtggagtccggcgggggcgttgtacagcccggccgaagcctcaggctcagctgcgccgccagcggcttcaccttctccagctacggcatgcactgggtccgccaggcccccgggaaggggctcgagtgggtcgccgtcatctggtacgacggctccaacaagtactacgccgacagcgtcaagggcaggttcaccatctcccgggataactccaagaataccctctacctgcagatgaacagcctgcgagccgaggataccgcggtctactactgcgcccgcgaccccaggggcgccaccctgtactactactattacggcatggacgtgtggggccagggtaccaccgtgaccgtgtcctccgccagcacgaaagggcccagcgtcttcccgctggcccccagctccaagagcacgtccggcggcaccgccgccctgggatgtctggtgaaagactactttcccgaacccgtgaccgtgtcgtggaactcaggcgcccttaccagcggagtgcacaccttcccggccgtgcttcagagctcgggactctattccctgagcagcgtggtcaccgtgcccagcagcagcctgggcacccagacctacatttgcaacgtgaaccacaagccctctaacacgaaggtggacaagagggtggagcccaagagctgcgacaagacccacacctgccccccgtgcccagcgcccgagctgctcggcggccccagcgtgttcctgttccctcccaagccgaaggacacgctgatgatcagcaggacgccagaggtaacctgcgtggtggtagacgtgtcccacgaggaccccgaggtgaaattcaactggtacgtcgatggcgtggaggtgcacaacgccaagacgaaaccccgggaggagcaatataattccacctacagggtggtcagcgtgctgaccgtgctccaccaagactggctgaacgggaaagaatacaagtgcaaagtgtccaataaagccctgccagcccccattgagaagaccatcagcaaggccaaggggcagcccagggaaccccaggtgtacaccctgcccccatccagggaggagatgaccaagaaccaggtgtccctgacgtgcctggtcaagggcttctatcccagcgacatcgccgtcgagtgggaaagcaatgggcaacccgagaacaactacaagaccaccccgcccgtgctcgactccgacggcagcttcttcctctactccaagctgaccgtggataagagccgctggcagcagggcaatgtgttcagctgtagcgtgatgcacgaggccctgcacaaccactacacccaaaagtcgctcagtctgtcccccggcaag

SEQ ID NO: 392 - DNA, 1425 bp, synthetic construct
  misc_feature 1..1425: note = Treme_HC_IgG1-CO05
  source 1..1425: mol_type = other DNA
atggaaacgcccgcccagctcctcttcctcctcctcctctggctccccgacactacgggccaggtacagctcgtcgagagcgggggcggcgttgtacagcccggccggtccctcaggctatcctgcgccgccagcggcttcaccttcagcagctacggcatgcactgggtcaggcaggcccccgggaagggcctcgagtgggtcgccgtcatctggtacgacggctccaataagtactacgcggacagcgttaaggggcgcttcacgatcagcagggacaactccaagaacacgctctacctgcagatgaactccctgagggcggaggacaccgccgtgtactactgcgccagagatcccaggggtgcgaccctctattactactactacggcatggacgtgtggggccagggaacgaccgtgaccgtgtccagcgccagcaccaaagggcccagcgtgttccccctggccccctccagcaagagcacgagcggtggcaccgccgccctcggctgcctggtgaaagactattttcccgagcccgtgacggtgagctggaacagcggggccctgaccagcggggtgcatacgttccccgccgtgttgcagtcgagcggcctgtactccctgagctccgtggtgaccgtgccgtcctcctcgctgggcacccaaacctacatctgtaacgtgaaccacaagcccagcaataccaaggtggacaagcgggtggagccgaaatcctgtgacaagacccacacctgcccgccctgccccgcccccgagctgctgggcgggccctccgtgttcctgttccctcccaagccgaaggacaccctgatgatctcgaggacccccgaggtgacctgcgtggtggtcgacgtgagccacgaagaccccgaggtgaagttcaactggtacgtggacggggtggaggtccacaacgccaagactaaaccccgcgaggaacagtacaacagcacctacagggtggtcagcgtgctgaccgtgctgcaccaggactggctgaatggcaaggaatacaagtgcaaggtgtccaataaggcactgccagcgcccatcgagaaaaccatcagcaaggcgaaggggcagccgagggagccccaggtgtacacgctgccccccagtagagaggagatgaccaagaaccaggtgtcgctaacttgcctggtgaaggggttctacccctcggacatcgccgtggagtgggagtccaacggccagcccgagaataactacaagaccacccctcccgtgctggactccgacggcagcttcttcctgtacagcaagctgaccgttgataagtcccggtggcagcagggaaacgtgttttcctgcagcgtcatgcacgaggcgctgcacaaccactacacccaaaaaagcctgagcctcagtcccggcaag

SEQ ID NO: 393 - DNA, 1425 bp, synthetic construct
  misc_feature 1..1425: note = Treme_HC_IgG1-CO06
  source 1..1425: mol_type = other DNA
atggagactccggcccagctcctcttcctcctcctcctctggctccccgacaccaccggtcaggtccagctcgtcgagagcggaggcggcgtcgtccagcccgggcggtcgctcaggctcagctgcgccgccagcggcttcaccttcagcagctacggcatgcattgggtcaggcaggccccgggcaagggtcttgagtgggtcgccgtcatctggtacgacggctccaacaagtactacgccgacagcgtcaaaggccggttcaccatttcccgggataactccaagaatacgctctacctgcagatgaacagcctccgcgccgaggacaccgccgtctactactgcgcacgggacccccggggggccacgctgtactattactactacggcatggacgtgtggggccaggggaccaccgtaaccgtgagctccgccagcaccaagggccccagcgtgtttccgctcgcccctagcagcaagtccacctccgggggcaccgccgccctggggtgcctggtgaaggactacttccctgagcccgtgaccgtcagctggaacagtggcgccctgaccagcggggtgcacacgttccccgccgtgctgcagagctccggcctctatagcctcagcagcgtcgtgaccgtgccgagcagctccctgggtacccagacctacatatgcaacgtaaaccataaaccctccaacacgaaggtggacaaaagggtggaacccaaaagctgcgacaagactcacacatgcccgccctgccccgccccagagctgctggggggccccagcgtgttcctgttcccgcccaagcccaaggacaccctgatgatcagccgcacccccgaagtgacctgcgtggtggtggacgtgagccacgaggacccggaggtgaagttcaactggtacgtggatggggtggaagtgcacaatgccaagaccaagccccgggaggagcagtacaactctacctaccgggtggtgagcgtgctcacggtgctgcaccaggactggctcaatggcaaggagtataagtgcaaggtgagcaacaaggccctgccagcccccatcgaaaaaacgatcagcaaggccaagggccagccccgggagccacaggtgtacaccctgcccccctccagggaggagatgaccaagaaccaggtgtccctgacctgcctggtgaagggcttctacccctccgacatcgccgtcgagtgggagtccaacggccagccagagaacaactacaagaccacgccccccgtgctcgacagcgacggcagcttctttctctactccaagctgaccgtggataagtccaggtggcagcagggcaacgtctttagctgtagcgtcatgcacgaggccctgcacaaccactacactcagaaaagcctgagcctgtcccccggcaag

SEQ ID NO: 394 - DNA, 1425 bp, synthetic construct
  misc_feature 1..1425: note = Treme_HC_IgG1-CO07
  source 1..1425: mol_type = other DNA
atggagactccggcccagctcctcttcttgctcctcctctggctcccggacaccaccgggcaggtccaactcgtcgaatccggcggcggcgtcgtacagcccggcaggagcctcaggctttcctgtgccgccagcggcttcaccttcagctcctacggcatgcactgggtcaggcaggcccccgggaagggcctcgagtgggtcgccgtcatctggtacgacggcagcaacaagtactacgccgactccgtcaagggcaggttcaccatcagcagggacaattccaaaaacacgctctacctgcaaatgaacagcctgcgcgccgaggacacagccgtgtactactgcgcccgggatccccggggcgccaccctctactactactattacgggatggatgtgtgggggcagggcaccacggtgacggtgagcagcgcctccaccaaaggccccagcgtgttccccctggcgcccagcagcaaaagcaccagcgggggaaccgccgcgctgggctgcctggtgaaggactactttcccgagcccgtgaccgtgtcctggaacagcggcgccctcacgagcggggtgcacaccttccccgcggtgctgcagagcagcggcctgtacagcctgagcagcgtggtgaccgtcccctcctccagcctgggcacccagacatacatctgcaacgtgaaccataagcccagcaataccaaggtcgacaagcgagtggagcccaagagctgcgacaagactcatacctgcccgccctgccccgcccccgagctgctgggcggccccagcgtgttcctgttcccgcccaaaccgaaggataccctgatgatatcccgcacccccgaggtgacctgcgtggtggtggacgtgagccacgaggacccggaggtgaaattcaactggtacgtggatggagtggaagtgcataacgccaagaccaagcccagggaggagcagtacaacagcacctaccgagtggtgagcgtgctgaccgtgctgcaccaagactggctgaacggcaaagagtacaagtgcaaagtgtcaaataaagccctccccgcccccatcgagaaaaccatctcgaaggccaagggccagccacgcgagccccaggtgtacaccctcccgcccagccgggaggagatgaccaagaaccaagtgtccctgacgtgcctggtgaaggggttctaccccagcgacatagccgtagagtgggagagcaatggccagcccgagaataattataagacgactccccccgtgctcgacagcgacggcagcttcttcctctacagcaagctcaccgtcgacaagagcaggtggcagcagggcaatgtgttctcctgctccgtcatgcatgaggccctgcacaaccactacacccagaaaagcctgtccctgtccccaggtaag

SEQ ID NO: 395 - DNA, 1425 bp, synthetic construct
  misc_feature 1..1425: note = Treme_HC_IgG1-CO08
  source 1..1425: mol_type = other DNA
atggagactcccgcccagctcctattcctcctcctcctctggcttcccgataccaccggtcaggtccagctcgtcgagtccggcggcggcgtggtacaacccggacggtccctccggctcagctgcgccgcgtccggcttcaccttcagctcctacgggatgcactgggtccggcaggcccccggtaagggcctcgagtgggtcgccgttatctggtacgacggcagcaacaagtactacgccgacagcgtcaagggccggttcacaatcagcagggacaactccaagaataccctctacctgcagatgaacagcctgcgggccgaggatacggcggtctactactgcgccagggacccgaggggcgccaccctgtattactattactacggcatggacgtgtggggccagggcaccaccgtgaccgtgtccagcgccagcaccaaggggccctcggtgtttcccctggcccccagctcaaagagcaccagcggcgggaccgcggccctgggatgcctggtgaaggactactttcccgagcccgtgaccgtgtcctggaactccggcgcgctgacgagcggcgtacacacctttcccgccgtgctgcagagcagcggcctctatagcctgagcagcgtggtgaccgtgcccagcagcagcctgggcacgcagacctacatctgcaacgtgaaccacaagccgagcaacaccaaggtggataagagggtcgagcccaagtcgtgtgacaagacacatacctgccccccgtgccccgcccccgagctgctggggggccccagcgtgttcctgttcccacccaagccgaaagacacgctgatgattagcaggacccccgaggtgacctgcgtggtggtggacgtcagccacgaggaccccgaggtgaagttcaactggtacgtggacggcgtggaggtgcataatgctaagaccaagccccgggaggagcagtacaactccacctacagagtggtaagcgtactgaccgtgctgcaccaggactggctgaacggtaaggagtacaagtgtaaggtgagcaacaaggccctgcccgcccccatcgagaagacgatctcgaaggccaagggccagccccgggagccccaggtctacacgctccctcccagcagggaggagatgacgaagaaccaggtcagcctcacgtgcctcgtgaagggcttctaccccagcgacatagccgtggagtgggagtccaacggacagcccgagaacaactacaagaccacgccccccgttctggactccgacggatcctttttcctctacagcaaactgaccgtggacaagtcccggtggcagcagggcaacgtgttcagctgcagcgtgatgcacgaagccctgcacaaccactatacccagaaaagcctgtccctcagccccggcaag

SEQ ID NO: 396 - DNA, 1425 bp, synthetic construct
  misc_feature 1..1425: note = Treme_HC_IgG1-CO09
  source 1..1425: mol_type = other DNA
atggagacgcccgcccagctcctcttcctcctactcctttggctccccgacaccaccgggcaggtccagctcgtcgagtccggaggcggcgtcgtccagcccggcaggagcctcaggctcagctgcgccgccagcgggttcaccttcagcagctacggcatgcattgggtcaggcaggcccccggtaagggactcgagtgggttgccgtcatctggtacgacggcagcaataagtactacgccgatagcgtcaagggccgattcaccatctccagggacaactccaagaacacgttgtacctgcagatgaacagcctgagggcggaggacaccgccgtgtactactgcgcccgggatccgcggggggccacgctgtactactactactacggcatggatgtgtgggggcagggcaccaccgtgacggtgtccagtgcctctaccaagggcccctccgtgttccccctggcccctagcagcaagagcacaagcggcggcaccgccgccctgggatgtctggtcaaagactacttccccgagcccgtgaccgtgagctggaacagcggcgcactcaccagcggcgtccataccttcccggcggtgctgcagagctccggtctgtacagcctgagcagcgtcgtgacggtgccctcctcctccctgggcacccagacctacatctgcaacgtcaaccataagcccagcaacaccaaggtggacaagagggtggagccgaaaagctgcgacaaaacccacacctgcccgccctgtcccgcgcctgagctcctcggcggacctagcgtgttcctgttcccacccaagcccaaagacacactcatgatctccaggacccccgaggtcacctgcgtggtggtggacgtctcccacgaggaccccgaggtgaagttcaactggtatgtggacggcgtggaggtccacaacgccaagaccaaacccagggaggaacagtacaattctacctaccgcgtggtgagcgtgctgactgttcttcaccaggactggctgaacgggaaggaatacaaatgcaaggtgagcaacaaggccctgcccgcccccatcgagaagaccatctccaaggcgaagggccagccccgggaaccccaggtgtacaccctgccccccagcagggaggagatgaccaagaaccaggtgtccctgacctgcctcgtgaaggggttctaccccagcgacatcgccgtggagtgggaaagcaacggccagcccgagaacaactacaagacaaccccacccgtgctggactccgacggcagctttttcttatacagcaaactgactgtggacaaaagccgctggcagcagggcaacgtgttcagctgcagcgtgatgcacgaagccctgcacaatcactacacccagaaaagcctgagcctcagccccggcaag

SEQ ID NO: 397 - DNA, 1425 bp, synthetic construct
  misc_feature 1..1425: note = Treme_HC_IgG1-CO10
  source 1..1425: mol_type = other DNA
atggagacgcccgcccagcttctcttcctcctactcctctggctccccgacaccaccgggcaggtccagctcgtcgagagcggcggcggcgtggtgcagcccggccggagcctcaggttaagctgcgcggcgagcggcttcaccttctccagctacggcatgcactgggtccgccaggcgcccggcaaggggctcgagtgggtcgccgtaatctggtacgacggcagcaacaagtactacgccgacagcgtcaagggcagattcacaatctccagggacaactctaagaacaccttgtacctgcagatgaacagcctgcgcgccgaagacacggccgtgtactactgcgcccgggatccccggggcgcgaccctgtactactattactacggcatggacgtgtggggccaagggaccaccgtgaccgtgagcagcgccagcaccaagggcccctccgtgttcccgctggccccctccagcaagtccaccagcggcggcaccgcagccctcggctgcctggtgaaggactattttcccgagccggtgaccgtgagttggaatagcggcgccctgaccagcggcgtacacaccttccccgcggtgctgcagagctccggcctgtactccctgagcagcgtggtgaccgtgcccagctccagcctcggcacccagacctacatctgcaatgtgaaccacaagccgagcaacaccaaggtggataagagggtggagccgaaatcgtgcgacaaaacgcacacctgccccccatgtcccgcccccgaactcctgggcggtcccagcgtgtttctgttcccacccaaaccgaaggacaccctgatgatctccaggacacccgaggtgacctgcgtggtggtggatgtgtcccacgaggaccccgaggtgaaattcaattggtacgtggacggcgtggaggtccacaacgccaagaccaagcccagggaggaacaatacaactccacctacagggtggtgtcagtgctgaccgtcctgcaccaggattggctgaacggcaaggagtacaagtgcaaggtgtccaacaaggccctgccggcacccatcgagaaaaccatcagcaaagccaagggccagccccgggaaccccaagtgtacaccctgccccccagccgggaggaaatgaccaagaaccaggtgagcctcacctgcctggtcaagggcttctaccccagcgacatagccgtggagtgggagagcaacggccagcccgaaaacaactataagaccaccccgcccgtcctggacagcgacggctcttttttcctgtacagcaagctgaccgtggacaagagccgatggcagcaggggaacgtcttcagctgcagcgtgatgcacgaggccctgcataaccattatacccagaaaagcctcagcctgtcgcccggcaag

SEQ ID NO: 398 - DNA, 1425 bp, synthetic construct
  misc_feature 1..1425: note = Treme_HC_IgG1-CO11
  source 1..1425: mol_type = other DNA
atggagacacccgcccagctcctcttccttctcttgctctggctccccgacacgaccgggcaggtccagctcgtcgagtcgggcggaggcgtcgtccagcccggaaggagcctcaggctatcctgcgccgcgagcggcttcaccttcagctcctacggtatgcactgggtccggcaggcccccggcaaggggctcgagtgggtagccgtcatctggtacgacggctccaacaagtactacgccgacagcgtcaagggccggttcaccatcagcagggacaacagcaagaacaccctctacctgcaaatgaacagcctgagggccgaagataccgccgtgtactattgcgccagggacccccggggcgccacactatattactactactacggcatggacgtgtgggggcagggcaccaccgtgaccgtgtctagcgcgagcacgaagggccccagcgtgttccccctggcccccagctcaaagagcactagcggcggaaccgccgccctgggctgcctggtcaaggactattttccggagcccgtcacggtgtcctggaacagcggcgccctgaccagcggggtgcacaccttccccgccgtgctgcagagcagcgggctctacagcctgagcagcgtggtcaccgtgccttccagcagcctgggtacccagacctacatctgcaacgtgaatcacaaacccagcaacaccaaggtggacaagagggtggagcccaagagctgcgacaagacgcacacctgcccgccctgtcccgcccccgaactgctgggaggcccctccgtgttcctgttcccgcccaagccaaaggacaccctgatgataagcaggacccccgaggtgacctgcgtggtggtggacgtgtcccacgaggaccccgaggttaagttcaactggtatgtggacggcgtggaagtgcacaacgccaaaaccaagccccgggaggagcagtacaacagcacctatagggtggtgagcgtgctcaccgtgctgcaccaagactggctgaacgggaaagagtataagtgcaaggtgagcaataaagcgctgcccgccccgatcgagaagaccatcagcaaggccaagggccagccccgggagccgcaagtatacaccctgccgccgtcccgggaggagatgaccaagaaccaggtgagcctgacctgcctcgtgaaagggttttaccccagcgacatcgcggtggagtgggagtccaacggccaacccgagaacaactacaagaccaccccacccgtgctggactccgacggatcctttttcctctactccaagctgaccgtggataagtccaggtggcagcagggcaacgtgttcagctgcagcgtaatgcacgaggccctgcacaatcattacacgcagaaaagcctgtctctgagccccggcaag

SEQ ID NO: 399 - DNA, 1425 bp, synthetic construct
  misc_feature 1..1425: note = Treme_HC_IgG1-CO12
  source 1..1425: mol_type = other DNA
atggaaacgccagcccagctcttattcctcctcctcctctggctcccggacaccaccggccaggtccagctcgtagagtcagggggcggcgtcgtccagcccggcaggtcccttcgcctctcctgcgccgccagcggcttcaccttcagcagctacggcatgcactgggtcaggcaggcgcccggcaagggcctcgagtgggtcgccgtcatctggtacgacggcagcaacaaatactacgccgacagcgtcaagggccggttcaccatcagcagggacaacagcaagaacaccctctacctgcagatgaattccctgcgggctgaggataccgcggtgtactactgcgcccgcgaccccaggggcgcgacgctgtactactactactacggcatggacgtgtgggggcaggggaccaccgtcaccgtgagcagcgccagcaccaaagggccatccgtgtttcccctggccccgagctccaagagcaccagcggcggcacagccgccctgggctgtctggtgaaggactatttcccggagcccgtgaccgtgtcctggaacagcggcgccctgaccagcggcgtgcacacgttccccgccgtgctgcaaagctccggcctgtacagcctgagcagcgtggtgaccgtgcccagcagcagcctgggaacgcagacctacatctgtaacgtgaaccataagcccagcaacaccaaggtggacaaacgcgtcgagcccaagagttgcgacaagacccacacctgccctccctgtcccgccccagagctcctcgggggacccagcgtgttcctctttccccctaagcccaaggacacgctgatgattagcaggactcccgaggtgacctgcgtggtggtggacgtgagccacgaggacccagaggtgaaattcaactggtatgtggatggcgtggaggtccacaacgccaaaaccaagcccagggaggaacagtataacagcacctacagggtcgtatccgtcctgaccgtactgcaccaggactggctgaacggcaaggagtataagtgcaaagtcagcaataaggccctgcccgcacccatcgagaaaaccatctccaaggccaagggccagcccagggagccccaggtgtataccctgccccccagcagggaggagatgaccaagaatcaggtgagcctaacttgcctggtgaagggcttttaccccagcgacatcgccgtggagtgggagtccaacggccagcccgagaacaactataagaccaccccgcccgtgctggacagcgatggctccttcttcctctacagcaagctgaccgtggacaagagcaggtggcagcagggcaacgtgttctcctgcagcgtgatgcacgaggccctgcataatcattacacccagaagtcgctgagcctgagccccggtaag

SEQ ID NO: 400 - DNA, 1425 bp, synthetic construct
  misc_feature 1..1425: note = Treme_HC_IgG1-CO13
  source 1..1425: mol_type = other DNA
atggagactccagcccaactcctattcttgctccttctctggctccccgacaccaccggtcaggtccagctcgtcgagagcggaggcggcgttgtacagcccggccgcagccttcgactaagctgcgccgcctcgggctttaccttcagcagctacggcatgcactgggtcaggcaggccccaggcaaggggctcgagtgggtagccgtcatctggtacgacggaagcaataagtactacgcggacagcgttaagggccggtttaccatcagcagggacaacagcaagaacaccctctacttgcagatgaacagcctgagggcggaggatacggccgtgtactattgcgccagggatccccggggcgccaccctgtactactactattacggcatggacgtgtggggccagggcaccaccgttaccgtgagctcggccagcaccaaggggcccagcgtcttccccctggcccccagctccaagagcaccagcggcgggaccgccgccctgggctgcctggtgaaggactacttccccgagcccgtgacggtaagctggaacagcggcgccctgaccagcggcgtgcacaccttccccgccgtgctgcaaagcagcggcctctactccctgagtagcgtggtgaccgtgcccagctctagcctgggcacgcagacctacatctgcaacgtgaaccataaacccagcaacaccaaagtggataagcgggtggagcccaagtcctgcgacaagacacacacctgcccgccctgccccgcccccgagctgcttggcggccccagcgtctttctgttcccgcccaagccgaaggacacactcatgatcagccgtacccccgaggtcacctgcgtggtggtggacgtgagccacgaggaccccgaagtcaagttcaactggtatgtggacggcgtcgaagtccacaacgccaagaccaagcccagggaggagcagtacaacagcacctacagggtcgtctctgtgctgaccgtactgcaccaggactggctgaacggcaaggagtacaagtgcaaggtgagcaacaaggccctgcccgcccccatcgagaagaccatctccaaggccaagggccagccgagggaaccccaggtgtacaccctgcccccctcccgcgaggaaatgaccaaaaaccaggtgagcctgacctgcctggtgaaggggttctaccccagcgacatcgccgtggagtgggagagcaacggccagcccgaaaacaactacaagacgaccccgccggtgctggacagcgacggcagcttcttcctgtacagcaagctgacggtggacaagagccgttggcagcaaggcaacgtgttcagctgctccgtgatgcacgaggcgctccacaaccactacacccagaaatccctgagcctgtcgccggggaag

SEQ ID NO: 401 - DNA, 1425 bp, synthetic construct
  misc_feature 1..1425: note = Treme_HC_IgG1-CO14
  source 1..1425: mol_type = other DNA
atggagacgcccgcccagctcctcttcctcctcctcctctggctccccgacaccacgggccaggtccagctcgtcgaaagcgggggcggcgtcgtccaacccggacgaagcctccggctctcctgtgccgcctcgggctttacattctccagctacgggatgcattgggtaaggcaagccccggggaagggcctcgagtgggtcgccgtcatctggtacgacgggagcaataagtactacgcagacagcgtcaagggccggttcacgatctccagggacaattccaagaacaccctctacctgcagatgaactccctgagggccgaggatacggccgtgtactactgcgcccgggaccccaggggagccaccctgtattactactactacggcatggatgtgtggggccaggggaccacggtgacggtgtccagtgccagcacaaagggccccagcgtgttccccctggcccccagcagcaagagcaccagcggtgggaccgccgcgctcggctgcctggtgaaggattacttccccgagcccgtgaccgtgagctggaactccggcgccctcacgagcggggtgcacacgttccccgcggtgctgcagagcagtggcctgtactccctcagcagcgtggtgaccgtgcccagcagctcactgggcacccagacctacatctgcaacgtgaaccacaagcccagcaacaccaaagtcgacaagagggtggagccaaaaagctgcgataagacccatacctgtcctccctgccccgcccccgagctgctcggcggacccagcgtcttcctgttccctcccaaacccaaggacaccctgatgatctccaggacccccgaggtgacgtgcgtggtcgtggacgtgtcccacgaggaccccgaggtgaagttcaactggtatgtggacggcgtggaggtccacaacgccaagaccaaaccccgggaggagcagtataacagcacctacagggtcgtgagcgtgctgaccgtgctccaccaggactggctgaacggcaaggagtacaagtgtaaggtttccaacaaggccctgcccgcccccatcgagaagacgatctccaaggccaagggccagcccagggagccccaggtgtataccctgcccccctctagggaggagatgaccaagaaccaggtgagcctgacgtgcctggtgaagggcttttacccctccgacatcgccgtggagtgggagagcaatggtcagcccgagaacaactacaagaccaccccgcccgtgctggacagcgacggctccttcttcctgtacagcaagctgaccgtggacaagtcccggtggcagcagggcaacgtgttcagttgctctgtgatgcacgaggccctgcacaaccactacacccagaaaagcttatccctgagccccggcaag

SEQ ID NO: 402 - DNA, 1425 bp, synthetic construct
  misc_feature 1..1425: note = Treme_HC_IgG1-CO15
  source 1..1425: mol_type = other DNA
atggagacacccgcccaactgctctttttactcctcctctggctccccgacaccacgggccaggttcagttggtcgagtccgggggcggcgtcgtccagccgggccggagcctccgcctttcctgcgccgcctccggcttcaccttctccagctacggcatgcattgggtccgccaagcccccgggaaggggcttgagtgggtcgccgttatctggtacgacgggagcaacaagtattacgccgactccgtcaagggcagatttacgattagcagggacaacagcaagaacaccctttacctgcagatgaattccctgcgggcggaagacaccgccgtgtactactgtgcccgggaccccaggggcgcgaccctctactattactactatgggatggacgtgtgggggcagggcaccacggtgaccgtgagctctgcctccaccaagggccccagcgtattccctctggccccctccagcaaaagcaccagcggcggcacggccgccttggggtgcctggtgaaagattacttccccgaacccgtcaccgtgagctggaactccggcgccctgaccagcggggtgcacaccttccccgccgtgctgcagtcctccgggctctactcgctgagcagcgtggtgaccgtgcccagctcctccctgggcacccagacctatatctgcaacgtcaaccacaaacccagcaacaccaaggtcgataagcgggtggaacccaagagttgcgacaaaacccacacctgcccgccctgccccgccccagagctgctgggagggcccagcgtgttcctcttccctcccaagccgaaggacaccctcatgatcagccgcacccccgaagtgacgtgtgtggtggtggacgtgtcacacgaggaccccgaggtcaagttcaactggtatgtcgacggcgtcgaggtgcacaacgccaagacgaagccgagggaggagcagtacaacagcacctacagggtggtgtccgtcctgaccgtgctgcaccaggactggctgaacggcaaggagtataagtgcaaggtgagcaataaggccctgcccgcccccatcgagaagaccatcagcaaggccaagggccagccccgggagccccaggtgtacacactcccgcccagcagggaagaaatgaccaagaaccaggtgagcctgacctgtctcgtgaaaggcttctacccctccgacatcgcagtggagtgggagagcaacgggcagccggaaaacaactataagacgacgcccccggtgctggatagcgatggcagctttttcctgtacagcaaactgaccgtcgacaagtccaggtggcagcagggcaacgtgttcagctgcagcgtgatgcatgaagccctgcataaccattacacgcagaaaagcctgagcctgagccccggcaag

SEQ ID NO: 403 - DNA, 1425 bp, synthetic construct
  misc_feature 1..1425: note = Treme_HC_IgG1-CO16
  source 1..1425: mol_type = other DNA
atggagacgcccgcccagctccttttcctcctcctcctctggctcccagataccaccggccaggtccagctcgtcgagagcggcggcggagtcgtccagcccggccgctcgcttcggctttcctgcgccgcctccgggttcaccttctcctcgtacggtatgcactgggtcaggcaggcccccgggaaagggctcgagtgggtagccgtcatctggtacgacggcagcaacaagtactacgccgacagcgtaaaggggcgcttcaccatctccagggacaacagcaagaacacgctttacctgcagatgaacagcctgagggccgaagacaccgccgtctactactgcgcccgggaccccaggggtgccaccttgtactattactactacgggatggacgtgtggggccagggcacgaccgtgaccgtgtcgagcgcgtccaccaagggccccagcgtgttcccgctggctcccagctccaagagcacctccgggggcacagcggccctgggctgcctggtgaaggactacttccccgagcccgtgacggtgagctggaattccggcgccttgaccagcggcgtccacacctttcccgccgtgctccaaagcagcggcctgtatagcctgagctccgtggtgacagtccccagcagcagcctcggcacccagacctacatatgcaacgtcaatcacaaaccctccaacaccaaggtcgacaaacgggtggagcccaaaagctgcgacaagacccatacgtgcccgccctgccccgcccccgagctgctgggcgggcccagcgtattcctcttcccgccgaagcccaaggacaccctgatgatcagcaggaccccggaggtgacgtgcgtggtggtcgacgtctcccacgaagaccccgaggtgaagttcaattggtacgtggatggcgtggaggtgcacaacgccaagacgaaacccagggaggagcaatataacagcacatacagggtggtgtccgtgctgaccgtgctgcaccaggactggctgaacggcaaggagtacaagtgcaaggtgagcaacaaggccctccccgcccccatcgagaagaccatcagcaaggccaagggccagcccagggagccccaggtgtacaccctgccacccagcagggaggagatgacgaagaatcaggtgagcctcacctgcctggtgaagggcttctaccccagcgacatcgccgtggagtgggagtccaacggccagcccgagaacaactacaagacgacccctcccgtcctggactccgacgggagcttcttcctgtactccaagctcaccgtggacaaaagccgttggcagcagggcaacgtgttcagctgcagcgtgatgcatgaggccctgcacaatcactatacccaaaagtccctcagcctgtcccccggcaag

SEQ ID NO: 404 - DNA, 1425 bp, synthetic construct
  misc_feature 1..1425: note = Treme_HC_IgG1-CO17
  source 1..1425: mol_type = other DNA
atggagactcccgcccagcttctattcctactcttgctctggctcccggacaccaccggccaggtccagctcgtggagtccggcggaggggtggtccaacccgggcggtcgctccggctctcctgcgccgccagcggtttcacattcagcagctacgggatgcactgggttaggcaggcacccggcaagggcctcgagtgggtcgccgtcatctggtacgacggcagcaacaaatactacgccgatagcgtcaaaggacgctttacgatcagccgggacaactccaagaacaccctctacctgcagatgaacagcctgagggcggaggacaccgccgtgtattactgcgccagggatcccaggggcgccaccctgtactactactattacggcatggatgtgtggggccaggggacgacggtgaccgtgagctccgcctccaccaagggcccaagcgtgttccccctggcccccagcagcaagagcaccagcggcgggaccgccgccctggggtgcctggtgaaggactacttccccgagcccgtgacggtgtcctggaactccggcgcgctgaccagcggggtgcacaccttccccgccgtgctgcagagcagcggcctgtacagcctgtccagcgtggtgaccgtgccctcctcaagcctgggcacccagacctacatctgcaacgtcaatcacaaacctagcaacaccaaagtggataagcgggtggagcccaaatcatgcgacaagacgcacacttgtccaccgtgccccgcccccgagctcctgggtgggcccagcgtgttcctgttccctcccaagcccaaggacacgctcatgatctcgcggacccctgaggtgacctgtgtggtggtggacgtgagccacgaggatcccgaggtgaagttcaactggtacgtggatggcgtggaggtgcacaacgccaagaccaaaccccgggaggaacagtacaacagcacgtaccgggtggtgagcgtcctgaccgtgctgcaccaggactggctaaacggcaaagagtacaagtgtaaggtgagcaataaggccctgccggcccccatcgagaagacgatctccaaggccaagggccagccccgggagccgcaggtgtacaccctgccccccagtagggaggaaatgaccaagaaccaggtgagcctgacgtgtctggtgaagggcttctacccctcagacatcgccgtggagtgggagagcaacggccagcccgagaacaattataagaccaccccgcccgtgctggattcggacggctcctttttcctctacagcaagctgaccgtcgacaagtcccgatggcagcagggcaacgtgttcagctgcagcgtgatgcacgaggcgctgcacaaccactacacgcagaaaagcctgagcctcagccccggtaag

SEQ ID NO: 405 - DNA, 1425 bp, synthetic construct
  misc_feature 1..1425: note = Treme_HC_IgG1-CO18
  source 1..1425: mol_type = other DNA
atggagacacccgcccagttgcttttcctcctccttctctggctccccgacaccaccgggcaggtccagctcgtcgagagcggcggcggcgtcgttcagcccggacggtccctcaggctcagctgcgccgccagcggtttcacgtttagcagctacggcatgcattgggtcaggcaagcgcccggcaaggggctggagtgggtcgccgtcatctggtacgacgggagcaacaagtactacgccgacagcgtcaagggcaggttcaccatcagccgcgacaatagcaagaacaccttatatctgcagatgaacagcctcagggccgaggacacggccgtctactactgtgccagggacccccggggcgccaccctgtactactactactacggcatggatgtgtggggccaaggcaccaccgtgaccgtcagcagcgcgtccaccaaagggcccagcgtattccccctggccccttccagcaagtccacctccggcggcaccgccgccctgggctgcctggtgaaggactacttccccgagcccgtcaccgtatcttggaacagtggcgccctgaccagcggcgtgcatacctttcccgccgtgctgcaatccagcggactgtacagcctgtcctccgtggttaccgtgcccagcagctccctgggcacgcagacctacatctgtaacgtgaaccataagccctccaataccaaggtggacaagcgtgtggagcccaagagctgcgacaagacccacacctgtccgccctgccccgccccggagctgctgggcggccccagcgtgttcctgttcccacccaagcccaaggacaccctgatgatcagccggacccccgaggtgacctgcgtggtggtggacgtgagccacgaggaccccgaggtgaaattcaactggtacgtggacggcgtggaggtgcacaacgccaagaccaagccgagggaggagcagtacaattccacctacagggtggtgagcgtgctcaccgtgctgcatcaggactggctgaatgggaaggaatacaaatgcaaagtgagcaacaaggctctgcccgcccccattgagaaaacaatcagcaaagccaaaggccagcccagggagccccaggtgtacaccctgccgccgagccgggaggagatgaccaagaaccaggtgagcctgacctgcctggtgaagggcttttatccctctgacatagccgtggagtgggagagcaacgggcagcccgagaacaactacaagacgaccccgcctgtgctggactccgacgggtccttttttctgtatagcaagctcacggtggacaagtccaggtggcagcagggcaacgtgttcagctgcagcgtgatgcacgaggccctgcataaccactatacccagaaaagcctgagcctgagccccggcaag

SEQ ID NO: 406 - DNA, 1425 bp, synthetic construct
  misc_feature 1..1425: note = Treme_HC_IgG1-CO19
  source 1..1425: mol_type = other DNA
atggagacgcccgcccaattactctttctcctcctcctttggctccccgataccaccgggcaggtacaactcgtagagtccggcggcggcgtcgttcagcccggccggtcccttcggctcagctgcgcggcctccggctttacgttcagcagctacggcatgcattgggtacggcaggcccccggcaagggcctcgagtgggtcgccgtcatctggtacgacggcagcaataagtactacgccgattccgtcaagggaagatttaccatcagccgggacaactccaagaacaccctctacctccagatgaactccctgcgggccgaggacaccgccgtgtactactgcgccagggacccccggggcgccaccctgtactactactactacgggatggacgtgtggggccagggcaccaccgtgaccgtcagcagcgcgagcacgaaagggcccagcgtgttcccgctggccccgtccagcaagtccaccagcggcggcaccgccgccctgggttgcctcgtgaaggactacttccctgagccggtgaccgtgtcctggaactccggcgccctgaccagcggagtgcacaccttccccgcggtgctgcagagcagcgggctgtacagcctaagctccgtagtgacggtcccctccagcagtctggggacccagacctacatatgcaacgtgaaccacaaaccctcgaacaccaaggtggataagagggtcgagcccaaatcctgcgacaaaacccatacgtgcccgccctgccccgcgcccgagctgctgggtgggccatcggtgttcctgttccccccgaagcccaaggacacactgatgatcagccggacccccgaagtgacctgcgtggtggtggacgtgagccacgaggacccggaggtgaagttcaattggtacgtggatggcgtggaggttcataatgccaagaccaagccgcgggaagaacagtataactccacctaccgggtggtgagcgtgctcaccgtcctgcaccaggactggctgaatgggaaggagtacaagtgcaaagtgtccaataaagcccttcccgcccccatcgagaagacgatcagcaaggccaaaggacagccccgggagcctcaggtgtacacgctgccccccagcagggaggagatgaccaagaaccaggtgagcctgacctgtctggtgaagggcttctacccaagcgatatcgcggtggagtgggagtccaacggccagcccgagaacaattacaagaccaccccgcccgtgctggattccgacgggagcttcttcctgtacagcaagctgaccgtggacaagtcccggtggcagcagggaaatgtgttcagctgtagcgtgatgcacgaagccctgcacaaccattacacccagaaaagcctgagcctgagccccggcaag

SEQ ID NO: 407 - DNA, 1425 bp, synthetic construct
  misc_feature 1..1425: note = Treme_HC_IgG1-CO20
  source 1..1425: mol_type = other DNA
atggagacgcccgcccagctcctcttcctcctcctcctctggctcccggacacaaccgggcaggtacagctcgtcgagtccggcgggggtgtcgtccagcccgggcgttcccttaggctcagctgtgcggcctccgggttcaccttcagcagctacggcatgcactgggtaaggcaggcccccggtaaggggctcgagtgggtcgcggtcatctggtacgacgggtccaacaagtactacgccgactccgtgaaggggaggttcaccatctcccgagacaacagcaagaataccctctacctgcaaatgaattccctgcgggccgaggataccgccgtctactattgcgccagggacccccgaggcgccacgctgtactactactactacgggatggacgtgtgggggcagggcaccaccgtgaccgtgagctccgccagcaccaagggaccctccgtgttcccgctcgcgcccagctccaaaagcaccagcggcggtacagccgcgctgggatgcctcgtgaaggactacttccccgagcccgtcaccgtgagctggaatagcggagccctgacgagcggcgtgcacaccttccccgccgtcctgcagagcagcggcctgtactcgctctcctcggtggtgaccgtgcccagcagcagcctgggcacccagacctatatctgcaatgtgaaccacaagcccagcaacaccaaggttgacaagcgggtggagcctaagtcctgcgacaaaacccacacctgcccgccctgccccgcccccgagctgctcggcgggcccagcgtgttcctgttcccgcccaagcccaaggacaccctgatgatcagccgcaccccggaggtcacctgtgtggtggtggacgtgagccatgaggaccccgaggtgaagttcaactggtatgtggacggggtggaggtgcacaacgccaagaccaaaccgagggaggagcagtacaactccacctacagggtggtgtccgtcctgaccgtgctgcaccaggattggctcaacgggaaggagtacaaatgcaaggtgagcaacaaggccctgcccgcccccatcgagaagaccatcagcaaggccaagggacagcccagggagccccaggtgtataccctccctcccagccgtgaggaaatgaccaagaaccaggtgagcctgacctgtctggtcaaagggttctaccccagcgacatcgccgtcgagtgggaaagcaacggccagcccgagaacaactacaagaccacgccccccgtgctggacagcgatggcagctttttcctgtacagcaagctgacggtggacaagtcgaggtggcaacagggcaacgtgttctcgtgcagcgtgatgcacgaggccctgcacaaccactatacccagaaaagcctcagcctgtcccccggcaag

SEQ ID NO: 408 - DNA, 1425 bp, synthetic construct
  misc_feature 1..1425: note = Treme_HC_IgG1-CO21
  source 1..1425: mol_type = other DNA
atggaaacccccgcccaactcctcttcctcttgctcctctggctccccgatacgaccgggcaggtccagctcgtcgaaagcgggggaggcgtggtacagcccgggcgtagcctcaggctcagctgcgccgcctccgggttcaccttttcatcttacggcatgcactgggttcggcaggcccccggcaagggcctcgagtgggtcgccgtgatctggtacgacggctcgaacaagtactacgcggactccgtcaagggcaggttcaccatcagccgggataactccaaaaacaccttatacctgcagatgaactccctccgggccgaggacaccgccgtgtactattgcgcgcgcgatcccaggggcgcgaccctgtactactactactatggcatggacgtgtgggggcaaggtaccaccgtcaccgtcagcagcgccagcaccaaaggcccctcggtgttccccctggcgcccagcagcaaaagcaccagcgggggcaccgcggccctgggctgcctggtcaaagactacttccccgagcccgtgaccgtgtcctggaacagcggggccctgaccagcggcgtgcacaccttcccggccgtgctgcagagcagcgggctgtacagcctgagctccgtggtgacggtgccctccagcagcctggggacacagacgtacatatgtaacgtgaaccataagcccagcaacaccaaagtggacaaacgcgtggaacccaaaagctgcgacaagacccacacttgtcccccctgccccgcccccgagctcctgggcgggcccagcgtgttcttgttccccccgaaaccgaaggacaccctgatgatttcccggacccccgaagtgacctgcgtagtcgtggacgtgagccacgaggaccccgaggtgaagttcaattggtacgtggacggcgtggaggtccacaacgccaagaccaagccccgggaggagcagtacaactccacctatagggtcgtgagcgtgctgaccgtgctgcaccaggactggctgaacggcaaggagtataagtgcaaggtgtccaataaggccctccccgcccccatcgagaagaccatatccaaggccaagggccagccaagggagccgcaggtgtacaccctgccgccctcgagggaggagatgaccaaaaatcaggtgagcctgacctgcctggtcaaggggttctacccgagcgacatcgccgtggagtgggagagcaacgggcagcccgagaacaactacaagaccacccctcccgtcctggactccgacggcagcttcttcctgtattccaagctgaccgtggataagtccaggtggcagcagggcaacgtgttcagctgtagcgtgatgcatgaggccctgcataaccattacacccagaaatccctgagcctgagcccgggcaaa

SEQ ID NO: 409 - DNA, 1425 bp, synthetic construct
  misc_feature 1..1425: note = Treme_HC_IgG1-CO22
  source 1..1425: mol_type = other DNA
atggagacgcccgcccagctcctcttcctcctcctcttatggctccccgacaccaccggccaggtccagctcgtcgagagcgggggcggggtagtccagcccggcaggtccctccggcttagctgtgccgcctcggggttcacattcagctcctacggcatgcactgggtacgacaggcaccggggaagggactcgagtgggtcgccgttatctggtacgacggcagcaacaagtactacgccgacagcgtcaaaggcaggttcaccatcagcagggacaacagcaagaacaccctatacctgcagatgaatagcctgcgagccgaggacactgccgtgtattattgcgccagggatccccggggagccacgctctattattactactacgggatggacgtgtggggccaggggaccaccgtgacggtgtcatctgcctccacgaagggtccgagcgtgttcccgctggcccccagctccaagagcacgagcggcggcaccgccgccctgggctgcctggtgaaggattacttccccgagcccgtgaccgtgtcctggaatagcggcgccctgaccagcggcgtgcataccttccccgccgtcctgcagagcagcggcctgtacagcctgtcttccgtggtcaccgtgcccagcagcagcctcggcacgcagacctatatctgcaacgtgaaccacaaaccgagcaacacgaaggtggacaagcgtgtggagcccaaaagctgcgataagacccacacgtgtcccccctgccccgcccccgagctgctgggcgggcccagcgtgttcctgttccccccgaagcccaaggacaccctgatgatctcccgaacccccgaggtgacctgtgtagtcgtcgatgtgagccacgaggacccggaggtgaaatttaactggtacgtggacggggtggaggtgcacaacgcgaagacgaagccccgagaggagcagtacaacagcacctacagggtggtgagcgtcctgaccgtgctgcaccaggactggctgaacgggaaagagtacaagtgtaaagtcagcaacaaggccctgcccgcccccatcgagaagaccatctccaaggccaagggccagccccgcgagccccaagtgtacaccctgccccccagcagggaggagatgaccaagaaccaggtgagcctgacgtgcctggtcaagggcttttacccctccgacatcgcggtcgagtgggagagcaatggccagcccgagaacaactacaagaccaccccgcccgtgctggactccgacggcagcttcttcctgtacagcaagctgaccgtggacaagtcgcggtggcaacaaggcaacgtgttctcctgctcggtgatgcacgaggccctgcacaaccactacacccagaaaagcctgagcctcagccccggtaag

SEQ ID NO: 410 - DNA, 1425 bp, synthetic construct
  misc_feature 1..1425: note = Treme_HC_IgG1-CO23
  source 1..1425: mol_type = other DNA
atggagacacccgcgcagttgctattcctcctactcctctggctccccgataccacgggccaggtccaattggtagagtccggcggcggcgtagtccagcccggccggtccctcaggctttcctgcgccgcctcgggcttcaccttctccagctacgggatgcactgggtccggcaggcccccgggaagggcttggagtgggtcgccgtcatctggtacgacggaagcaacaagtactacgccgactccgtcaagggtaggttcaccatcagcagggacaactcgaagaacaccttgtatctgcagatgaactcccttagggccgaggacacggccgtgtactactgcgcccgggaccctcgaggagccaccctgtactactattactacgggatggacgtgtgggggcaagggacgaccgttaccgtgagctccgccagcacgaaggggcccagcgtcttcccactggcccctagcagcaagagcacctccggcggcaccgccgccctgggctgcctggtgaaggattacttcccggagcccgtgaccgtgagctggaactccggcgcgctcaccagcggcgtccacaccttccccgccgtgctgcagagcagcgggctgtattcgctgagctcggtggtcaccgttcccagctcaagcctggggacccagacgtatatctgtaacgtgaaccacaagcccagcaacaccaaggtggacaaaagggtcgagcccaagagctgcgacaagacccatacatgtcccccctgccccgcgcccgagctgctggggggacccagcgtgttcctctttccgcccaagcccaaagacaccctcatgatcagccgaacccccgaggtcacctgcgtggtagtagacgtgagtcacgaggacccggaggtgaagttcaattggtacgtggacggcgtggaggtgcacaacgccaagaccaaaccccgtgaggagcagtacaatagcacctacagggtcgtgagcgtgctcaccgtgctccaccaggactggctgaacggcaaggagtacaaatgcaaggtgtcgaacaaggcgctccccgcccccatcgaaaagactatctccaaggctaagggccagcccagagagccccaggtgtacaccctgcccccgtcccgggaggaaatgaccaagaaccaggtcagcctcacctgcctggtgaagggcttttaccccagcgacatcgcagtggagtgggagagcaacggtcagcccgaaaataactataagaccaccccgcccgtcctggacagcgacggaagcttcttcctgtacagcaagctcaccgtggacaagtcccggtggcagcagggcaacgtatttagctgctccgtgatgcacgaagccctgcacaaccactacacccagaaaagcctgtccctcagccccggcaag

SEQ ID NO: 411 - DNA, 1425 bp, synthetic construct
  misc_feature 1..1425: note = Treme_HC_IgG1-CO24
  source 1..1425: mol_type = other DNA
atggagacgcccgcccagctcctcttcctcctcctcctatggctacccgacacaaccgggcaggtccagctcgtcgaatccggcggcggggtagtccagccaggtcgctccctcaggttgtcctgcgccgcctccggctttacgttcagcagctacggcatgcactgggtccgacaggcccccggcaaggggctcgagtgggtcgccgtaatctggtacgacggcagcaacaagtactacgccgacagcgtcaagggaaggttcaccatcagcagggacaatagcaagaacaccctatacctccagatgaacagcctgagggcggaggacaccgccgtgtactactgcgcccgggaccccaggggagccaccctgtattattactactatgggatggacgtgtggggccaaggcaccaccgtgaccgtgtcctccgcgagcaccaaggggcccagcgtgttccccctcgcgccctccagcaagagcaccagcggggggaccgccgccctggggtgcctggtgaaggactacttccccgagcccgtgaccgtctcctggaacagcggcgccctgacgtccggcgtgcacaccttccccgccgtcctgcagagcagcggcctgtactccctgtcatcggtcgtgaccgtgccgtcctcctccctcggcacccagacctacatctgtaacgtgaaccacaagccctccaacacaaaggtggacaaacgggtagagccgaagtcctgtgacaagacccacacctgccctccctgccccgctcccgagctgctcggcgggcccagcgtcttcctcttccctcccaagcccaaggacacgctaatgatctcccgcacccccgaggtgacctgcgtggtggtggacgtgagccacgaggacccggaggtgaagttcaactggtacgtggacggcgtggaggtgcacaacgccaagaccaaacccagggaggagcagtataatagcacctatagggtggtgtccgtgctaacggtgctgcaccaggactggctcaacgggaaggagtacaagtgcaaggtcagcaacaaggcgctgccggccccgatcgagaagaccatctcgaaggccaaggggcagcctagggagccccaggtctacacgctgccccccagcagggaggaaatgaccaagaaccaggtgtccctgacgtgcctggtgaagggtttctaccccagcgacatcgccgtggagtgggagagcaacggccagcccgagaacaactataagaccaccccgcccgtgctggacagcgacgggagcttcttcctctatagcaagctgaccgtggacaagagccgctggcagcagggcaacgtgttctcctgctccgtgatgcacgaggccctgcacaaccactacacgcagaaatccctgtccctgagcccgggcaag

SEQ ID NO: 412 - DNA, 1425 bp, synthetic construct
  misc_feature 1..1425: note = Treme_HC_IgG1-CO25
  source 1..1425: mol_type = other DNA
atggagacacccgcccagctccttttcctcctcctcctctggctccccgacaccaccgggcaggtacaactcgtcgagtccggcggcggggtcgtacagcccggccggtccctccggctctcctgcgccgccagcggcttcaccttctcaagctacgggatgcattgggtcagacaggcccccggtaaggggctcgagtgggttgcggtcatctggtacgacggcagcaacaagtactacgccgacagcgtcaaaggccggttcacgatcagccgcgacaacagcaagaacaccctctacctgcaaatgaattcccttagggccgaggatacggccgtctattactgcgcccgcgacccgaggggcgccaccctgtattattactactacggcatggacgtgtggggccagggcaccacggtgaccgtctccagcgcctccaccaagggtccctcggtgttccccctggcgcccagctcgaagtccaccagcggcgggaccgcggccctgggatgtctggtcaaggactacttcccagagcccgtgaccgtgtcctggaactcaggggccctgacttccggggtgcacaccttcccggccgtgctgcaaagctcggggctgtacagcctgagctccgtggtgaccgtccccagcagcagcctgggcacccagacctacatctgcaacgtgaaccacaagcccagcaataccaaggtggacaagagggtggagcccaagtcctgcgataagacgcatacctgcccgccctgtcctgcccccgaactgctgggagggcccagcgtgttcctcttcccacccaagcccaaggacaccctgatgatctcccgcacgcccgaggtgacctgcgtggtggtggacgtgagccacgaagaccccgaggtgaagttcaactggtacgtcgatggtgtggaggtacacaatgcaaagacgaagcccagggaggagcagtacaatagcacctacagggtggtgagcgtgctgacggtcctgcatcaggactggctgaacggcaaggagtacaagtgcaaggtcagcaacaaggccctgccggcccccatcgagaagaccatcagcaaggccaagggccagccgagggagccccaggtgtacaccctgcccccctccagggaagagatgaccaagaaccaggtgtccctgacctgcctggtgaaggggttctacccctcagacatagctgtggagtgggagtctaatgggcagcccgagaacaattacaagaccaccccgcccgtgctggactccgacggcagcttcttcctctactccaaactgacggtggataagagccgatggcagcagggcaacgtgttttcctgctccgtgatgcacgaggccctgcacaaccactacacccagaagtccctcagcctgtcccccggcaag

SEQ ID NO: 413 - protein, 235 aa, synthetic construct; identical to SEQ ID NO: 267
  REGION 1..235: note = IPI_LC (ipilimumab light chain)

SEQ ID NO: 414 - protein, 20 aa, synthetic construct
  REGION 1..20: note = IPI_LC (signal peptide)
METPAQLLFLLLLWLPDTTG

SEQ ID NO: 415 - protein, 108 aa, synthetic construct; identical to SEQ ID NO: 185
  REGION 1..108: note = IPI_LC (variable region, VL)

SEQ ID NO: 416 - protein, 107 aa, synthetic construct [sequence omitted]

SEQ ID NO: 417 - DNA, 705 bp, synthetic construct
  misc_feature 1..705: note = IPI_LC-CO01
  source 1..705: mol_type = other DNA
atggagactcccgcccagctcctcttcctactcctcctctggctccccgacacgaccggcgagatcgtcctcacccagtcccccggcaccctcagcctcagccccggcgagagggccaccctctcgtgcagggccagccaatccgtaggcagcagctacctagcctggtaccagcagaagccgggccaagccccaaggctcctcatctacggggcctttagcagggccaccgggatccccgacaggttcagcgggagcgggagcgggacggacttcaccctcaccatctcccgcctcgagcccgaggacttcgctgtctactactgccagcaatacggcagctccccctggacattcggccaggggaccaaggtggagatcaagaggaccgtggcggccccctccgtgttcatcttcccgccctcagacgagcagctgaaaagcggcaccgcctccgtggtgtgcctcctcaacaacttttacccccgcgaggccaaggtgcagtggaaggtggacaacgccctgcagagcggtaactcgcaggagagcgtgaccgagcaggacagtaaggacagcacctacagcctgtccagcaccctcaccctcagcaaggccgactacgagaagcacaaggtgtacgcctgcgaggtgacccaccaggggctgagcagccccgtgaccaagagcttcaacaggggggagtgt

SEQ ID NO: 418 - DNA, 705 bp, synthetic construct
  misc_feature 1..705: note = IPI_LC-CO02
  source 1..705: mol_type = other DNA
atggaaacccccgctcagctcctcttcttactcctcctctggttgcccgacaccacgggcgagatcgttctcacccagtcccccgggacccttagcctcagcccgggggagagggccaccctcagctgccgggccagccagagcgttggcagcagctacctcgcctggtaccagcagaagcccggccaggccccgaggctcctcatatacggggccttctccagggcgaccgggatccccgacaggttcagcggctcgggctccgggaccgacttcaccctcaccatctcgagactcgagccggaggacttcgccgtgtactattgccagcagtatggctcctccccctggacctttggacagggcaccaaggtggagatcaagaggaccgtggccgcacccagcgtgttcatctttccaccgagcgacgagcagctgaagtccggcaccgccagcgtggtgtgcctactcaacaacttctaccccagggaagccaaggtgcagtggaaagtggacaacgccctgcagagcgggaactcccaggagtccgtgaccgaacaggactccaaggacagcacgtacagcctcagcagcaccctcaccctgagcaaggccgactacgaaaaacacaaggtctacgcctgcgaggtgacccaccaggggctgtcctcccccgtcaccaaaagctttaacaggggcgagtgc

SEQ ID NO: 419 - DNA, 705 bp, synthetic construct
  misc_feature 1..705: note = IPI_LC-CO03
  source 1..705: mol_type = other DNA
atggagacgcccgcccagctcctcttcctcctcctcctctggctccccgacaccaccggagagatagtcctcacgcaaagccccggcactctctccttgagccccggcgagagggccaccctctcctgccgggccagccagagcgtcggtagcagctatttggcctggtaccaacagaagcccggccaggcgccccgcctcttgatctacggggccttcagccgggcgacgggcatcccggacaggttttccgggagcggcagcggcaccgacttcaccctcacaatcagccgactagaaccagaggattttgccgtctattattgccagcagtacggctcgagcccctggaccttcggacagggcacgaaggtggaaatcaagcgtaccgtcgccgccccctccgtgttcatcttcccgcccagcgacgagcaactcaagagcggcacggccagcgtggtgtgcctgcttaacaacttctatccgcgggaagccaaggtgcagtggaaagttgataacgccctgcaatccggcaatagccaggagagcgtcaccgagcaggactccaaggacagcacgtatagcctgagctcgaccctgaccctgagcaaggctgactacgagaagcacaaggtgtacgcctgtgaggtgacgcatcaggggctgagctcgcccgtgacgaagtccttcaacaggggcgagtgc

SEQ ID NO: 420 - DNA, 705 bp, synthetic construct
  misc_feature 1..705: note = IPI_LC-CO04
  source 1..705: mol_type = other DNA
atggagactccggcccaactcctcttcctactcctcctctggcttcccgacaccaccggcgagatagtcctcacccagagccccggcacactcagcctctcccccggcgagagggccaccctctcttgtcgggcctcccagagcgtcggctcgagctacctcgcctggtaccagcaaaagccgggccaggcgccgaggctactcatctacggcgccttcagccgcgccaccggcatccccgaccggtttagcggcagcggcagcggcaccgacttcaccctcaccataagcaggctcgagccggaggacttcgccgtgtactactgccagcagtacggcagcagcccctggaccttcggccagggcaccaaggtggagatcaagcgcaccgtggccgcccccagcgtgttcatcttcccacccagcgatgagcagctcaagagcgggaccgccagcgtcgtgtgtctgctcaacaacttctatccccgggaagccaaggtgcagtggaaggtggacaacgccctgcagtccgggaatagccaggagtccgtgaccgagcaggatagcaaggactccacgtacagcctctcgagcaccctgaccctctcgaaggccgattacgaaaagcataaggtctacgcctgtgaggtgacccaccaggggctctccagccccgtgacgaaaagcttcaataggggggagtgc

SEQ ID NO: 421 - DNA, 705 bp, synthetic construct
  misc_feature 1..705: note = IPI_LC-CO05
  source 1..705: mol_type = other DNA
atggaaaccccggcccagctcctcttcctcctcctcctctggttgcccgacaccaccggagagatcgttctcacgcagagccccgggaccctatcgctctcgcccggggagagggccaccttgtcctgccgggccagccaaagcgtcggctccagctacctcgcctggtatcagcagaagcccggccaggccccgaggttgcttatctacggggccttcagccgggccacaggcatacccgaccggttcagcgggtccggcagcggcaccgacttcaccctcaccatatcgaggctcgagcccgaggacttcgccgtgtattactgccagcagtacggcagctcgccctggaccttcggccagggcactaaagtggagatcaagaggacggtggccgccccctccgtgttcatcttcccgcccagcgatgagcagctgaaaagcggcaccgctagcgtggtgtgcctcctcaacaacttctaccccagggaggcaaaggtgcaatggaaggtggataacgccctgcaatccggcaacagccaggagtccgtgaccgaacaggatagcaaggattcgacgtacagtctgagcagcaccctgaccctgtccaaggccgactacgagaagcacaaggtgtacgcctgcgaggtgacccaccagggcctgtcgtcgcccgtgaccaagagcttcaaccggggcgagtgc

SEQ ID NO: 422 - DNA, 705 bp, synthetic construct
  misc_feature 1..705: note = IPI_LC-CO06
  source 1..705: mol_type = other DNA
atggagacgcccgcccagctcctcttcctcctcctcctctggttgcccgacaccaccggcgagatcgtcctcacccaatcccccgggaccctctccctctccccaggcgagagggccacgctttcctgcagggcctcgcagagcgtcggcagctcctacctcgcctggtatcagcagaagcccggccaggccccgcggctattgatctacggggcctttagccgggccaccggcatccccgacaggttcagcggctccgggagcggcaccgacttcacgctcacgatcagcaggctcgagccggaggatttcgccgtgtactactgccagcagtacgggagcagcccgtggaccttcgggcaaggcacgaaggtcgagataaagaggaccgtggccgcccccagcgtgttcatcttcccgcccagcgacgagcagctgaaaagcggcactgccagcgtggtgtgtctgctgaacaacttctacccccgggaggccaaggtccagtggaaggtggataacgccctgcagtccggcaacagccaggagagcgtgaccgagcaggactccaaggactccacctacagcctgtccagcaccctcaccctcagcaaggccgactatgagaagcataaggtctacgcctgcgaggtgacccaccagggcctgagcagcccagtgaccaagtcctttaaccgcggggagtgc

SEQ ID NO: 423 - DNA, 705 bp, synthetic construct
  misc_feature 1..705: note = IPI_LC-CO07
  source 1..705: mol_type = other DNA
atggagactcccgcccagctcctcttcttgctactcctctggctcccggacaccaccggcgagatcgttctaacgcaaagccccggcaccctcagccttagcccgggcgagagggccaccctctcctgtagggccagccagtccgtagggagctcctacctcgcctggtaccaacagaagcccggccaggcccccaggttgcttatttacggggccttcagccgcgccaccggcatacccgataggttcagcggtagcggcagcgggaccgatttcacgctcaccatcagcaggctcgagcccgaggactttgccgtgtattactgtcaacagtacggcagcagcccctggacgttcggccagggcaccaaggtggagatcaagcggaccgtggccgcccccagcgtgttcatctttcccccctctgacgagcagctgaaaagcggcacggccagcgtggtgtgcctgctgaacaatttctaccccagggaggccaaggtccagtggaaagtcgataacgccctgcagtccggcaacagccaggagagcgtcaccgagcaggatagcaaggacagcacctacagcctcagcagcaccctgaccctgagcaaggccgactacgagaagcacaaggtatacgcctgcgaggtgacgcaccaggggctcagcagccccgtgaccaagagcttcaaccggggcgagtgc

SEQ ID NO: 424 - DNA, 705 bp, synthetic construct
  misc_feature 1..705: note = IPI_LC-CO08
  source 1..705: mol_type = other DNA
atggagacacccgcccagcttttattccttctcctcctatggctccccgacaccaccggggagatcgtactcacccagtccccgggcaccctcagcctcagccccggcgagagggccacactctcctgtcgggcctctcagagcgtcggaagctcctacctggcctggtaccagcaaaagcccggccaggcgccccgacttctcatctacggggctttctccagggccacgggcatccccgacaggttttccggcagcggcagcggcaccgacttcacgctcaccatctcgaggctagagcccgaggatttcgccgtgtactactgccagcagtacggcagcagcccgtggaccttcgggcagggcaccaaggtggagatcaagcgcaccgtggcggccccgagcgtcttcatcttcccacccagcgacgagcagctgaaaagcgggaccgccagcgtggtgtgtctgctcaacaatttttacccccgggaggccaaggtgcagtggaaggtggacaacgccctgcagagcgggaactcgcaggagtcggtcaccgagcaggacagcaaggactccacgtattccctgtcctcgaccctgaccctgtcaaaggccgactatgagaagcacaaggtctacgcctgcgaggtgactcaccaggggctgagcagccccgttaccaaatcctttaacaggggggagtgc

SEQ ID NO: 425 - DNA, 705 bp, synthetic construct
  misc_feature 1..705: note = IPI_LC-CO09
  source 1..705: mol_type = other DNA
atggaaacccccgcccagctactcttcctcctcctcctctggcttccggatacaaccggcgagatcgtcctcacccagtcccccgggaccctcagcctctcccccggggaaagggcgaccctcagctgtcgggccagccaaagcgtcgggagcagctacctcgcctggtaccagcagaagcccggacaggccccccgcctcctcatttacggggcgttcagccgggccaccggcatccccgaccgcttctccgggagcggcagcggaacggacttcacgctcacgatcagcaggctcgagccggaggactttgccgtctattactgtcagcaatacggtagctccccctggaccttcggccaggggaccaaggtggaaatcaagcggaccgtggccgccccgagcgtgttcatcttcccgcccagcgacgagcagctgaaaagcggtaccgcctccgtggtgtgcctgctgaacaacttctacccaagggaggccaaggtgcagtggaaggtggacaacgccctccagagcgggaactctcaggagagcgtcaccgagcaggattcgaaggacagcacctacagcctgtcctcgaccctgaccctgtcgaaggccgactacgagaagcataaagtctatgcctgcgaagtgacccaccagggcctcagcagccccgtgacgaagtccttcaacaggggggagtgc

SEQ ID NO: 426 - DNA, 705 bp, synthetic construct
  misc_feature 1..705: note = IPI_LC-CO10
  source 1..705: mol_type = other DNA
atggagactcccgcccagctcctcttcctcctcctcttgtggctcccggacaccaccggcgaaatagtcctcacccagagccccggcaccctcagcctctccccaggggaacgggccacgctaagctgcagggcctcccagtccgtcgggagcagctatctcgcgtggtaccagcagaagccggggcaggccccccggctcctcatatacggggccttcagtagggccacgggcatacccgacaggttcagcgggtccggctcgggcacggacttcaccctgaccattagccggttggagcccgaggacttcgccgtatattactgccagcagtacggctccagcccctggaccttcggccaggggaccaaggtggagataaagaggaccgtcgccgcccccagcgttttcatcttcccgccctccgacgagcagctgaagtccgggaccgcctccgtggtgtgcctgctcaacaacttctaccccagggaggccaaggtccagtggaaggtagacaacgccctccagtccgggaacagccaggagagcgtgacagaacaggacagcaaggactccacctattccctgtctagcaccctgaccctgagcaaggccgattacgagaagcacaaggtgtacgcctgcgaagtgacccaccagggcctcagctcccccgtgaccaagagcttcaaccggggcgagtgc

SEQ ID NO: 427 - DNA, 705 bp, synthetic construct
  misc_feature 1..705: note = IPI_LC-CO11
  source 1..705: mol_type = other DNA
atggagactcccgcccagctcctcttcctcctcctcctctggctacccgacaccaccggcgagatcgtcctcacgcagtcccccggcaccctcagcttgagccccggggagcgggccaccctctcttgcagggccagccagagcgtcggctcctcctacctcgcctggtatcagcagaaaccaggccaggccccccgtctccttatctacggcgccttcagccgcgctaccggaatccccgaccggttcagcggcagcggttccggcacagatttcacgctcaccatttccaggctcgagcccgaggacttcgccgtgtactactgccagcagtacggcagctcgccctggaccttcggacaggggaccaaggtggaaatcaagaggaccgtggcggccccctccgtgtttatcttcccgccctcggacgagcagctaaagagcggcaccgcctccgtggtgtgcctgctcaacaacttctatccccgggaggccaaggtgcagtggaaggtggacaacgccctccagagcggaaactcgcaggagagcgtcaccgagcaggactccaaggactcgacttacagcctgagctccaccctgaccctcagcaaggccgattacgagaagcacaaggtctacgcctgcgaggtgacccaccagggactgagctcccccgtgaccaagagcttcaaccggggggagtgc

SEQ ID NO: 428 - DNA, 705 bp, synthetic construct
  misc_feature 1..705: note = IPI_LC-CO12
  source 1..705: mol_type = other DNA
atggagacgcccgcccagctactcttcctcctcctcctctggctccccgacaccaccggggagatagtcttgacccagtcccccggcacgctttccctctcccccggggagagggcgaccctcagctgtagggccagccagagcgttggcagcagctacctcgcctggtatcagcagaagccgggccaggccccgaggctcctcatctacggagctttctccagggccaccggaatccccgaccggttctccggcagcggcagcgggaccgacttcaccttgaccatctccaggctcgagcccgaggacttcgccgtgtactactgtcagcagtacggctcatcgccctggaccttcgggcagggcaccaaggtggaaatcaagaggacggtggccgcccctagcgtgttcatctttccccccagcgacgagcagctgaaaagcggcaccgcctccgtggtctgcctgctcaataatttctacccgcgtgaggccaaggtgcaatggaaagtcgacaacgccctccagagcggcaacagccaggagagcgtgacagagcaggacagcaaggactccacctacagcctgtcctccactctgaccctgtcgaaggccgactacgaaaagcacaaagtctacgcctgcgaggtcacgcaccaggggctgagtagccccgtgaccaaatccttcaacaggggcgagtgc

SEQ ID NO: 429 - DNA, 705 bp, synthetic construct
  misc_feature 1..705: note = IPI_LC-CO13
  source 1..705: mol_type = other DNA
atggagactcccgcccagctcctctttctcctcctcctctggctacccgacaccaccggcgagatcgtcctcacccagagccccggcactctcagcctcagccccggggagcgggccaccttatcgtgcagggcctcccaatccgtgggaagcagctacctcgcgtggtaccagcagaagcccggccaggccccgcggcttctcatctacggagcctttagcagggccaccggcatcccggacaggttctcaggcagcggcagcggcaccgattttaccctcaccatcagccgactagaaccggaggacttcgccgtgtactactgccagcagtacggcagctcaccctggaccttcggccagggcacgaaggtggaaatcaagcgcaccgtggccgcgcccagcgtgttcatcttccctcccagtgacgaacagctgaagtccgggaccgcctcggtggtctgcctgctgaacaacttttatcccagggaggccaaagtgcagtggaaggtggataacgcgctgcaaagcggcaacagccaggagagcgtcaccgagcaggacagcaaggacagcacctactcgctgtcctcgaccctgacgctgagcaaggccgactacgagaagcacaaggtgtacgcctgtgaggtcacgcatcagggcctcagcagccccgtgaccaagagcttcaaccggggcgagtgc

SEQ ID NO: 430 - DNA, 705 bp, synthetic construct
  misc_feature 1..705: note = IPI_LC-CO14
  source 1..705: mol_type = other DNA
atggagacgcccgcacagctcctcttcctccttctcctctggctccccgacaccaccggcgagatcgtcttaacccagagccccggcaccctcagccttagccccggggagcgcgccaccctctcctgccgcgccagccaaagcgtcggctcgtcctatctcgcctggtatcaacagaagcccggtcaggcccccaggctcctcatctacggcgccttcagcagggccaccggcatcccggaccggttctccggctccggcagcggcaccgacttcaccttgacgatcagcaggctcgagccggaggacttcgccgtgtactactgccagcagtatggcagcagcccctggaccttcggccaggggaccaaggtcgagatcaagaggaccgtggcggcccccagcgtgttcatcttccctcccagcgatgagcagctcaagagcgggaccgccagcgtggtgtgcctgctgaacaatttttacccccgggaggccaaggtgcagtggaaagtagacaacgccctgcagtccgggaactcccaggagtcggtgactgagcaagacagcaaggacagcacctacagcctgtccagcacgctcaccttgtccaaggcggactatgagaagcacaaggtgtacgcctgtgaggtgacccatcagggcctctcctctcccgtgaccaagtccttcaataggggggagtgt

SEQ ID NO: 431 - DNA, 705 bp, synthetic construct
  misc_feature 1..705: note = IPI_LC-CO15
  source 1..705: mol_type = other DNA
atggagacgcccgcccagctactcttcctactactcctctggctccccgacaccaccggcgagatcgtactcacgcagtcgccggggaccctcagcctcagccccggcgagagggccaccctctcctgcagggcatcccagagcgtcggctccagctacctcgcctggtaccagcagaagcccggccaggcccccaggctcctcatctacggggcgttcagcagggccaccggcatacccgataggttctccggctccggctccgggaccgacttcaccctcacaatcagccgtctcgagcccgaggacttcgcggtgtactactgccagcagtatgggagctccccctggacgttcggccaggggacgaaggtcgagatcaagcggaccgtcgcggctcccagcgtgtttatcttcccgcccagcgacgagcaactgaaaagcggcaccgccagcgtggtgtgcctgctgaacaacttctacccccgcgaggccaaggtccagtggaaggtggataacgccctgcagagcgggaacagccaggagagcgtgaccgagcaagacagcaaagacagcacatactccctgagcagcaccctgacactgagcaaggccgactatgagaagcacaaggtgtacgcctgtgaggtgacgcaccagggcctgagctcccccgtgaccaagagcttcaacaggggcgagtgc

SEQ ID NO: 432 - DNA, 705 bp, synthetic construct
  misc_feature 1..705: note = IPI_LC-CO16
  source 1..705: mol_type = other DNA
atggagacgcccgcccagctcctctttcttctcctcttgtggctccccgacaccaccggggagatcgtactcacgcagtcgcccggcacactcagcctcagcccaggcgagagggccaccctctcctgcagggccagccagtccgtcggcagcagctacctcgcctggtatcaacagaaacccgggcaggccccccggctcctcatatacggggccttctccagggccaccgggatccccgatcgtttctccggcagcggatcgggcaccgacttcacgctcacgatctccaggctcgagccagaggacttcgccgtgtactactgccagcagtacggcagcagcccctggaccttcggtcagggcaccaaggtggagatcaagcgcacagtggccgccccctccgtgttcatctttccgcccagcgatgagcagctgaagtccgggacggccagcgtggtgtgcctgctcaacaacttctacccacgggaggccaaggtgcaatggaaggtggacaacgccctgcagagcggcaacagccaggaatccgtgacggagcaggactccaaagacagcacctattccctgagcagcaccctgacgctctccaaagccgactatgagaagcacaaggtgtacgcctgtgaagtcacccaccaggggctgtcgagcccggtgaccaagagcttcaaccggggcgaatgc

SEQ ID NO: 433 - DNA, 705 bp, synthetic construct
  misc_feature 1..705: note = IPI_LC-CO17
  source 1..705: mol_type = other DNA
atggagacacccgcccagctcctcttcctcttgctgctctggctacccgacaccaccggggagatcgtcctcacccaatcgcccggcacgctcagcctctcccccggcgagcgggccaccttgagctgccgggccagccagagcgtcggatcctcgtaccttgcctggtaccagcagaagcccggccaggccccccggttgctcatctacggggcgttcagcagggccaccggcatccccgacaggttcagcggcagcggctccgggaccgacttcaccctcaccatcagccgtctcgagcctgaggacttcgccgtgtactactgccagcagtacgggtcctccccctggaccttcggccagggcacgaaggtggagatcaagcggaccgtcgccgcccccagcgtgttcatattccccccgagcgatgaacagctgaagtccgggaccgctagcgtggtgtgcctgctgaataacttctacccccgcgaggccaaggtccagtggaaggtggacaacgccctgcagagcggcaacagccaggagagcgtgaccgaacaggatagcaaggacagcacctacagcctgagcagcacactgaccctgtccaaggcggactacgagaagcacaaggtgtacgcctgcgaggtgacccatcagggtctgtccagccccgtgaccaaaagcttcaatcgaggcgaatgc

SEQ ID NO: 434 - DNA, 705 bp, synthetic construct
  misc_feature 1..705: note = IPI_LC-CO18
  source 1..705: mol_type = other DNA
atggagacgccggcgcagcttctcttcctccttctactctggctcccagacaccacaggcgagatcgtcctcacccagagcccgggaaccctcagcctttccccaggagagcgggcgaccctcagctgcagggccagccagagcgtcggcagcagctacctcgcctggtaccaacagaagccgggccaggcgcccaggctcctcatctacggggccttttcccgggccaccggcatccccgatcgcttcagcggctcggggagcgggaccgacttcaccctcaccatcagcaggcttgaacccgaggacttcgcggtgtactattgccagcagtatgggagcagcccctggaccttcggccagggcaccaaagtcgagatcaagagaaccgtggccgccccctccgtgtttatcttcccgccctcggacgagcagctgaagagtggcaccgcgagcgtggtctgcctcctgaacaacttctacccgcgggaggccaaggtacagtggaaggtggacaatgcgctccaatccgggaactcccaggagagcgtgaccgagcaggacagcaaggatagcacctacagcctgagcagcaccctgaccctgagcaaggccgactacgagaagcacaaagtgtacgcgtgcgaggtgacccaccaggggctctccagccccgtgaccaagtcctttaacaggggggagtgc

SEQ ID NO: 435 - DNA, 705 bp, synthetic construct
  misc_feature 1..705: note = IPI_LC-CO19
  source 1..705: mol_type = other DNA
atggagacgcccgcccagctccttttcctcctcctcctctggttgcccgacaccaccggcgaaatcgtgctcacgcagagccccggcacgctcagcctcagccccggggagagggccacgcttagctgccgcgccagccagagcgtcggcagcagctacttagcctggtaccagcagaagcccgggcaggccccccgccttctaatctacggcgccttttcccgcgccaccggcatccccgacaggttcagcggcagcggctccggcaccgacttcaccttgacgatcagcaggctcgagcccgaggatttcgccgtgtactactgccagcaatacggcagcagcccctggaccttcggccaggggaccaaggtggagataaagaggaccgtggccgcccccagcgtgttcatcttcccgcccagcgacgaacagctgaaaagcggcacggcctcggtggtgtgcctcctgaacaacttctacccccgcgaggccaaggtgcagtggaaggtggacaatgccctgcagagcggcaattcgcaggagagcgtgaccgagcaggacagcaaggatagcacctacagcctgtcaagcacactgaccctctccaaagcggactacgagaagcacaaggtgtacgcctgcgaggtgacccaccagggcctcagctcgcccgtgaccaagagcttcaaccgcggcgagtgt

SEQ ID NO: 436 - DNA, 705 bp, synthetic construct
  misc_feature 1..705: note = IPI_LC-CO20
  source 1..705: mol_type = other DNA
atggagactcccgcccaactcctcttcctcctcctcttatggctcccggacaccacgggcgagatcgtccttacacagagccccgggaccctcagcctcagccccggcgagagggccacgctcagctgcagggcctcccagtccgtcgggtccagctacctggcctggtaccagcagaagcccggccaagcgccccggcttctcatctacggagctttcagccgggcgaccggcataccggaccggttcagcgggtccggctcgggcaccgacttcaccctcaccatcagcaggctcgagcccgaggacttcgccgtctactactgccagcagtacgggtcctccccctggaccttcgggcagggcaccaaggtggagatcaagaggaccgtcgccgcccccagcgtcttcatctttccccccagcgacgagcagctgaaaagcggcaccgccagcgtggtgtgcttactgaacaatttctatccgagggaggccaaggtgcagtggaaggtggacaacgccctgcagtccgggaacagccaggagtcagtaacggaacaggacagcaaggacagcacctacagcctgagcagcacgctgacgctgtcgaaggccgactacgagaagcacaaggtgtacgcctgcgaggtgacccaccagggcctgtccagccccgtgacgaagtccttcaatcgaggagagtgc

SEQ ID NO: 437 - DNA, 705 bp, synthetic construct
  misc_feature 1..705: note = IPI_LC-CO21
  source 1..705: mol_type = other DNA
atggagacgccggcccagctcctattcctcctcctcctctggctcccggatactaccggcgagatcgtcctcacccagagccccggcaccttgagcttgagccccggcgagagggccaccctcagctgcagggcaagccagagcgtcggcagcagctacctcgcctggtaccagcaaaagcccgggcaggcccctcgtctcctaatctacggggcctttagcagggccaccgggatcccagatcggttctcgggctccgggagcggcaccgacttcaccctcaccatcagccggctcgagcccgaggacttcgccgtgtactactgccagcagtatggcagcagcccctggaccttcgggcagggcacgaaggtagagatcaaacggaccgtggccgccccctccgtgttcatcttcccgcccagcgatgagcagctgaaaagcggcacggcctccgtggtgtgcctgcttaataacttttacccgagggaggcaaaggtacagtggaaggtggacaacgctctgcagtccggcaacagccaggagagcgtcaccgagcaggatagcaaggatagcacctactcactgtccagcacgctgaccctgagcaaggccgactacgagaaacacaaggtgtacgcgtgtgaagtgacccaccaggggctgagcagccctgtaaccaagagcttcaaccggggcgaatgc

SEQ ID NO: 438 - DNA, 705 bp, synthetic construct
  misc_feature 1..705: note = IPI_LC-CO22
  source 1..705: mol_type = other DNA
atggagactccggcccagctcctcttcctcctcctcctctggctccccgacaccacgggcgagatcgtccttacccagtcccccggaaccctcagcctcagcccgggggagagggcgaccctcagctgcagagccagccagagcgtaggtagcagctacctcgcctggtaccagcagaagcccgggcaggccccccgcctcttgatatacggggccttttcgcgggccacggggatacccgaccgcttctccggatccggcagcggcaccgacttcacgctcacgatctcgagactcgagccggaggacttcgcggtgtactactgccagcagtacggcagcagcccctggacctttggccaaggcaccaaggtggaaatcaagcggaccgtggcggcccccagcgtctttatcttccccccgagcgatgagcagctgaaaagcgggaccgccagcgtggtgtgcctgctgaataacttctatccccgggaggccaaagtgcagtggaaagtggacaacgcgctgcaatccgggaactcccaggagtctgtgaccgaacaggacagcaaggacagcacctatagcctgtcctccaccttaacgctcagcaaggccgactacgagaaacacaaggtctacgcctgcgaggtgacgcaccaaggcctgtccagccccgtgaccaagagctttaacaggggggagtgt

SEQ ID NO: 439 - DNA, 705 bp, synthetic construct
  misc_feature 1..705: note = IPI_LC-CO23
  source 1..705: mol_type = other DNA
atggagacaccggcccagctactattcctcctcctcctctggctccccgacaccaccggcgagatcgtcctcacccagagccccgggactttatccttgtcccccggcgagcgcgccacgctcagctgcagggccagccagagcgtcggttcgagctacctcgcctggtaccaacagaagcccggccaggcccccaggctcctaatctacggggccttttccagggccaccggcatcccggacaggttcagcggcagcggatccgggaccgactttaccctcacgatctcgcggcttgagcccgaggacttcgccgtgtactactgtcagcagtacggctcgagtccctggaccttcggccaggggaccaaggtggagatcaagaggaccgtggccgcccccagcgtcttcatcttcccgcccagcgacgagcaactgaaaagcgggaccgcgagcgtcgtctgcctgctgaacaacttctatccccgggaagccaaggtgcagtggaaggtggacaacgcgctgcaaagcgggaactctcaggagtccgtgaccgagcaggacagcaaggacagcacctactccctgagctcgacgctgaccctgagcaaggccgactacgagaaacataaggtgtacgcctgcgaggtgacccaccaagggctgagctcgccggtgaccaagagcttcaataggggcgagtgt

SEQ ID NO: 440 - DNA, 705 bp, synthetic construct
  misc_feature 1..705: note = IPI_LC-CO24
  source 1..705: mol_type = other DNA
atggaaacccccgcccagctcctctttctcctcctcctctggctccccgacaccaccggggagatcgtcctcacccagtcccccggcaccctcagcctcagcccgggcgagcgggccaccttatcctgcagggccagccagagcgtcggctccagctatctcgcctggtaccagcagaagccgggccaggccccgcgtctcctcatctacggggccttctcgagggccaccgggattcccgacaggttcagcggctcgggaagcgggaccgatttcaccctaaccatcagcaggttagagcccgaggacttcgcggtgtactactgccagcagtacggcagctccccctggaccttcggacagggcaccaaagtggagatcaaacgcaccgtggccgccccgtccgtgttcatcttcccgccctccgacgagcagctgaaatctggcaccgccagcgtggtgtgcctgctaaataacttctacccccgggaggccaaggtgcagtggaaggtggacaatgccctgcagagcgggaacagccaggagagcgtgacggagcaggacagcaaggacagcacctacagcctgtccagcaccctgaccctgtccaaagccgattacgagaagcacaaggtgtacgcctgcgaggtcacccaccaaggcctgagcagccccgtgaccaagagcttcaacaggggcgaatgc

SEQ ID NO: 441 - DNA, 705 bp, synthetic construct
  misc_feature 1..705: note = IPI_LC-CO25
  source 1..705: mol_type = other DNA
atggagactcccgcgcagctcctcttcctcctccttctctggcttccagacaccacgggcgagatcgtcctcacccagagcccgggcaccctcagcctctcccccggcgagagggcaaccctaagctgccgcgcgagccagagcgtaggcagctcctacctcgcctggtaccagcagaaaccggggcaagccccgcggctcctcatctacggggctttctccagagccaccggcatccccgaccgcttcagcggcagcggcagcgggacagactttaccctcaccatcagcaggctcgaacccgaggacttcgccgtgtactattgccagcagtacggctccagcccctggacctttggccagggcaccaaggtggagatcaagaggaccgtggccgcccccagcgtgttcatcttcccgcccagcgacgaacagctgaaaagcgggaccgccagcgtcgtgtgcctgctgaataacttctaccccagggaggccaaggtgcagtggaaggtggacaacgccctccaaagcggcaacagccaagagagcgtcaccgaacaggactccaaggactcgacctactccctgtccagcaccctgaccctcagcaaggcggactacgagaagcacaaggtgtacgcctgcgaggtcacccaccagggcctgagctcgcccgtgaccaagagcttcaacaggggtgagtgc

SEQ ID NO: 442 - protein, 468 aa, synthetic construct; identical to SEQ ID NO: 252
  REGION 1..468: note = IPI_HC (ipilimumab heavy chain)

SEQ ID NO: 443 - protein, 20 aa, synthetic construct
  REGION 1..20: note = IPI_HC (signal peptide)
METPAQLLFLLLLWLPDTTG

SEQ ID NO: 444 - protein, 118 aa, synthetic construct; identical to SEQ ID NO: 183
  REGION 1..118: note = IPI_HC (variable region, VH)

SEQ ID NO: 445 - protein, 330 aa, synthetic construct; identical to SEQ ID NO: 387
  REGION 1..330: note = IPI_HC (constant region)

SEQ ID NO: 446 - DNA, 1404 bp, synthetic construct
  misc_feature 1..1404: note = IPI_HC-CO01
  source 1..1404: mol_type = other DNA
atggagacgccggcccagcttctcttcctacttctcctctggctccccgacaccaccggccaggtccagctcgtcgagtccggcggcggggtagtccagcccgggcggtcacttaggctctcctgtgccgcaagcggcttcaccttcagctcctacaccatgcactgggtccggcaggcgcccgggaagggcctggagtgggtcacctttatcagctacgacgggaacaacaagtactacgcggatagcgtcaaggggcgcttcaccattagccgggacaacagcaagaacaccctctacctgcagatgaacagcctgagggccgaagacaccgcgatatactactgcgctaggaccgggtggctgggccccttcgactactgggggcagggcaccctggtgaccgtctccagcgcctccacgaagggcccctccgtgttccccctggccccctccagcaagagcacctccggcggcaccgccgccctggggtgtctcgtcaaggactattttcccgagcccgtgacggtcagctggaacagcggggcgctcaccagcggcgtgcataccttccccgccgtgctgcagagcagcggcctgtactccctgtccagcgtggtgaccgtcccctcgagcagcctgggcacgcagacctacatctgcaacgtcaaccacaagcccagcaacaccaaagtggataagcgggtggagcccaagagctgtgacaagacccacacctgccccccgtgtcccgcccccgaactgctcggcgggccgagcgtgttcctgttccctcccaagcccaaggacaccctgatgatatcccggacgcccgaggtcacctgcgtggtggtggacgtgagccacgaggatcctgaggtcaagtttaactggtacgtggacggcgtcgaggtgcacaatgccaagaccaagccacgcgaggagcaatacaacagcacctacagggtggtcagcgtgctgaccgtcctgcaccaggactggctgaacgggaaggaatacaagtgcaaggtgtccaacaaggccctgcccgccccgattgagaagaccatcagcaaggccaagggccagcccagggaaccccaggtgtataccctgccccccagccgcgaggagatgacgaagaaccaggtaagcctcacctgcctcgtgaaggggttctacccctccgatatcgccgtggagtgggagagcaacggccagcccgagaataactacaagactaccccgcccgtgctggactccgacgggtcctttttcctgtactccaagctgaccgtagacaagagccggtggcagcagggcaacgtcttcagctgcagcgtgatgcacgaggccctgcataaccactatacccagaaaagcctgagcctgagccccggcaag

SEQ ID NO: 447 - DNA, 1404 bp, synthetic construct
  misc_feature 1..1404: note = IPI_HC-CO02
  source 1..1404: mol_type = other DNA
atggagacacccgcccagctccttttcctcctcctcctctggctcccggacaccaccggccaggtccagctcgtcgagagcggcgggggagtggtccagccgggccggagccttcggttgtcctgcgccgccagcggcttcacgttctccagctacaccatgcactgggtccgacaggcccccggcaagggccttgagtgggtcaccttcatcagctacgacggcaataataagtactacgccgacagcgtcaaggggcggtttaccatcagccgggataacagcaaaaacaccctctacctgcagatgaacagcctgagggccgaggacaccgccatctactactgtgcccgaacggggtggctgggccccttcgattactggggccaggggacgctggtgactgtcagctccgcaagcaccaagggccccagcgtgttccccctggcccccagttcaaagtccaccagcggcggcaccgccgcgctggggtgcctggtgaaggactactttccggagcccgtgaccgtgagctggaacagcggcgccctgaccagcggggtccacaccttcccggccgtgctgcagagcagcggcctgtacagcctaagcagcgtggtcaccgtgccctccagctccctcggcacccagacctacatctgcaacgtcaaccacaagccctcaaacaccaaggtggacaagcgggtggagccaaagtcctgcgacaaaacccacacatgccctccctgccccgcccctgagctgctgggcggccccagcgtcttcctgttccctcccaagcccaaggacaccctgatgatcagccggacccccgaggtgacctgcgtggtggtggacgtgagccacgaggacccggaggtcaagttcaactggtacgtggacggcgtggaggtgcacaacgccaagaccaagcccagagaggagcagtacaacagcacctacagggtggtgtccgtcctgaccgtgctgcaccaggactggctgaacggcaaggagtacaaatgcaaggtgtcgaataaggccctccccgcccctatcgaaaagaccatctccaaggccaagggccagcccagggagccccaggtgtacaccctgccccccagcagggaggagatgaccaagaaccaggtgagcctgacctgcctggtgaagggcttctacccctccgacatcgccgtggaatgggaatccaacggccagcccgagaacaactacaagaccacaccccccgtcctggacagcgacggcagcttcttcctgtatagcaagctgaccgtcgacaagagcaggtggcagcaggggaacgtgttcagctgctccgtgatgcacgaggccctgcacaatcactacacccagaaaagcctgagcctcagcccgggcaag

SEQ ID NO: 448 - DNA, 1404 bp, synthetic construct
  misc_feature 1..1404: note = IPI_HC-CO03
  source 1..1404: mol_type = other DNA
atggagacgcccgcccagttgcttttcctcctcctcctctggcttccggacaccacgggccaggtccagttggtcgaaagcggcggcggcgtcgtccagcccgggcggtcccttcgactctcctgcgccgcctccggcttcaccttcagctcctatacgatgcattgggtacggcaggccccaggcaagggcctcgagtgggtcaccttcatctcatacgacggcaacaacaaatactacgccgacagcgtcaaggggcgcttcaccatctcgcgggacaacagcaaaaacaccctatacctgcagatgaactccctgcgggccgaggacaccgccatctattactgcgcccgtaccggatggctgggaccgttcgactactggggccaggggacgctggtgaccgtcagctccgccagcaccaaggggcccagcgtgttccccctggcccccagctccaagagcaccagcgggggcaccgcggccctcggttgcctggtgaaggattacttccccgagccggtgaccgtcagctggaactccggcgccctcaccagcggcgtgcacacctttcccgccgtgctgcagagcagcggcctgtacagcctgagcagcgtggtgacagtgcccagcagcagcctgggcacgcagacctacatttgtaacgtgaaccacaaacccagcaacactaaggtggacaagcgagtggagcccaaaagctgcgacaagacccacacctgcccgccctgcccggcgcccgagctgctggggggtcccagcgtgttcctgttccctcccaagcccaaggacaccctgatgatcagcaggacgccggaggtgacctgcgtggtggtggatgtcagccacgaggaccccgaggtcaagttcaactggtatgtggacggggtggaggtccataacgcgaagaccaagcccagggaggagcaatacaatagcacctacagggtggtcagcgtgctgaccgtgctgcaccaggactggctgaacggcaaagagtacaagtgcaaggtgtcgaacaaagccctgcccgcgcccatcgagaagaccatctccaaggccaaagggcagcccagggaaccccaagtgtacaccctcccgccctccagggaggaaatgaccaagaaccaggtcagcctgacctgtctggtgaaggggttctacccctccgacatagccgtggagtgggaatccaacgggcagcccgaaaacaactacaagaccaccccgcccgtgctggattccgatggcagcttcttcctctactcgaagctcaccgtcgacaagtcccggtggcagcagggcaatgtgttcagctgcagcgtgatgcacgaggccctgcacaaccactacacacagaaaagcctcagcctgtcccccggcaag

SEQ ID NO: 449 - DNA, 1404 bp, synthetic construct
  misc_feature 1..1404: note = IPI_HC-CO04
  source 1..1404: mol_type = other DNA
atggagactcccgcccagctcctattcctcctcctcctctggctccccgacaccaccgggcaggtccagctcgtagagagcggaggcggggtcgttcagcccggccggagcctccggctcagctgcgccgcctccgggtttaccttctcctcctacaccatgcattgggtccggcaggcccccggcaagggcctagagtgggtcacattcatcagctacgacggcaacaacaagtattacgcggatagcgtaaaggggaggttcaccatcagcagggataatagcaagaacaccctctacctgcagatgaatagtctgcgagccgaggacacggccatctactactgcgccaggactggctggctgggcccgttcgactactggggccagggcaccctcgtgaccgtgtccagcgccagcacgaagggtccctccgtgttccccctggccccctccagcaagtcgaccagcgggggcaccgccgccctggggtgcctggtgaaggactacttccccgagcccgtgaccgtgagctggaacagtggcgcgctgaccagcggcgtgcacaccttccccgccgtgctgcagagcagcggcctgtactccctgtccagtgtggtgaccgtgcccagcagcagcctgggcacccagacctatatctgcaacgtgaaccacaagccctccaacaccaaggtggataagagggtggagcccaagtcctgcgataagacccatacgtgcccgccctgccccgcccccgaactgctggggggccccagcgtcttcctgtttccccccaaacccaaggacaccctgatgatcagcaggacccccgaggtgacctgcgtggtggtggacgtgagccacgaggaccccgaggtaaagtttaactggtacgtggacggggtggaggtccacaacgccaagacgaagccaagggaggagcagtacaacagcacgtaccgggtcgtgagcgtcctgaccgtcctccatcaagactggctcaacggcaaggagtacaagtgcaaggtgtccaacaaggccctccccgcccccatcgagaagaccatcagcaaagccaagggccaaccccgggaaccccaggtgtacacgctcccgcccagcagggaggagatgaccaaaaaccaggttagcctgacctgcctggtgaaggggttttacccctccgacatcgccgttgagtgggagagcaatggccagcccgaaaacaactacaagaccaccccgcccgtgctcgactcagacggtagcttcttcctgtacagcaaactgaccgtggacaagagccgctggcagcagggcaacgtgtttagctgcagcgtgatgcacgaagccctgcacaaccattacacgcagaaaagcctcagcctgtccccgggcaag

SEQ ID NO: 450 - DNA, 1404 bp, synthetic construct
  misc_feature 1..1404: note = IPI_HC-CO05
  source 1..1404: mol_type = other DNA
atggaaacccccgcccagctcctcttcctcctactcttgtggctccccgacaccaccggccaggttcaactcgtggagagcgggggcggagtcgtccagcccgggaggagcttacggctcagctgcgccgcctcggggttcacgttctcaagctacaccatgcactgggtccgccaggcccccgggaaggggctcgagtgggtcaccttcatcagctacgacggaaacaacaagtactacgccgactccgtaaaggggaggttcacgatctccagggacaattccaagaacaccttgtacctgcagatgaatagcctgcgcgccgaggacaccgccatctattactgcgccaggaccggctggctgggcccattcgactactgggggcaggggaccctggtgaccgtgtcgagcgccagcaccaaggggcccagcgtcttccccctggccccctccagcaagagcacctccggcggcaccgccgccctcgggtgcctggtgaaggactacttccccgagcccgtcacggtgtcctggaacagcggcgccctgacgagcggcgtgcacaccttccccgccgtgctgcagtcaagcggcctgtacagcctgagcagcgtggtgactgtgcccagctccagcctgggcacccagacctatatctgcaacgtgaaccacaaaccctccaacacgaaggtggacaaaagggtggagcccaaaagctgcgacaagacccacacctgtccgccgtgtcccgcgcccgagctgctggggggcccctccgtgttcctgtttccccccaagcccaaggacaccctgatgataagcaggacgcccgaggtgacctgcgtggtggtggacgtgagccacgaggaccccgaggtgaagttcaattggtacgtggacggcgtggaggtgcacaacgccaagaccaagccgcgtgaagaacagtataactccacctaccgggtggtcagcgtcctgaccgtgctccaccaggactggctcaacggcaaggaatacaagtgcaaagtaagcaacaaggctctgcccgcccccatcgagaagacgatctccaaagccaaaggccagcccagggagccccaggtgtacaccctccctcccagcagggaggagatgaccaagaaccaggtgagcctgacttgcctggtcaagggtttctacccaagcgacatcgctgtggagtgggaaagcaacggccagcccgagaataactacaagaccaccccgcccgtgctggactcggatgggagcttttttctgtactccaagctgaccgtcgacaagtcgcgttggcagcagggcaacgtgttcagctgcagcgtgatgcacgaggccctgcacaatcactacacccagaaatcgctgagcctgtcgccgggcaag

SEQ ID NO: 451 - DNA, 1404 bp, synthetic construct
  misc_feature 1..1404: note = IPI_HC-CO06
  source 1..1404: mol_type = other DNA
atggagactcccgcccaattactcttcctcctcctcctctggttacccgacaccaccgggcaggttcagctcgtagagagcggcgggggagtcgtccagcccgggcgtagcctcaggctatcctgcgccgccagcgggttcaccttcagcagctacaccatgcactgggtcaggcaggcgcccggcaagggcctcgagtgggtcaccttcatcagctacgacggcaacaacaagtactacgccgactccgtcaagggcaggttcaccatcagccgcgacaacagcaagaacaccctctacctgcagatgaactccctgagggccgaggacaccgcgatctattactgcgccaggaccgggtggctggggcccttcgattactggggacaggggactctcgtgaccgtgagcagcgccagcacgaagggccccagcgtgttccccctggccccctcaagcaagagtacctccggcgggaccgccgcgctggggtgcctcgtgaaggactacttccccgagccggtgaccgtgtcctggaactctggcgccctgaccagcggggtccataccttccccgccgtgctccagagcagcgggctgtactcgctcagcagcgtggtgaccgtgcccagcagcagcctggggacccagacctacatctgcaacgtcaaccacaaacccagcaacaccaaggtggacaagcgtgtggagccaaagagctgcgacaagacccacacctgcccgccctgccccgcccccgagctgctgggcggcccctcggtgttcctcttcccacccaagcccaaggacaccctgatgatcagcaggacccccgaggtgacctgcgtggtggtggatgtgagccacgaggacccggaggtgaagttcaattggtacgtggacggcgtggaggttcacaacgccaaaactaagccccgcgaggagcagtataacagcacctaccgggtggtgtccgtgctgaccgtcctccatcaggactggctgaacgggaaggagtacaagtgcaaggtgagcaataaggcgctgcccgcccccatcgagaagaccatcagcaaggccaagggccagcccagggagccccaggtgtacaccctgccccccagccgggaggagatgacaaagaaccaggtgagcctcacctgcctggtcaaaggcttctatcccagcgacatagcggtggagtgggaaagcaatggccagcccgagaacaactacaagaccaccccgcccgtgctggacagcgacggcagcttcttcctgtacagcaagctcacggtggacaagagcaggtggcagcagggcaacgtgtttagctgcagcgtgatgcacgaagccctgcacaaccattacacccagaagagtctcagcctctcccccggcaag

SEQ ID NO: 452 - DNA, 1404 bp, synthetic construct
  misc_feature 1..1404: note = IPI_HC-CO07
  source 1..1404: mol_type = other DNA
atggagacacccgcccagctcctcttcctcctcctcctctggctccccgacacgaccggccaagtacagctcgtcgagtccgggggaggcgtcgttcagcccggccggagcctcaggcttagctgcgccgcgagcggcttcaccttcagctcctacaccatgcactgggtccgccaggcccccgggaaggggctcgagtgggtcacgttcatcagctacgacggcaacaataagtactacgccgattccgtcaaggggcggttcaccatcagccgggataacagcaagaacaccctctatctgcagatgaacagcctgagggccgaggataccgcaatctattactgcgcccgcaccgggtggctgggcccgttcgactactgggggcaggggaccctggtgacggtgtcctccgcctcgaccaagggcccctccgtgttcccgctggccccctcgtccaagagcaccagcggcggcaccgctgccctgggctgtctggtcaaggactactttccagagcccgtgaccgtgtcctggaatagcggggccctgaccagcggagtgcacaccttccccgccgtcctgcaatcctcgggcctgtactccctgagctccgtagtgaccgtccccagcagcagcttagggacccagacctatatctgcaacgtgaaccacaaacccagcaacacgaaggtggacaagagggtagagcccaaaagctgcgacaagacccacacctgcccaccctgcccggccccagagctgctcgggggccccagcgtgttcctgttcccgcccaagcccaaggacacactgatgatcagcaggactccagaggtcacctgcgtggtggtggatgtgtcccacgaggacccggaggtgaagttcaattggtatgtggacggcgtcgaggtccacaacgccaagacaaagccaagggaggagcaatacaatagcacctaccgtgtcgtgagcgtgctgacagtgctgcatcaggactggctcaacggaaaggagtacaagtgtaaggtgtccaacaaggccctgcccgccccgatagaaaagaccatcagcaaagccaagggccagcccagggagccgcaggtgtataccctcccgcccagcagggaggagatgaccaagaaccaggtgtccctgacctgcctggtcaagggattctaccccagcgacatcgccgtggagtgggagagcaacggccaacccgagaacaactacaagaccactccgcccgtgctcgacagcgatgggagcttcttcctgtatagcaagctgaccgtcgacaagagcaggtggcagcagggcaatgtgtttagctgtagcgtcatgcacgaagccctgcacaaccactatacccagaaatccctgagcctgagccccgggaag

SEQ ID NO: 453 - DNA, 1404 bp, synthetic construct
  misc_feature 1..1404: note = IPI_HC-CO08
  source 1..1404: mol_type = other DNA
atggagacgcccgcccagctcctcttcctcctcctcctctggctacccgacacgaccggccaggtccagctggtggagagcggcggcggcgtagtccagcccggacggagcctccgcctcagctgcgccgccagcggctttaccttcagcagctacaccatgcattgggtcaggcaggcccccgggaagggccttgagtgggtaacatttatcagctacgacggcaacaacaagtattacgccgacagcgtcaagggccgcttcaccatttcccgagacaacagcaagaacaccctctatctgcagatgaacagtctgcgcgcggaggacaccgcgatctactactgcgcccgcaccggttggctcgggccgttcgattactggggccaggggaccctggtgaccgtgagttccgccagcacgaaggggccgagcgtgtttcccctggcccccagcagcaagagcacgagcggcggcaccgccgccctggggtgcctggtgaaggactacttcccggaacccgtgaccgtgagctggaacagcggggccctgaccagcggcgtgcacaccttccccgccgtgctgcagagcagcgggctgtactccctgagctctgtggtgacggtccccagcagcagcctgggcacccagacctacatctgcaatgtgaaccacaagcctagcaacaccaaggtggacaagcgggtcgagcccaagagttgcgacaagacccacacctgccctccctgcccagcccccgaactgctggggggccccagcgtgttcctcttcccacccaagcccaaggacacgctgatgatcagcaggacgcccgaggtgacctgcgtcgtggtcgacgtgagccacgaggaccccgaagtgaaattcaactggtacgtggacggcgtggaggtgcataacgccaaaaccaaaccccgggaggagcagtacaactccacctatagggtcgtgtcggtgctcaccgtgctgcatcaggattggctgaacggcaaggaatataagtgcaaagtgagcaacaaggccctgcccgcaccgatcgagaaaacgatcagcaaagccaagggccagcccagggagccccaggtgtatacgctgccgcccagccgggaagagatgactaagaaccaggtgtccctgacctgcctggtgaagggcttctaccctagcgacatcgcggtcgagtgggagagcaacggccagcccgagaacaactataagacgactccccccgtgctggacagcgacggctcctttttcctgtatagcaaactgaccgtggacaagagcaggtggcagcaggggaacgtgttctcgtgcagcgtgatgcatgaggccctgcataaccactacacccagaagtcgctgagcctgtcccccggcaag

SEQ ID NO: 454 - DNA, 1404 bp, synthetic construct
  misc_feature 1..1404: note = IPI_HC-CO09
  source 1..1404: mol_type = other DNA
atggagacacccgcccagttgctgttcctcctcctcctctggctcccggataccacggggcaggtacaactagtcgagagcgggggcggcgtcgtccagcccggcaggagcctccggctcagctgcgccgcctccgggttcaccttcagctcctacaccatgcactgggtcaggcaggcccccgggaaagggttggagtgggtcacctttatcagctacgacgggaacaacaagtactacgccgacagcgtcaagggccggttcaccattagccgggacaactccaagaacaccctttacctgcagatgaactccctgcgggccgaggacaccgcaatctactactgcgccaggaccggctggctggggcccttcgattactggggacagggcaccctcgtgaccgtgtccagcgccagcaccaagggccccagcgtctttcccctggcccccagcagcaagagcaccagcggcggcacggccgccctgggctgcctggtcaaggactacttccccgagcccgtgaccgtgtcctggaacagcggcgccctgacctccggcgtgcacaccttcccggccgtgctgcagagcagcggcctctactccctctcctccgtggtgaccgtgcccagcagcagcctgggcacccagacctatatctgcaacgtgaaccacaagccatcgaacaccaaagtggataaaagggtggagcccaaaagctgcgataagacccacacctgtcccccctgcccggcccccgagctgctgggcgggccctcagtgttcctgttcccacccaagcccaaggacaccctgatgatcagcaggacccccgaagtcacatgcgtggtggtcgacgtgtcccacgaagaccccgaggtgaaattcaattggtacgtggacggcgtggaggtccacaacgccaagaccaagccccgtgaagaacaatataactccacgtatagggtggtgtccgtgctgacggtgctgcatcaggactggctgaacggcaaggagtacaagtgcaaggtgagcaacaaggccctgccggcccccatcgagaaaaccatctccaaagccaaggggcagccccgcgagccccaggtctatacgctgccccccagcagggaagagatgaccaagaaccaggtcagcctgacctgcctggtgaagggcttttaccccagcgacatcgccgtcgaatgggagtcgaacgggcaaccggagaacaactacaagaccacccctcccgtgctggacagtgacgggagcttctttctctactccaagctgaccgtcgacaagtcccggtggcaacagggaaacgtgttttcctgcagcgtgatgcatgaggccctccataatcactacacccagaagtccctgagcctgagccctgggaag

SEQ ID NO: 455 - DNA, 1404 bp, synthetic construct
  misc_feature 1..1404: note = IPI_HC-CO10
  source 1..1404: mol_type = other DNA
atggaaaccccggcccagctcctcttcctcttactcttgtggctccccgacaccaccgggcaggtccagctcgttgagagcgggggcggcgtcgtacagccggggcgaagcctccggctctcctgtgccgcgagcggcttcaccttcagcagctacacgatgcactgggtcaggcaggcccccgggaagggtctggagtgggtaacgttcatcagctacgacggaaacaataagtactacgcggattccgtgaagggccgcttcaccataagcagggataactccaagaacaccctctacctgcagatgaattccctgcgcgccgaggacaccgccatctactactgcgccaggacaggctggctgggccccttcgactattggggccaaggcaccctggtgacggtgtccagcgcgagcaccaagggcccctccgtgttcccgctggcgcccagctccaaaagcaccagcgggggcaccgccgccctgggctgcttggtgaaggactacttccccgagcccgtgaccgtaagctggaacagcggcgccctgacctccggcgtgcacacgttccccgcggtgctccaaagctccggcctctattccctgagcagcgtggtgaccgtgcccagcagctcgctgggcacccagacttacatctgcaatgtgaaccacaagcccagcaacacgaaggtggacaagagggtcgagcccaagagctgcgacaagacccatacctgtcccccctgtcccgcccccgaactgctcggcggcccctccgtgttcctgttccctcctaaacccaaggacaccctgatgatcagcaggacgcccgaagtgacctgtgtggtggtggatgtgagccacgaggatcccgaggtgaagttcaactggtacgtcgacggggtggaggtccacaacgccaagaccaagccccgggaggagcaatacaatagcacctacagggtggtcagcgtgctgaccgtgctgcatcaggactggctgaatggcaaggagtacaagtgcaaggtgagcaacaaggccctgcccgcccccatcgagaagacgatctcaaaggccaagggccaacccagagagccccaggtgtacaccctgccgccctccagagaggagatgacgaagaatcaggtgtccctgacctgcctggtgaagggattctaccccagcgacatcgccgtggagtgggagagcaacggccagcccgagaacaactacaagaccaccccgcccgtcctggacagcgacggctccttcttcctgtacagcaagctgaccgtggataagtcccggtggcaacagggcaacgtgtttagctgtagcgtgatgcatgaggccctgcacaaccactacacccagaaaagcttgtccctgtcccccgggaag

SEQ ID NO: 456 - DNA, 1404 bp, synthetic construct
  misc_feature 1..1404: note = IPI_HC-CO11
  source 1..1404: mol_type = other DNA
atggagacacccgcccagctcctcttcctcctcctcctctggcttccggacaccaccgggcaggtccagctcgttgagagcgggggaggagtcgtccagccgggaaggagcctaaggctctcctgtgcggccagcgggttcaccttcagctcctataccatgcactgggtccggcaggcccccggcaagggcttggagtgggtcacgttcatctcctacgacggcaacaacaagtactacgccgacagcgtcaagggccggtttaccatcagccgcgacaattccaagaacaccctctacctgcaaatgaactccctgcgggccgaggatacagccatctattattgtgcgagaaccggctggctggggcccttcgactactggggccagggaaccctggtgaccgtgagcagcgcctccaccaagggcccatccgtgtttcccctggcccccagtagcaagagcacgtccggcggcaccgccgccctgggctgcctggtaaaggactacttccccgagcccgtcaccgtgagctggaacagcggggccctgacctccggcgtacacaccttccccgccgtcttacagtcctcgggcctgtatagcctgagctccgttgtgacggtgcccagctcctcactgggcacccagacatacatctgcaatgtgaatcacaaacccagcaacaccaaagtggacaagcgggtggagcccaagtcctgcgacaaaacccacacgtgcccgccctgcccggcccccgagctgctgggtgggcccagcgtgtttctgttcccacccaagcccaaggataccctcatgataagccgcacccccgaggtgacctgcgtggtggtggacgtgagccacgaggaccccgaggtgaagttcaactggtacgtggacggcgtggaggtccacaacgccaagaccaagcccagagaagaacagtacaacagcacgtaccgtgtggtcagcgtgctgaccgtgctgcaccaggactggctgaacggcaaggaatacaaatgcaaggtgagcaataaggccctgcccgcccccatcgaaaagaccatcagcaaagccaagggacagccccgggagccccaggtgtacaccctgcctcccagcagggaggagatgaccaaaaaccaagtctccctgacctgcctggtgaaagggttttaccccagcgacatcgccgtagagtgggagagcaacggccagcccgagaacaattataagaccaccccgcccgtgctggatagcgacgggagtttcttcctgtacagcaagctgacggtggataagagccgttggcagcagggcaacgtgttctcctgctccgtgatgcacgaggccctgcacaaccactacacccagaaaagcctgagccttagccccggaaag

SEQ ID NO: 457 - DNA, 1404 bp, synthetic construct
  misc_feature 1..1404: note = IPI_HC-CO12
  source 1..1404: mol_type = other DNA
atggaaacccccgcccagctcctcttcctcttgctcctatggctcccggacacaaccgggcaggtccagctcgtcgagagcgggggcggggtcgtccagcccgggcggagcctccgtttgagttgcgccgccagcggcttcaccttcagcagctacaccatgcactgggtccgtcaggccccggggaagggcctcgagtgggttaccttcatcagctacgacggcaacaacaagtactacgccgattccgtcaaggggcgtttcacgatttcccgggacaattccaagaacaccctctacctgcagatgaacagcctgagggcggaggacaccgccatctactactgcgcccggaccggctggctgggcccgtttgactattggggccagggcaccctggtgaccgttagcagcgccagcaccaagggtcccagcgtcttcccgctggcccccagctccaagagcaccagcggcggcaccgccgcgctgggctgcctggtcaaggactacttccccgagcccgtgaccgtcagctggaacagcggggccctgaccagcggcgtccacaccttcccggccgtgctgcagagcagcgggctgtacagcctgagcagcgtggtgaccgtgccaagcagcagcctgggtacccaaacgtacatctgtaacgtgaaccacaagcccagcaacaccaaggtggataagagggtggagccgaaaagctgcgacaagacccatacctgccctccctgccccgcccccgagcttctgggcggcccgtcggtcttcctgttcccgcccaaacccaaggacaccctcatgatctcccggacacccgaggtgacctgcgtcgtcgtggacgtgtcacatgaggaccccgaggtcaagttcaactggtacgtggacggcgtggaagtgcataacgccaagaccaagccccgagaggagcagtacaacagcacctaccgcgtggtgagcgtgctcaccgtgctgcaccaggattggctcaacggaaaggagtacaaatgcaaggtgtccaataaggccctccccgcgcccatcgagaagacaatctcaaaggcaaagggacagccccgggagccccaggtatacaccctgcccccctcccgcgaggagatgacaaagaaccaagtgagcctgacctgcctcgtgaagggcttctacccctccgacatagccgtggagtgggagagcaacggccagcccgagaacaactacaagaccaccccgcccgtgctggactccgacggcagcttcttcctgtacagcaagctgaccgtggacaagtccaggtggcagcaaggcaacgtgttcagctgcagcgtgatgcacgaggccctgcacaatcactacacccagaaaagcctgtccctgagccccggcaag

SEQ ID NO: 458 - DNA, 1404 bp, synthetic construct
  misc_feature 1..1404: note = IPI_HC-CO13
  source 1..1404: mol_type = other DNA
atggagacacccgcccagctactcttcctcctccttctctggcttccggacaccaccggccaggtccagctggtggagagcggcggcggcgtcgtacagcccgggaggtccctccggttgagctgtgccgccagcggcttcacattttccagctacaccatgcactgggtcaggcaggccccgggcaagggcctcgagtgggtcacctttatctcctacgacggcaacaacaagtactacgccgacagcgtcaaagggcggttcaccatcagcagggacaacagcaagaacaccctctacctgcagatgaacagcctgagggccgaggatacggccatctactactgcgcccggaccggctggctgggccccttcgactactgggggcagggcaccctcgtcaccgtgagcagcgccagcacaaaagggccctccgtgtttcccctcgccccctcgtccaaatccaccagcggcggcaccgctgccctggggtgcctggtgaaggactactttcccgagcccgtgaccgtgagctggaatagcggcgccctgacctccggcgtgcacacattccccgccgtgctgcagagcagcggcctgtacagcctgagcagcgtggtcaccgtgccctccagtagcctggggacccagacctacatctgtaacgtgaaccacaagcccagcaacaccaaggtggataaaagggtggagccaaagtcctgcgacaagacccatacctgccccccgtgccccgcccccgaactcctgggcgggcccagcgtgttcctcttcccacccaagcccaaggacacgctgatgatcagccggacccccgaggtgacctgcgtggtggtggacgtgagccacgaggatcccgaggtgaagttcaactggtacgtggatggcgtggaggtgcataacgccaagaccaagccgagggaggagcagtataacagcacctatagggtggtcagcgtgctcacggtcctgcaccaggattggctgaacggcaaagagtacaagtgcaaggtgtccaataaggccctgcccgcccccatagagaagaccatctccaaggccaagggccagcccagggagccccaggtgtacacgctgcccccctccagggaggagatgaccaaaaatcaggtgagcctgacctgcctggtgaaggggttctaccccagcgatatcgccgtcgagtgggagtccaatgggcaaccggaaaacaactacaagactaccccgcccgtgctggactcggacggcagcttcttcctgtactccaagctgaccgtcgacaagtcaaggtggcagcagggcaatgtgttcagctgtagcgtgatgcatgaggccctccacaaccactatacccaaaagagcctttcgctctcccccggcaag

SEQ ID NO: 459 - DNA, 1404 bp, synthetic construct
  misc_feature 1..1404: note = IPI_HC-CO14
  source 1..1404: mol_type = other DNA
atggagacgcccgcccagctcctctttttactcctcctctggctccccgacaccaccggccaggtccagctcgtcgagtccgggggaggcgtcgtccagccgggcaggagcctcaggctcagctgcgccgcctccggcttcacgttcagcagctacacaatgcattgggtcaggcaggcgcccggtaaagggctcgagtgggtaaccttcatcagctacgacggcaacaacaaatactacgcggacagcgtcaagggcagatttaccatctcccgggataactccaagaataccctctacctccagatgaacagcctgagggccgaggacaccgccatctactactgcgccaggacggggtggctgggaccctttgactactggggccagggcaccctggtcaccgtgagcagcgccagcaccaaaggccccagcgtgttccccctggcacccagcagcaagagcaccagcggtggcaccgccgccctcggctgcctggtgaaggactacttcccggagcccgtgaccgtgagctggaacagcggggccctgacgtccggcgtccacacctttccagccgtgctgcaaagcagcggcctgtactccctgagcagcgtggtgaccgtgccgagcagcagcctgggcacccagacctacatctgtaacgtgaaccacaagccaagcaataccaaggtggacaaaagggtggagcccaagtcctgtgacaaaacccacacctgcccgccctgccccgcccccgaactgctgggcgggccctcggtatttctgttcccgcccaagcccaaggataccctgatgatctcccggacccccgaagtgacctgcgtagtggtggacgtgagccacgaggaccccgaggtgaagttcaactggtacgtggatggcgtggaggtgcacaacgccaagaccaagccccgggaggagcagtataacagcacgtacagggtggtgtccgtgctcaccgtactgcatcaggactggctcaacggcaaggagtataagtgtaaggtgagcaacaaggccctgcccgcccccatcgaaaagacgatcagcaaggcaaaaggccagcccagggaaccccaggtgtacaccctgccccccagcagggaggagatgaccaagaaccaggtgagcctgacctgcctggtgaagggcttttatccaagcgacatcgcggtcgagtgggagtcgaatggccagcccgagaacaactataagaccaccccacccgtgctcgactccgacggcagcttcttcctgtatagcaagctgaccgtcgacaagagcaggtggcaacagggcaacgtgttcagctgcagcgtgatgcacgaggcgctgcataatcactatacccagaaaagcctgagcctgagccccggcaag

SEQ ID NO: 460 - DNA, 1404 bp, synthetic construct
  misc_feature 1..1404: note = IPI_HC-CO15
  source 1..1404: mol_type = other DNA
atggagacgcccgcccagctcctattcctcctcctcctctggctacccgacacgaccggccaggtccagctcgtcgagagcggcggcggagtcgtccagcccggcaggagcctcaggctcagctgtgccgccagcggctttaccttcagctcgtacaccatgcactgggtaaggcaggcgccaggcaagggcctcgagtgggtcaccttcatctcctacgacgggaacaataaatactacgccgacagcgtcaagggcaggttcaccataagcagggacaacagcaagaacaccctctacctgcagatgaacagcctgcgggccgaggacaccgctatttattactgcgccaggacgggttggctgggccccttcgactactggggccagggtaccctggtgacagtgtccagcgcgagcaccaagggccccagcgtgttccccctggctcccagctccaagagcacctcaggggggaccgccgccctggggtgcctggtgaaagattatttccccgagcccgtaacggtgagctggaacagcggggccctgaccagcggcgtgcacaccttccccgcggtgctgcagagcagcggcctgtacagcctctccagcgtggtgacggtgcccagctccagcctgggcacccagacctatatctgcaacgtgaaccacaagccctccaacaccaaggtggataagcgggtggagcccaagagctgcgacaagacgcacacctgcccgccctgccccgcgcccgagctgctggggggaccgtccgtgtttctgttccccccgaaacccaaggataccctgatgatcagccggacccccgaagtgacctgcgtggtggtggacgtgagccacgaggatcccgaggtgaagttcaattggtacgtggacggcgtggaggtgcataacgcgaaaaccaagccccgggaggagcagtacaacagtacctatagggtggtgagcgtgctgaccgtcctgcaccaggactggctgaacggcaaggagtacaaatgcaaggtgagcaacaaggcgctgcccgcccccatcgagaagaccatctcgaaggccaagggccaaccccgggaaccccaggtgtataccctgcccccaagcagggaagagatgaccaaaaaccaggtcagcctgacctgtctggttaagggattctacccctccgacatcgcggtggagtgggagagcaacggccagcccgagaataactacaagacgaccccgcccgtcctggacagcgacggatccttcttcctctacagcaagctgactgtggacaagagcaggtggcaacagggcaacgtcttttcgtgctccgtgatgcatgaggccctgcacaaccactacacccagaagtccctgagcctctcccccggcaag

SEQ ID NO: 461 - DNA, 1404 bp, synthetic construct
  misc_feature 1..1404: note = IPI_HC-CO16
  source 1..1404: mol_type = other DNA
atggagacacccgcccagctcctcttcctcctcctcctctggctccccgacaccaccggtcaggtacagctcgtcgagtccggcggcggggtcgttcagcccggcaggagcctcaggttatcctgcgccgccagcgggtttacgttcagctcctacaccatgcactgggtccggcaggcgcccggcaagggcctcgagtgggtcaccttcatcagctacgacggcaacaacaagtactacgccgatagcgttaagggcaggttcaccatcagcagggacaattccaagaataccctctatctgcagatgaatagcctgagggcggaagacacggcaatctattattgtgcacggaccggctggctggggcccttcgactattgggggcagggtaccctggtgaccgtcagcagcgcctccaccaaggggcccagcgtgttccccctggcccccagcagcaagtccaccagcggcggcacagccgccctgggctgcctggtcaaggattactttcccgagcccgtcaccgtgagctggaacagcggggcactgacgagcggggtgcatacctttcccgccgtgctgcaaagcagcggcctctacagcctgtcgagcgtggtgaccgtgcccagtagcagcctcggcacccagacctacatctgcaacgtcaaccataagccctccaacaccaaggtggacaagagggtggagcccaagagctgcgacaagacccacacgtgcccaccctgcccggcccccgagctgctgggcggaccctccgtgttcctgtttcccccgaagccgaaagacaccctaatgatctcgaggacgccagaagtgacctgtgtggtggtcgacgtgagccacgaggacccggaggtgaagttcaattggtacgtggacggcgtggaggtgcataatgcgaagaccaagccccgggaggagcagtacaacagcacctaccgggtggtgtccgtgctgaccgtgctgcaccaggactggctgaacggcaaggagtacaagtgcaaggtgtccaacaaggccctgcctgcccccatcgagaagaccatctccaaggccaaggggcaaccccgggagcctcaagtgtacacccttccccccagcagggaggagatgaccaagaaccaggtgtcccttacctgcctggtgaaggggttctacccctccgacatcgccgtggagtgggagagcaacggtcagcccgagaacaactacaagaccaccccgcccgtgctggacagcgacggcagctttttcctgtatagcaagcttaccgtggacaagagcaggtggcagcagggcaacgtgttcagctgcagcgtcatgcacgaggccctgcacaaccattatacccagaagtctctcagcctgtcccccggcaaa

SEQ ID NO: 462 - DNA, 1404 bp, synthetic construct
  misc_feature 1..1404: note = IPI_HC-CO17
  source 1..1404: mol_type = other DNA
atggagacgcccgcccagctcctatttctcctactcttgtggctccccgacacgaccgggcaggtccagctggtggagtccgggggcggggtcgtacagcccggcaggagcctccgattaagctgcgccgccagcggatttaccttcagcagctataccatgcactgggtcaggcaggcccccggcaagggcctcgagtgggtcaccttcatcagctacgacggaaacaacaagtattacgccgactccgtcaaagggaggttcaccatcagcagggacaactcgaagaacaccctctacctgcaaatgaactccctgcgcgccgaagacaccgccatatactactgcgccaggaccgggtggctggggcccttcgactactggggccagggcaccctggtgaccgtgtcctcagcctcaactaagggcccctccgtgttcccgctggcccccagcagcaagagcaccagcggcggtaccgcggccctgggctgcctggtgaaggactacttccccgagcccgtgacggtgagctggaactctggcgccctgaccagcggagtgcacaccttccccgcggtgctgcagagcagcgggctgtactccctgagcagcgtggtgactgtgccctccagctccctgggcacccagacctacatctgcaacgtcaaccacaagccgagcaacaccaaggtggacaaacgggtcgagcccaagagctgcgacaagacccacacctgcccgccctgccccgcccccgaactcctgggtggcccatcggtgttcctcttccccccgaagcccaaggacaccctgatgatcagccgcacccccgaggtcacctgcgtcgtggtggacgtgagccacgaggaccccgaagtcaagttcaactggtacgttgacggggtggaggtccacaacgccaagaccaagcccagggaggagcaatacaacagcacctaccgggtggtgagcgtgctgaccgtcctgcaccaggactggctgaacgggaaggagtacaagtgcaaagtgagcaataaggccctgcccgcccccatcgagaagaccatctccaaggccaagggccagcccagggagccccaagtgtacacgctgccccccagcagggaagagatgaccaagaaccaggtgtctctgacctgcctggtgaagggcttctaccccagcgacatcgccgtcgagtgggagagcaacggccagcccgagaacaactacaagaccaccccgcccgtgctggacagcgacggcagcttcttcctctacagcaagctgaccgtggacaagagcaggtggcagcagggcaacgtattctcctgctccgtgatgcacgaagccctgcacaaccactacacgcagaagtcactgagcctgagccccgggaag

SEQ ID NO: 463 - DNA, 1404 bp, synthetic construct
  misc_feature 1..1404: note = IPI_HC-CO18
  source 1..1404: mol_type = other DNA
atggagacacccgcgcagcttctattcctcctcctcctctggctacccgacaccacgggtcaggtccagctcgtcgagagcgggggcggagtggtccagcccggcaggtcactccggctctcctgcgccgcctccggctttacctttagcagctataccatgcactgggtcaggcaggcccccgggaagggcctcgagtgggtcaccttcatcagctacgacggaaacaacaagtattacgcggattccgtaaaaggcaggttcaccatctccagggacaatagcaagaacaccctctacctgcagatgaactccctgcgagccgaagacaccgccatatactactgcgccaggaccgggtggctcgggcccttcgactattggggccaggggaccctggtgaccgtcagcagcgccagcaccaaggggccctccgtgttccccctggccccctcatccaagagcaccagcggcgggaccgcagccctggggtgcctcgtgaaggactacttccccgagcccgtgaccgtgagctggaacagcggcgcgctcaccagcggcgtgcacaccttccccgccgtgctgcagtccagcgggctgtactccctgtcctcggtggtcaccgtccccagcagcagcctgggcacccagacctacatctgcaacgtgaaccacaagcccagcaacaccaaggtggataagagggtcgagcccaaaagctgcgacaaaacccacacctgcccgccctgccccgcccccgagctgctgggcggcccaagcgtgttcctgttccctcccaaacccaaggacacgctcatgatatccaggacccccgaggtcacgtgcgtggtggtggacgtgtcccacgaggaccccgaggtcaaattcaactggtacgtggacggcgtggaggtgcacaacgccaagaccaagcccagggaggagcagtacaactccacgtaccgggtggtgtccgtcctgacggtgctccaccaagactggctgaacgggaaggagtacaagtgcaaggtgtccaacaaggccctgccggcccccatcgagaagacgatcagcaaggccaaggggcaacccagggagccccaggtttacaccctgccccccagcagggaggaaatgaccaagaatcaggtgagcctgacctgtctggtcaaaggcttctacccgagcgacatagccgtggaatgggagagcaacggccagcccgagaacaactacaaaaccacccctcccgttctcgacagcgacggcagcttcttcctctacagcaagctcaccgtagacaagagccggtggcagcagggcaatgtgttctcctgcagcgtgatgcacgaggccctgcacaatcattacactcagaaaagcctgagcctcagccccggcaag

SEQ ID NO: 464 - DNA, 1404 bp, synthetic construct
  misc_feature 1..1404: note = IPI_HC-CO19
  source 1..1404: mol_type = other DNA
atggagactcccgcccagctcctcttcctcctcctcctttggctccccgacaccaccggtcaggtccagctcgtcgagagcgggggcggcgtcgtccagcccggcaggagcctcaggctcagctgcgccgccagcggcttcaccttctccagctacacgatgcactgggtcaggcaagcgcccggcaaagggctcgagtgggtaaccttcatctcatacgacggcaacaacaagtactacgcggacagcgtcaagggccggttcaccatcagcagggataacagcaagaacaccctttacctgcagatgaactcactgcgcgccgaggacaccgccatatactattgcgcaaggaccggctggctgggccccttcgactactggggccagggaacgctggtcaccgtgagctctgccagcaccaagggcccctccgtcttccccctggccccctcctccaagagcacgtccgggggcacggcggccctggggtgcctggtgaaggactacttccccgagcccgtgaccgtgtcatggaacagtggcgcgctgacgagcggggtgcatacatttcccgccgtgctccagagctccggcctgtactcgctgtccagcgtggtgaccgtgccgtccagcagcctgggcacccagacatacatatgcaatgtgaatcacaagccctccaacaccaaggtggacaaaagggtggagccgaaaagctgtgacaagacgcacacctgcccaccctgccccgcccccgagctgctgggtggcccgagcgtgttcctgttcccgccaaaacccaaggacaccctgatgatcagccggacccccgaggtgacctgcgtggtggtggacgtgagccacgaagaccccgaagtcaagttcaactggtatgtggacggcgtggaggtccacaacgccaagaccaagccccgcgaggagcagtacaactcgacctacagggtggtgagcgtgctgacagtgctccaccaggactggctgaatggcaaggagtataagtgcaaggtgagcaacaaagcgctgcccgcccccatcgagaagaccatcagcaaggccaagggccaacccagggagccccaggtctataccctcccccctagcagggaggagatgaccaaaaaccaggtgagcctcacctgcctggtgaaggggttctatcccagcgacatcgccgtggagtgggaaagcaacgggcagcccgagaacaattacaagaccaccccacccgtgctggattccgacggctcgtttttcctgtacagcaagctgaccgtcgacaagagcaggtggcaacaggggaatgtgttcagctgcagcgtgatgcacgaagccctccacaatcattatacccagaaaagcctgagcctcagccccggcaag

SEQ ID NO: 465 - DNA, 1404 bp, synthetic construct
  misc_feature 1..1404: note = IPI_HC-CO20
  source 1..1404: mol_type = other DNA
atggagacacccgcccagcttttgttcctcctcctcctttggctccccgacaccaccgggcaggtccagctcgtcgagtccggcggcggcgtcgtacagcccggccggagcctcaggctcagctgcgccgcctccggcttcacctttagctcctacaccatgcactgggtcaggcaagccccaggcaagggactcgagtgggtcacctttatttcctacgacgggaataataagtactacgcagacagcgtaaagggcaggttcaccatctccagggacaactcgaagaacaccctctacctccagatgaatagcctgagggcggaggacaccgccatctattactgcgcgcgcacgggctggctgggccccttcgactactggggccagggcacactggtgacagtgagcagcgccagcaccaagggcccaagcgtgttccccctggcccccagcagcaagtcaaccagcggcggcacagcggccctgggctgcctggtgaaggactacttccccgagcccgtgaccgtgagctggaactctggcgccctgaccagcggcgtgcacacgtttcccgcggtactgcagagcagcggactctacagcctgagctccgtggtgacggtgcccagcagctccctgggcacccagacctacatctgcaacgtgaaccacaagccctccaacaccaaggtggacaaaagggtggagccgaaatcctgtgacaagacccacacgtgcccgccctgcccggccccggagctcctgggcggcccctccgtgtttctgttcccgcccaagcccaaggacacccttatgatcagccggacgcccgaggtgacctgcgtggtggtggacgtgagccacgaagaccccgaggtgaagttcaactggtacgtcgacggcgtagaggtgcacaatgccaagacgaagccccgggaggagcaatacaactccacctaccgcgtggtgagcgtgctgacggtcctccaccaggactggctcaacggtaaggagtataagtgtaaggtgagcaacaaggccctgcccgcgcccatagagaagaccatttccaaggccaagggccagcccagagagccccaagtgtacaccctgccgccaagccgggaggagatgacaaagaatcaggtgtccctcacgtgcctggtgaagggattctacccctccgacatcgccgtggagtgggagagcaacgggcagccggaaaacaattacaaaaccacccctccagtgctggacagtgacggcagcttctttctgtactccaagctgaccgtcgataagagccggtggcagcagggcaacgtcttttcgtgcagcgtgatgcacgaggccctgcacaaccactacacccagaaaagcctgagcctgagcccgggcaag

SEQ ID NO: 466 - DNA, 1404 bp, synthetic construct
  misc_feature 1..1404: note = IPI_HC-CO21
  source 1..1404: mol_type = other DNA
atggagacgccggcccagctcctctttctcctcctcctctggctccccgacaccaccggccaggttcagctcgtcgagagcggcggaggcgtcgtacagcccgggcggagcctcaggctcagctgtgccgcgagcggcttcaccttcagcagctacaccatgcactgggtccggcaggcccccggcaagggcctcgagtgggtaacattcatctcctacgacggtaataacaagtactacgccgacagcgtcaagggcaggttcaccatcagcagggataactccaagaacaccctctacctgcagatgaacagcctgcgggccgaagacaccgccatctattattgcgcgaggaccggctggctgggccccttcgactattggggccagggcaccctggtgaccgtgtcgagcgccagcaccaagggccccagcgtgttccccctggcccccagcagcaagtccaccagcggcgggaccgccgcgctgggctgtctagtgaaggactacttccccgagcccgtgaccgtgtcctggaacagcggtgccctgacctccggcgtgcatacctttccggccgtgctgcagagcagcggtctgtactccctctccagcgtggtgaccgtccccagcagcagcctggggactcagacctacatctgcaacgtgaatcacaaaccctccaacaccaaggtggataagagggtcgagccaaagagctgtgacaagacccacacctgcccgccctgccccgcccccgagctgctggggggccccagcgtcttcctgttcccgcccaagcccaaggacacgctgatgatcagccgcacccccgaggtgacgtgcgtggtggtcgacgtgagccacgaggaccccgaggtaaagttcaactggtacgtggacggggtggaggtgcataacgccaagaccaaaccccgggaggagcagtacaattcaacctaccgggtggtgtcggtcctgacagtgctgcaccaggactggctcaacggcaaggaatacaagtgtaaagtgagcaataaggccctccccgcgcccatcgagaagaccatctccaaggccaaaggccagcccagggagccccaggtgtacaccctgccccccagcagggaggagatgaccaagaaccaggtgtccctgacttgcctcgtgaaaggcttctaccccagcgatatagccgtcgagtgggaaagcaacggccagcccgagaacaactataagaccacgccgcccgtgctcgactctgacggcagcttctttctgtatagcaagctgaccgtggacaagagcaggtggcagcagggcaacgtgttctcgtgctccgtgatgcatgaggccctgcataatcattacacccagaaaagcctgagcctgtcccccgggaag

SEQ ID NO: 467 - DNA, 1404 bp, synthetic construct
  misc_feature 1..1404: note = IPI_HC-CO22
  source 1..1404: mol_type = other DNA
atggaaaccccagcccaactcctcttcctcctcctcctatggctcccggacaccacaggccaggtacagctcgtagagtcgggcggcggcgtagtccagcccggaaggagcctccggcttagctgcgccgcctccggcttcaccttctcgagctacaccatgcactgggtccgacaggcccccggcaaggggctcgagtgggtcaccttcatcagctacgacgggaacaacaagtactacgccgacagcgtcaagggccggttcaccatctcgagagacaacagcaagaacactctctacctgcagatgaacagcctgcgagccgaggacaccgccatctactactgtgccaggacaggatggctgggccccttcgactattggggccaaggcaccctcgtgaccgtgtccagcgcgagcaccaagggccccagcgtgttcccccttgcccccagcagtaaatccacaagcgggggcacggccgccctcggatgcctggtgaaagactacttccccgagcccgtgactgtgagctggaacagcggggcccttaccagcggcgtgcacaccttccccgccgtgctgcagtccagcggcctgtacagcctgagcagcgtcgtgaccgtgccctcttcgtctctgggcacccagacctacatctgcaacgtcaaccacaaacccagcaatactaaggtggacaagcgagttgagcccaaaagctgcgacaagacccacacctgcccgccctgcccggcccccgagctcctgggcgggccgagcgtcttcctgtttcccccgaagccgaaggataccctgatgattagcaggacccccgaggtcacctgcgtggtggtcgacgtgagccatgaggaccccgaggtgaaatttaactggtacgtggatggggtggaggtgcataacgccaagaccaagcccagggaggagcagtacaacagcacgtatcgcgtggtgtcggtgctgaccgtgctgcaccaggactggctgaacggcaaggagtacaagtgcaaggtcagcaacaaggccctgccggcccccatcgagaaaaccatcagcaaggccaaggggcagccccgggagccccaggtctatactctccctccctccagggaagaaatgaccaagaaccaggtgtcgctgacttgcctggtgaaggggttctacccctccgacatcgcggtggagtgggagtccaacggtcagcccgaaaacaactacaagacgaccccacccgtgctggacagcgacggctccttcttcctgtactcgaagctgactgtggacaagtcccgctggcagcaggggaacgtcttttcctgcagcgtgatgcacgaggccctacacaaccactacacccagaaaagcctgtcgctgtcccccgggaag

SEQ ID NO: 468 - DNA, 1404 bp, synthetic construct
  misc_feature 1..1404: note = IPI_HC-CO23
  source 1..1404: mol_type = other DNA
atggagacacccgcacagctcctcttcctcctcctcctttggctcccggacaccacggggcaggtccagctcgtcgagagcgggggcggcgtcgtacagcccggtaggtcccttaggctctcctgcgccgcctccggctttacgttttcgagctacaccatgcactgggtccgccaggcccccggcaagggccttgagtgggtcaccttcatcagctacgacggcaacaacaagtactacgccgatagcgtcaagggccgcttcaccataagcagggacaactccaagaacaccctctacctgcagatgaacagcctcagggcggaggacaccgccatctactactgtgccaggaccggctggctgggccccttcgactactggggccaggggacgctggtgacggtgagcagcgcctccaccaagggccccagcgtcttcccgctggcacccagctccaagtccactagcggcggcaccgccgccctgggctgcctagtgaaagattactttcccgaacccgtgacggtgagctggaacagcggcgccctgaccagcggagtgcacacgttccccgccgtcctgcagtcctcgggcctgtacagcctgagctccgtggtcaccgtgccctcctcgagcctgggcacccagacgtatatctgcaacgtgaaccataagccatcgaataccaaggtggataagagggtggaaccgaaaagctgcgacaagacccacacttgcccgccctgcccggcccccgagctgctgggcgggccctcggtctttctgttcccacccaagcccaaggacacccttatgatcagccggacccccgaggtcacctgcgtggtggttgacgtgagccacgaggatccagaggtgaagttcaattggtacgtggatggagtcgaggtgcacaacgccaaaaccaagccccgcgaggagcagtataacagcacctatcgagtggtgagcgtgcttaccgtgctccaccaggactggctgaacgggaaggagtacaagtgcaaggtgtccaacaaggccctgcccgcccccatcgagaagaccatttccaaggccaaggggcaacccagggagccccaagtgtacaccctgccccccagccgcgaggagatgacgaaaaaccaggtgtccctgacctgcctggtcaagggcttctacccctccgacatcgccgtggagtgggaatccaacggccagcccgagaacaattacaagacaaccccgcccgtgctcgactccgacggcagctttttcctgtacagcaagctgaccgtcgacaagagccgttggcagcaggggaacgtgttcagctgcagcgtcatgcacgaggccctgcacaaccattatactcagaaaagcctgagcctgagccccggcaag

SEQ ID NO: 469 - DNA, 1404 bp, synthetic construct
  misc_feature 1..1404: note = IPI_HC-CO24
  source 1..1404: mol_type = other DNA
atggagacgccggcccaactcctcttcctcctcctcctctggctccccgacaccaccggccaggttcaactggtcgagtcgggcgggggcgtcgtccagcccggccggagcctcaggctctcgtgcgccgccagcggtttcaccttcagcagctacaccatgcactgggtccgacaggcccccggcaagggcctcgagtgggtcaccttcatcagctacgacggcaacaacaaatattacgccgacagcgtaaagggccggtttaccatcagcagggacaactccaagaacaccctctacctccagatgaacagcctgcgcgccgaagacaccgccatctactactgtgccaggaccggctggctcggccccttcgactactgggggcaggggaccctggtgaccgtgtcatcggccagcacgaagggccccagcgtcttccccctggcgccctccagcaagagcacctccggcggcaccgccgccctgggatgcctggtgaaggattacttcccggagcccgtgacagtgtcctggaactccggcgcactgaccagcggcgtgcatacctttcccgccgtgctgcagagcagcggcctgtattccctgagtagcgtggtgaccgtgccctccagcagcctcgggacccaaacctacatctgcaatgtgaatcacaagccgagcaacaccaaggtggacaagcgggtggaacccaagtcctgcgataagacccacacctgcccgccgtgcccggcccccgagctgctggggggtccgagcgtgttcctgttcccgccaaagcccaaggacacgctgatgatctcgcgcacgccagaggtgacctgcgtcgtggtggacgtgagccacgaggaccccgaggtgaagttcaactggtatgtcgacggggtcgaggtgcacaacgccaagaccaagccccgggaggagcagtacaattccacctacagggtggtgtccgtgctgaccgtgctgcaccaggactggctcaatggcaaggagtacaagtgcaaggtgagcaacaaggccctgcccgcccccattgagaagacaatctccaaggccaagggtcagccaagggagccccaggtgtacacgctcccgcccagcagggaggaaatgaccaagaaccaggtgagcctgacctgtctggtgaagggcttctacccaagcgacatcgccgtggaatgggagtccaacgggcagccggagaacaactacaagactaccccgcccgtgctggacagcgacggctcgttcttcctgtacagcaagctgaccgtggacaagagcaggtggcagcaggggaacgtatttagctgctccgtgatgcacgaggccctgcacaaccattacacccagaagtcactgagcctgagccccggaaag

SEQ ID NO: 470 - DNA, 1404 bp, synthetic construct
  misc_feature 1..1404: note = IPI_HC-CO25
  source 1..1404: mol_type = other DNA
atggagactcccgcccagctactcttcctcctcctcctctggctcccggacaccaccggccaggtccagctcgtcgagagcggcggcggagtcgtccagcccgggcgcagccttaggctcagctgcgccgcctccggcttcacgttctcctcctacaccatgcactgggtcaggcaggcccccggcaagggcctcgagtgggttacgtttatctcctacgacgggaacaacaaatactacgccgactccgtaaagggcaggttcaccatctccagggacaacagcaaaaacacgctctacctgcagatgaacagcctgcgggccgaggacacggccatctactactgcgccaggacggggtggctgggtcccttcgactactggggccagggcaccctggtgaccgtgtcatccgcctccaccaaggggccctcagtgttccccctggcccccagcagcaagagcacctccggggggaccgccgccctgggctgcctcgtgaaagactactttcccgagccggtcaccgtgtcctggaacagcggagccctgacctcgggcgtgcacaccttccccgccgtcctccagtcctcaggcctctacagcctgtcaagcgtggtgaccgtgcccagcagcagcctggggacccagacttacatctgcaatgtgaaccacaagcccagcaataccaaagtggacaagagggtggagcccaaatcctgcgacaagacccacacgtgtcccccttgccccgcccctgagctgctgggcgggcccagcgtgttcctgtttccccccaagccgaaggacacgctcatgatctcacgaacccccgaagtgacctgcgtggtggtggacgtgagccacgaggaccccgaggtgaagttcaactggtacgtggatggcgtggaggtgcacaacgccaagaccaagccccgagaggagcagtacaattccacctaccgggtggtgtccgtgctaaccgtgctgcatcaggattggctgaatggcaaggagtataaatgcaaggtgagcaacaaggccctccccgcccccatcgagaagaccatcagtaaggccaaaggacaacccagggagccccaggtgtacacgctgcccccaagcagggaggaaatgaccaaaaaccaggtgagcctcacctgcctggtgaagggtttttaccccagcgatatcgcagtggagtgggagagcaacggccagcccgagaacaattacaagacgacccctcccgtgctggacagcgacgggagcttctttctctacagcaagctgaccgtggacaagagcaggtggcagcagggtaatgtgtttagctgcagcgtgatgcacgaggcgctgcacaaccactacacccagaaaagcctgagcctgtcccccgggaag

SEQ ID NO: 471 - protein, 288 aa, synthetic construct
  REGION 1..288: note = Human CD80, isoform 1 protein sequence
  SIGNAL 1..34
MGHTRRQGTSPSKCPYLNFFQLLVLAGLSHFCSGVIHVTKEVKEVATLSCGHNVSVEELAQTRIYWQKEKKMVLTMMSGDMNIWPEYKNRTIFDITNNLSIVILALRPSDEGTYECVVLKYEKDAFKREHLAEVTLSVKADFPTPSISDFEIPTSNIRRIICSTSGGFPEPHLSWLENGEELNAINTTVSQDPETELYAVSSKLDFNMTTNHSFMCLIKYGHLRVNQTFNWNTTKQEHFPDNLLPSWAITLISVNGIFVICCLTYCFAPRCRERRRNERLRRESVRPV

SEQ ID NO: 472 - DNA, 1056 bp, synthetic construct
  misc_feature 1..1056: note = Human CD80, isoform 1 nucleic acid sequence
  sig_peptide 1..102
  source 1..1056: mol_type = other DNA
atgggccacacacggaggcagggaacatcaccatccaagtgtccatacctcaatttctttcagctcttggtgctggctggtctttctcacttctgttcaggtgttatccacgtgaccaaggaagtgaaagaagtggcaacgctgtcctgtggtcacaatgtttctgttgaagagctggcacaaactcgcatctactggcaaaaggagaagaaaatggtgctgactatgatgtctggggacatgaatatatggcccgagtacaagaaccggaccatctttgatatcactaataacctctccattgtgatcctggctctgcgcccatctgacgagggcacatacgagtgtgttgttctgaagtatgaaaaagacgctttcaagcgggaacacctggctgaagtgacgttatcagtcaaagctgacttccctacacctagtatatctgactttgaaattccaacttctaatattagaaggataatttgctcaacctctggaggttttccagagcctcacctctcctggttggaaaatggagaagaattaaatgccatcaacacaacagtttcccaagatcctgaaactgagctctatgctgttagcagcaaactggatttcaatatgacaaccaaccacagcttcatgtgtctcatcaagtatggacatttaagagtgaatcagaccttcaactggaatacaaccaagcaagagcattttcctgataacctgctcccatcctgggccattaccttaatctcagtaaatggaatttttgtgatatgctgcctgacctactgctttgccccaagatgcagagagagaaggaggaatgagagattgagaagggaaagtgtacgccctgtataacagtgtccgcagaagcaaggggctgaaaagatctgaaggtcccacctccatttgcaattgacctcttctgggaacttcctcagatggacaagattaccccaccttgccctttacgtatctgctcttaggtgcttcttcacttcagttgctttgcaggaagtgtctagaggaatatggtgggcacagaag

SEQ ID NO: 473 - protein, 468 aa, synthetic construct
  REGION 1..468: note = CD80Fc construct, protein sequence
  SIGNAL 1..34
MGHTRRQGTSPSKCPYLNFFQLLVLAGLSHFCSGVIHVTKEVKEVATLSCGHNVSVEELAQTRIYWQKEKKMVLTMMSGDMNIWPEYKNRTIFDITNNLSIVILALRPSDEGTYECVVLKYEKDAFKREHLAEVTLSVKADFPTPSISDFEIPTSNIRRIICSTSGGFPEPHLSWLENGEELNAINTTVSQDPETELYAVSSKLDFNMTTNHSFMCLIKYGHLRVNQTFNWNTTKQEHFPDDKTHTCPPCPAPELLGGPSVFLFPPKPKDTLMISRTPEVTCVVVDVSHEDPEVKFNWYVDGVEVHNAKTKPREEQYNSTYRVVSVLTVLHQDWLNGKEYKCKVSNKALPAPIEKTISKAKGQPREPQVYTLPPSRDELTKNQVSLTCLVKGFYPSDIAVEWESNGQPENNYKTTPPVLDSDGSFFLYSKLTVDKSRWQQGNVFSCSVMHEALHNHYTQKSLSLSPGK

SEQ ID NO: 474 - DNA, 1404 bp, synthetic construct
  misc_feature 1..1404: note = CD80Fc, nucleic acid sequence
  sig_peptide 1..102
  source 1..1404: mol_type = other DNA
atgggccacacacggaggcagggaacatcaccatccaagtgtccatacctcaatttctttcagctcttggtgctggctggtctttctcacttctgttcaggtgttatccacgtgaccaaggaagtgaaagaagtggcaacgctgtcctgtggtcacaatgtttctgttgaagagctggcacaaactcgcatctactggcaaaaggagaagaaaatggtgctgactatgatgtctggggacatgaatatatggcccgagtacaagaaccggaccatctttgatatcactaataacctctccattgtgatcctggctctgcgcccatctgacgagggcacatacgagtgtgttgttctgaagtatgaaaaagacgctttcaagcgggaacacctggctgaagtgacgttatcagtcaaagctgacttccctacacctagtatatctgactttgaaattccaacttctaatattagaaggataatttgctcaacctctggaggttttccagagcctcacctctcctggttggaaaatggagaagaattaaatgccatcaacacaacagtttcccaagatcctgaaactgagctctatgctgttagcagcaaactggatttcaatatgacaaccaaccacagcttcatgtgtctcatcaagtatggacatttaagagtgaatcagaccttcaactggaatacaaccaagcaagagcattttcctgatgacaaaactcacacatgcccaccgtgcccagcacctgaactcctggggggaccgtcagtcttcctcttccccccaaaacccaaggacaccctcatgatctcccggacccctgaggtcacatgcgtggtggtggacgtgagccacgaagaccctgaggtcaagttcaactggtacgtggacggcgtggaggtgcataatgccaagacaaagccgcgggaggagcagtacaacagcacgtaccgggtggtcagcgtcctcaccgtcctgcaccaggactggctgaatggcaaggagtacaagtgcaaggtctccaacaaagccctcccagcccccatcgagaaaaccatctccaaagccaaagggcagccccgagaaccacaggtgtacaccctgcccccatcccgggatgagctgaccaagaaccaggtcagcctgacctgcctggtcaaaggcttctatcccagcgacatcgccgtggagtgggagagcaatgggcagccggagaacaactacaagaccacgcctcccgtgctggactccgacggctccttcttcctctacagcaagctcaccgtggacaagagcaggtggcagcaggggaacgtcttctcatgctccgtgatgcatgaggctctgcacaaccactacacgcagaagagcctctccctgtctccgggtaaa

SEQ ID NO: 475 - protein, 4 aa, synthetic construct
  REGION 1..4: note = amino acids of the TM domain
DKTH

SEQ ID NO: 476 - protein, 5 aa, synthetic construct
  REGION 1..5: note = amino acids of the TM domain
DKTHT

SEQ ID NO: 477 - protein, 6 aa, synthetic construct
  REGION 1..6: note = amino acids of the TM domain
DKTHTC

SEQ ID NO: 478 - protein, 7 aa, synthetic construct
  REGION 1..7: note = amino acids of the TM domain
DKTHTCP

SEQ ID NO: 479 - protein, 4 aa, synthetic construct
  REGION 1..4: note = amino acids of the CP domain
FAPR

SEQ ID NO: 480 - protein, 5 aa, synthetic construct
  REGION 1..5: note = amino acids of the CP domain
FAPRC

SEQ ID NO: 481 - protein, 6 aa, synthetic construct
  REGION 1..6: note = amino acids of the CP domain
FAPRCR

SEQ ID NO: 482 - protein, 7 aa, synthetic construct
  REGION 1..7: note = amino acids of the CP domain
FAPRCRE

SEQ ID NO: 483 - protein, 8 aa, synthetic construct
  REGION 1..8: note = amino acids of the CP domain
FAPRCRER

SEQ ID NO: 484 - protein, 9 aa, synthetic construct
  REGION 1..9: note = amino acids of the CP domain
FAPRCRERR

SEQ ID NO: 485 - protein, 10 aa, synthetic construct
  REGION 1..10: note = amino acids of the CP domain
FAPRCRERRR

SEQ ID NO: 486 - protein, 11 aa, synthetic construct
  REGION 1..11: note = amino acids of the CP domain
FAPRCRERRRN

SEQ ID NO: 487 - protein, 12 aa, synthetic construct
  REGION 1..12: note = amino acids of the CP domain
FAPRCRERRRNE

SEQ ID NO: 488 - protein, 13 aa, synthetic construct
  REGION 1..13: note = amino acids of the CP domain
FAPRCRERRRNER

SEQ ID NO: 489 - protein, 14 aa, synthetic construct
  REGION 1..14: note = amino acids of the CP domain
FAPRCRERRRNERL

SEQ ID NO: 490 - protein, 15 aa, synthetic construct
  REGION 1..15: note = amino acids of the CP domain
FAPRCRERRRNERLR

SEQ ID NO: 491 - protein, 16 aa, synthetic construct
  REGION 1..16: note = amino acids of the CP domain
FAPRCRERRRNERLRR

SEQ ID NO: 492 - protein, 17 aa, synthetic construct
  REGION 1..17: note = amino acids of the CP domain
FAPRCRERRRNERLRRE

SEQ ID NO: 493 - protein, 18 aa, synthetic construct
  REGION 1..18: note = amino acids of the CP domain
FAPRCRERRRNERLRRES

SEQ ID NO: 494 - protein, 19 aa, synthetic construct
  REGION 1..19: note = amino acids of the CP domain
FAPRCRERRRNERLRRESV

SEQ ID NO: 495 - protein, 20 aa, synthetic construct
  REGION 1..20: note = amino acids of the CP domain
FAPRCRERRRNERLRRESVR

SEQ ID NO: 496 - protein, 21 aa, synthetic construct
  REGION 1..21: note = amino acids of the CP domain
FAPRCRERRRNERLRRESVRP

SEQ ID NO: 497 - protein, 22 aa, synthetic construct
  REGION 1..22: note = amino acids of the CP domain
FAPRCRERRRNERLRRESVRPV

SEQ ID NO: 498 - DNA, 1404 bp, synthetic construct
  misc_feature 1..1404: note = CD80_Fc-CO01
  source 1..1404: mol_type = other DNA
atgggccacacgaggcgccagggcaccagccccagcaagtgcccgtaccttaatttcttccaacttctcgtcctcgccggcctcagccacttttgctccggcgtcatccacgtcaccaaggaggtcaaggaggttgccaccctctcgtgcgggcacaacgtgtccgtcgaggagctcgcccagaccaggatctactggcagaaagagaagaagatggtcctcaccatgatgagcggcgacatgaatatctggcccgagtacaaaaataggaccatcttcgacatcacgaataatctttccatcgtgatcctggcgctgaggccgagcgatgagggcacctacgaatgcgtggtgctgaaatacgagaaggacgccttcaagcgggagcaccttgcggaagtgaccctgtccgtgaaggcggattttccgacccccagcatcagcgatttcgagatccctaccagcaacatccggaggatcatctgctccacctccggcggcttccccgagccccacctgtcctggctggaaaatggggaggagctcaacgccatcaacaccaccgtgtcccaggaccccgagacggagctgtacgccgtgagctccaaactggatttcaacatgaccaccaaccactccttcatgtgtctgatcaaatacggccacctgcgcgtgaaccaaaccttcaattggaacaccaccaagcaggagcacttccccgacgacaagacccacacctgcccgccgtgccccgcccccgagctgcttggagggccgagcgtgttcctgttcccgcccaagcccaaggacaccctgatgatctcccgaacccccgaggtcacctgcgtggtggtggatgtgagccacgaggaccccgaggtgaagttcaactggtacgtggacggcgtggaggtccacaatgccaagacgaagcccagggaggagcaatacaactccacttacagggtcgtcagcgtgctgaccgtgctccaccaggactggctcaacggcaaggagtacaagtgtaaggtcagcaacaaggccctgcccgcacccatcgagaagaccatcagcaaggccaaaggccaaccccgcgagccccaggtgtacaccctgccccctagcagggacgaactgaccaagaaccaggtgagcctgacctgcctggtgaaggggttctaccccagcgatatcgccgtggagtgggagtccaatggccagcccgaaaacaattacaagaccacgccgcccgtcctggacagcgatggcagcttcttcctgtacagcaagctgaccgtcgacaagtccaggtggcagcagggcaacgtgttttcctgcagcgtgatgcacgaggccctgcacaaccactacacccaaaaatccctcagcctgtccccgggcaag

SEQ ID NO: 499 - DNA, 1404 bp, synthetic construct
  misc_feature 1..1404: note = CD80_Fc-CO02
  source 1..1404: mol_type = other DNA
atgggccacacccgcaggcaggggacctccccctccaagtgcccctacctcaactttttccagctactcgtactcgcagggctcagccacttttgctccggagtgatccacgtcaccaaggaggttaaagaggtcgccactctcagctgtggacacaacgtctccgtcgaggaactagcccagacaaggatctactggcagaaggagaagaagatggttctcaccatgatgagcggagacatgaacatctggcccgagtacaagaaccgtaccatcttcgacatcaccaacaatctcagcatcgtgatcctggccctcaggccctccgatgagggcacctacgagtgcgtcgtgctgaagtacgagaaagacgccttcaagagggaacacctggccgaggtgaccctgtccgtgaaggccgacttccctacccccagcattagcgacttcgagatcccaacctccaacatacggcgtattatctgcagcactagcgggggcttccccgagccccacctgtcctggctggaaaacggcgaggagctgaacgccatcaacaccaccgtcagccaggatcccgagacagagctgtacgccgtgagctcgaagctggacttcaacatgacgaccaaccactccttcatgtgcctgatcaagtatggccacctgagggtcaaccagaccttcaactggaacaccaccaagcaagagcacttcccggacgataagacccacacctgccccccgtgcccggcccccgagctgctcggcgggcccagcgtgttcctgttccctcccaaacccaaggacacgctgatgatcagccggacccccgaggtgacgtgtgttgtcgtggacgtgagccacgaggaccccgaagtgaagtttaactggtacgtggatggggtggaggtgcacaacgccaaaaccaagcccagggaggagcagtacaatagcacctatagggtggtatcggtgctgaccgtgctgcaccaggactggctgaacggcaaggagtacaagtgcaaggtgagcaataaggccctcccggcccccatcgagaagaccatcagcaaggccaaggggcagcccagggaaccccaggtgtacaccctgcccccatcccgggacgagctcaccaagaaccaggtgagcctgacctgcctggtgaagggattctacccaagcgatatcgccgtggagtgggagtccaacgggcagccggagaacaactacaagaccaccccacccgtgctggactccgacggcagcttcttcctgtactccaagctgaccgtggacaagagccgctggcagcagggaaatgtgttcagctgcagcgtgatgcacgaggccctgcacaatcactacacccagaaaagcctcagcctgagcccgggcaag

SEQ ID NO: 500 - DNA, 1404 bp, synthetic construct
  misc_feature 1..1404: note = CD80_Fc-CO03
  source 1..1404: mol_type = other DNA
atgggccacaccaggaggcagggcaccagcccgagcaagtgcccatatctcaactttttccagctcctcgtactcgccggactaagccatttctgcagcggggtcatccacgtcaccaaggaggtcaaggaggtcgccacgctcagctgcgggcacaacgtcagcgtcgaggagctcgcccagaccagaatctactggcagaaagagaagaagatggtcctcactatgatgagcggcgacatgaacatctggccagaatacaagaaccggaccatcttcgacatcaccaacaacctcagcatcgtgatccttgcgctgcggccctccgacgaagggacctacgagtgcgtggtgctgaagtatgagaaggacgcctttaaacgcgagcacctggccgaggtgacgctgtccgtgaaggccgactttcccaccccgtccatcagcgacttcgagatccccaccagcaatatccgccggatcatctgctccacctccgggggctttcccgagccacacctgtcctggctggagaacggcgaggagctgaatgccatcaacaccacggtgagccaggaccccgagacggagctctacgccgtgagcagcaagctggacttcaacatgaccaccaaccacagcttcatgtgcctgatcaagtatggccacctgcgtgtgaaccaaacctttaattggaacaccaccaagcaggagcacttccccgacgacaaaacgcacacctgcccgccctgccccgcccccgagctgctgggcgggccgagcgtgttcctgttccctcccaagcccaaagacaccctgatgatcagcaggacgccggaggtgacctgtgtcgtggtggacgtgagccacgaggaccccgaggtgaagttcaactggtacgtcgacggggtggaggtgcacaacgccaagacgaagcccagggaggagcagtataacagcacctacagggtggtgagcgtgctgaccgtgctgcaccaggattggctgaacggcaaagagtacaagtgtaaggtgagcaacaaggccctgcccgcacccatcgagaagaccatcagcaaggccaaggggcagcccagggaaccccaagtgtataccctgccgccgtcccgggatgagctgaccaagaaccaggtgtccctcacctgcctggtgaagggattctaccccagcgatatcgctgttgagtgggagagcaatggccagcccgagaacaactacaagacgacgcccccggtgctggatagtgacgggagcttctttctgtacagcaaactgaccgtggataagtccaggtggcagcagggcaacgtgttcagctgctccgtgatgcacgaggccctgcacaatcattacacccagaagtccctgagcctgagcccgggcaaa

SEQ ID NO: 501 - DNA, 1404 bp, synthetic construct
  misc_feature 1..1404: note = CD80_Fc-CO04
  source 1..1404: mol_type = other DNA
atggggcataccaggcgacaaggcacgagcccctcaaagtgtccctacctcaacttcttccagcttctcgtcctcgccggcctcagccacttctgcagcggcgtaatccacgtcaccaaggaggtcaaggaggtcgccactcttagctgcggccacaacgtcagcgtcgaagaacttgcccagacgaggatctattggcagaaggagaagaagatggtactcaccatgatgagcggcgacatgaacatctggcccgagtacaagaacaggacgatcttcgacataaccaacaacctcagcatcgtcatcctggccctgaggccaagcgacgagggaacctacgaatgcgtggtgctcaaatacgagaaagatgccttcaagcgggagcacctggccgaggtgaccctgtccgtgaaggccgacttccctacccccagcatctcggacttcgagatccccacgagcaacatccgcaggatcatttgcagcaccagcggggggttccccgagccccacctcagctggctggagaacggcgaagaactcaacgccatcaacaccaccgtgagccaggaccccgagacggagctgtacgcggtgtcctcgaagctcgatttcaacatgacgacgaaccatagcttcatgtgcctcatcaagtacggtcacctcagggtgaaccagaccttcaactggaacacgaccaagcaggagcacttccccgacgacaagacccacacctgcccgccctgccccgcccccgagctgctgggtggccccagcgtgtttctgttcccgcccaagcccaaggacaccctgatgatctccaggacccccgaggtaacctgcgtggtggtggacgtgagccacgaggaccccgaggtgaagttcaactggtacgtggacggcgtggaggtgcacaacgccaaaaccaagcccagggaggagcagtacaacagcacctaccgcgtggtatccgtgctgactgtgctgcaccaagactggctgaacggaaaggagtacaagtgcaaggtgtccaacaaggctctgcccgcccccatcgagaagacaatcagcaaggccaagggccagccccgggagccccaggtgtacaccctccctccctccagggacgagctcaccaagaaccaggtgtccctgacctgtctggtgaagggcttctacccgagcgacatagccgtggagtgggagagcaatggccagccggagaacaactacaagaccaccccacccgtgctggacagcgacgggagcttcttcctgtactccaagctcacggtggacaagagcaggtggcagcagggcaacgtgttcagctgcagcgtgatgcacgaggccctgcataaccactacacccagaagtcgctgagcctgtccccgggcaag

SEQ ID NO: 502 - DNA, 1404 bp, synthetic construct
  misc_feature 1..1404: note = CD80_Fc-CO05
  source 1..1404: mol_type = other DNA
atgggccacaccaggcgacagggcaccagccccagcaagtgcccctatctcaacttcttccagctcctagtcctcgccggcctttcacacttctgtagcggggtcatccacgtcaccaaagaggtcaaggaggtcgccacactcagctgtggccataacgtatccgtcgaggagctcgcccagaccaggatctactggcagaaggaaaagaagatggtcctcaccatgatgagcggcgacatgaacatctggcccgagtataaaaaccggaccatcttcgacatcaccaacaacctcagcatcgtgatcctggccctcaggcccagcgatgaggggacctacgagtgcgtggtgctgaagtacgagaaggacgccttcaagcgggaacacctggccgaggtgaccctgagcgtgaaggccgatttccccaccccgagcatcagcgacttcgagatccccacctccaacatccggcgaatcatctgcagcacctcaggaggctttcccgagccccacctgagctggctggagaatggggaggagctgaacgccatcaacaccaccgtcagccaggaccccgagacggagctgtacgccgtgtcatccaaactggacttcaacatgaccacgaaccactcattcatgtgcctgatcaagtacgggcacctgcgcgtgaaccagacgttcaactggaacaccacgaaacaggagcacttccccgacgacaagacacacacctgcccgccctgccccgcccccgagctgctgggcggccctagcgtgttcctcttccccccaaagcccaaggacaccctgatgatctccaggacaccggaagtgacctgcgtcgtcgtagacgtcagtcacgaggaccccgaggtgaagttcaactggtacgtggacggcgtggaggtccacaacgcgaagaccaagccccgggaggaacagtacaacagcacgtaccgggtggtgagcgtgctgaccgtgctgcatcaggattggctgaacggcaaggagtacaagtgcaaggtgagcaacaaggccctgccggccccgatcgagaagaccatcagcaaggccaagggccagccccgcgagccccaggtgtacaccctgcccccttcccgcgacgagctcaccaagaatcaggtgtccctgacatgcctggtgaagggcttctacccgagcgacatcgcggtggaatgggaaagcaacggccaacccgagaacaactacaagaccacccctcccgtgctggactccgacggcagcttcttcctgtactccaagctcaccgtggacaagtccaggtggcagcaggggaatgtgttctcctgcagcgtgatgcacgaggccctgcacaaccactacacacagaaaagcctgagcctgagccccggcaag

SEQ ID NO: 503 - DNA, 1404 bp, synthetic construct
  misc_feature 1..1404: note = CD80_Fc-CO06
  source 1..1404: mol_type = other DNA
atgggccacaccaggaggcagggcaccagcccctccaagtgcccgtacctcaatttcttccagctcctcgtcctcgcggggttaagccacttttgctcaggcgtcatccacgtcaccaaggaggtcaaagaggtcgccaccctcagctgcggccacaacgtcagcgtagaggagcttgcccagaccaggatatactggcagaaagagaagaagatggtactcaccatgatgagcggcgacatgaacatctggcccgaatacaaaaaccggaccatcttcgacattaccaacaatctctccatcgtgatcctggccctcaggccctccgacgaggggacctacgagtgtgtggtactgaagtacgagaaggacgccttcaagcgggagcacctggccgaagtcaccctgtccgtgaaggccgacttcccgacacccagcatcagcgactttgaaatccccaccagcaatatcaggaggatcatctgctcgaccagcggcggcttccccgagccccacctgtcatggctggagaacggcgaggagctgaacgccatcaacaccaccgtctcgcaggacccggagacagagctgtacgccgtgtccagcaagctggacttcaacatgaccacaaatcacagcttcatgtgcctgatcaagtacggccacctgagggtcaaccaaaccttcaactggaacacgaccaaacaagagcactttccggatgacaagacacacacctgcccgccctgccccgcccccgagctgctgggcgggcccagcgtgttcctcttcccgcccaagcccaaggacaccctgatgatctcccgcacccccgaggtgacctgcgtggtggtggacgtgtcccatgaggatcccgaggtgaagtttaactggtacgtggacggcgtggaagtgcataacgccaagaccaagcccagggaggagcaatataacagcacctacagggtggtgagcgtgctgaccgtgctgcatcaagattggctcaacggcaaggagtacaagtgcaaggtcagcaacaaggccctgcccgcgccgatcgagaagaccatcagcaaagccaaggggcagcccagggagccccaagtgtacacgctcccgcccagcagggacgagctgaccaaaaaccaggttagcctgacctgcctggtgaagggcttctacccctccgacattgccgtggagtgggagtcaaacgggcagccggagaacaattacaagacgacccctcccgtgctggacagcgacgggtccttcttcctgtatagcaagctcaccgtggataagagcaggtggcagcagggcaacgtcttctcgtgcagcgtgatgcacgaggccctgcacaaccattacacccagaaaagcctgtcgctgtcccccgggaag

SEQ ID NO: 504 - DNA, 1404 bp, synthetic construct
  misc_feature 1..1404: note = CD80_Fc-CO07
  source 1..1404: mol_type = other DNA
atgggccacaccaggcgccagggcacaagccccagcaagtgcccctacctcaacttcttccagctcctcgtcctcgccgggctaagccacttctgctcaggcgtaattcacgtcaccaaggaggtcaaggaggtcgccaccctcagctgcggccacaacgtctccgtcgaggagttggcccagaccaggatctactggcagaaggaaaagaaaatggtcctcaccatgatgagcggggacatgaacatctggcccgaatacaaaaaccgcaccatcttcgacatcaccaacaacctcagcatcgtgatcctggcccttcggccgtccgacgagggcacctacgagtgcgtggtgctgaagtacgagaaggacgccttcaagagggagcacctggccgaggtgaccctgagcgtgaaggccgatttccccactcccagcatcagcgacttcgagatccccaccagcaacatccggaggataatctgcagcaccagcgggggctttcccgagccccacctcagctggctcgagaacggcgaggagctgaacgccataaacacgaccgtgagccaggaccccgagactgagctgtacgccgtcagcagcaagctggacttcaacatgacgaccaatcactcgttcatgtgtctgattaagtatggacatctgagggtgaaccagaccttcaattggaacaccaccaagcaggagcacttccccgacgataagacccacacctgcccgccctgccccgccccggaactgctggggggccccagcgtgttcctgttcccgcccaagcccaaggacaccctgatgatcagcaggacacccgaggtgacctgcgtggttgtggacgtgtcccatgaggatcccgaggtgaagttcaactggtacgtagacggggtggaggtgcacaatgccaagaccaagccccgcgaggagcagtacaacagcacctaccgggtggtgtccgtgctgaccgtcctgcaccaggactggctgaacggcaaggagtacaaatgcaaggtgagcaacaaggccctgcccgcgcccatcgaaaagacgatcagcaaggccaaagggcagccccgggagccccaggtgtacacgctgccgcccagccgcgatgagctgacgaaaaaccaagtgagcctcacgtgcctggtcaagggcttctacccctccgatatcgcagtggagtgggagagcaacggccagcccgagaacaactacaagaccacgcccccggtgctggactccgacggctcgttcttcctgtacagcaagctgacggttgacaagtccaggtggcagcaggggaacgtgtttagctgcagcgtgatgcacgaggccctccataaccactacacgcagaagtccctgtccctgagccccggcaag

SEQ ID NO: 505 - DNA, 1404 bp, synthetic construct
  misc_feature 1..1404: note = CD80_Fc-CO08
  source 1..1404: mol_type = other DNA
atgggccacaccaggcggcagggcaccagccccagcaagtgcccctacctcaacttttttcagcttttggtcctcgccggcctaagccatttttgctccggggtcatccacgtgaccaaggaggtaaaggaggtcgccaccctcagctgcggacacaacgtcagcgtagaggagctcgcccagacccgaatctactggcaaaaggagaagaagatggtcctcaccatgatgtccggcgatatgaacatctggccggagtacaaaaataggacaatcttcgatatcaccaacaacctaagcatcgtgatcctggcgctgcggcccagcgatgaaggcacgtacgaatgcgtggtgctgaagtacgaaaaggacgcctttaagagggagcacctggccgaggtgaccctcagcgtgaaggccgacttccccaccccctccatcagcgacttcgagatacccaccagcaacatccgacggattatctgcagcaccagcgggggcttccccgaaccccacctgtcctggctggagaacggcgaggagctgaacgccatcaacaccaccgtgagccaggatcccgagacagagctctacgcggtgagcagcaagctggacttcaacatgaccacaaaccacagcttcatgtgcctcatcaagtatggccatctgagggtgaaccagaccttcaactggaacaccaccaaacaggagcacttcccggacgacaagacccacacctgcccaccctgccccgcccccgagctgctgggtggccccagcgtgtttctgttccccccgaagcccaaagatacactgatgatcagccgaaccccagaggtgacgtgtgtggtggtcgacgtgagccacgaggacccggaggtcaaattcaactggtacgtggacggcgtggaggtgcacaacgccaagaccaaacccagagaggagcagtacaacagcacgtaccgtgtggtcagcgtgctgaccgtgctgcaccaggactggctgaacggcaaggagtacaagtgcaaggtgagcaataaggcgctgcccgcccccatcgagaaaaccatctccaaagccaagggccaaccccgggagcctcaggtgtacaccctgccgcccagcagggacgagctgaccaagaaccaggtgtccctgacctgcctggtgaaaggcttctatcccagcgacatcgctgtggagtgggagtccaacgggcaacccgagaacaactacaagaccaccccgcccgtactggactcggatggcagcttcttcctgtactcgaagctgaccgtggacaaaagcaggtggcagcagggaaacgtgttctcatgcagcgtcatgcacgaggccctccacaaccactacacccagaaatccctgagcctgagccccggcaaa

SEQ ID NO: 506 - DNA, 1404 bp, synthetic construct
  misc_feature 1..1404: note = CD80_Fc-CO09
  source 1..1404: mol_type = other DNA
atgggccacaccaggcgccaaggcaccagcccctcaaagtgcccctacctcaacttcttccagctcctcgtactcgcggggctcagccacttctgctcgggcgtgatccacgttaccaaggaggtcaaagaggtcgcgaccctctcctgtggccacaacgtctccgtcgaggagcttgcccagacccgaatctactggcagaaggagaaaaagatggtcctcacgatgatgagcggagacatgaacatctggccggagtataagaaccggaccatcttcgacatcaccaacaacctcagcatcgtcatcctggccctgcgtccatccgatgaggggacctacgagtgcgtggtcctcaagtatgaaaaggacgccttcaagcgggagcacctggccgaggtcaccctgagtgtcaaggccgacttccctacccccagcatcagtgacttcgagatccccacttccaacataaggaggatcatctgctccaccagcggaggcttccccgagccccacctgagctggctggagaacggcgaggagctgaacgccatcaataccaccgttagccaggaccccgagacggagctgtacgccgtgagcagcaagctggacttcaacatgaccaccaatcactcattcatgtgcctcattaagtacggccacctgagggtcaaccagaccttcaactggaacaccaccaagcaggagcacttcccggatgataagacccacacctgcccgccctgccccgccccagagctgctgggcggccccagcgtcttcctgttcccgcccaagcctaaggacaccctcatgatcagccggacccccgaggtaacctgcgtggtggtggacgtaagccacgaggatcccgaggtgaagttcaactggtacgtcgacggggtggaggtgcataacgcgaagaccaaaccccgcgaagaacagtacaacagcacctacagggtcgttagtgtgctcaccgtgctccaccaggattggctgaacgggaaagagtacaagtgcaaggtgtccaacaaagcactccccgcccccatcgagaagaccatctccaaggccaagggccagccgagggaacctcaggtctacaccctgccccccagcagggacgagctgaccaagaaccaggtgagcctgacctgcctggtgaagggcttctacccgagcgacatcgcggtggaatgggagtccaacggccagcccgagaacaactataagaccacgccccccgtgctcgactccgacggcagcttcttcctgtattccaagctgaccgtggacaagtcgaggtggcagcaaggtaacgtgttctcctgcagcgtgatgcacgaggccctccacaatcattacacccagaagtcgctgagcctgagtccgggtaaa

SEQ ID NO: 507 - DNA, 1404 bp, synthetic construct
  misc_feature 1..1404: note = CD80_Fc-CO10
  source 1..1404: mol_type = other DNA
atggggcacacccggcgacagggcacgagccccagcaagtgcccctacctcaacttcttccaactcctcgttctcgccggcctctcgcacttttgctcgggcgtcatccacgtcaccaaggaagttaaggaggtcgccaccctctcctgcggccacaacgtctccgtcgaggaactcgcgcagacccgcatatactggcaaaaggaaaagaagatggtcctcacgatgatgagcggagacatgaacatttggcccgagtacaagaaccgcaccatcttcgacatcaccaacaacctctccatagtgatcctggccctgcggcccagcgacgaggggacctatgagtgcgtggtgctgaagtacgaaaaggacgccttcaagagggagcacctggccgaggtgaccctgagcgtgaaggccgatttccccacccccagcatcagcgacttcgaaatccccaccagcaacatcaggcggataatctgcagcaccagcggcggcttccccgagccccacctgagctggctggagaatggggaggaactgaacgccattaacaccacagtcagccaagatcccgagacagagctctacgccgtgtcctcgaagctggacttcaacatgaccaccaaccacagcttcatgtgcctgatcaaatacgggcacctgcgggtgaaccaaaccttcaactggaacaccaccaagcaggagcacttccccgacgacaagacgcatacgtgcccaccctgccccgcccccgagctcctcggcggccccagcgtgttcttattcccgcccaagcccaaggacaccctgatgatctcccggacgccggaggtgacgtgtgtggtcgtggacgtgagccacgaggacccggaggtgaagtttaattggtacgtggacggggtggaggtgcacaacgcgaagaccaagcccagggaggagcagtacaacagcacctaccgcgtggtgagcgtgctgaccgtactgcaccaggactggctcaatggcaaggagtacaagtgcaaggtgtccaacaaggccctgcccgctccgatcgaaaaaacgatcagcaaggcgaaagggcagcccagggaaccccaggtctacaccctgccgcccagccgcgacgaactgaccaagaaccaggtgtcactgacctgcctggtgaaggggttctatccgtcggacatcgcggtggagtgggagtccaacggccaacccgagaacaattacaaaaccaccccgcccgtgctggacagcgacgggagcttctttctgtattccaagttaacagtcgacaagagcaggtggcagcagggcaacgtgttctcctgcagcgtcatgcacgaggccctccacaaccactacacccagaaaagcttgagcctgtcccccggcaag

SEQ ID NO: 508 - DNA, 1404 bp, synthetic construct
  misc_feature 1..1404: note = CD80_Fc-CO11
  source 1..1404: mol_type = other DNA
atggggcacacaaggaggcaaggcaccagccccagcaagtgcccgtacctaaactttttccagctcctcgtcctcgcaggcctaagccacttttgctccggcgtcatacacgtcaccaaggaggtaaaggaggtcgcaaccctaagctgcggccacaacgtgtccgtcgaggagttagcccagaccagaatctactggcaaaaagagaagaagatggtccttacgatgatgtcaggcgacatgaacatctggccggagtacaagaaccggactatcttcgacatcaccaataaccttagcatcgtgatcctggccctcaggccctccgacgagggcacctacgagtgcgtcgtgctgaaatacgagaaggatgccttcaagagggagcacctggccgaggtgaccctgagcgtgaaggccgacttcccgaccccgagcatctccgatttcgagatcccgaccagcaacataaggaggatcatttgcagcacctccggcggcttccccgagccgcacctgagctggctcgagaatggcgaggagctgaatgccatcaacaccaccgtgagccaggacccggagacggaactctatgcggtgagcagcaagctcgacttcaacatgacgacgaaccactccttcatgtgcctgatcaagtacggccatctgcgggtgaaccagaccttcaactggaacaccaccaagcaggagcacttccccgatgacaagacgcacacctgcccgccgtgccccgccccggagctgctggggggccccagcgtcttcctgttcccgcccaagcccaaggataccctgatgatctccaggacgcccgaggtgacctgcgtcgtggttgacgtatcccacgaggaccccgaagtgaaattcaactggtatgtggacggggtagaggtgcacaacgctaaaactaagccgcgggaggagcagtacaatagcacctatcgagtggtgagcgtgctgaccgtgctgcaccaggactggctgaacgggaaggagtataagtgcaaggtgtcgaacaaagccctgcccgcccccatcgagaagaccatctcgaaagccaagggccagcccagggagccccaggtctacacgctgcccccctcccgggacgagctcaccaagaatcaggtgagcctgacctgtctggtcaaggggttctacccctccgacatcgcggtggagtgggagagcaacggccaacccgagaacaactataagaccacgccgcccgtgctggactccgacgggtccttctttctgtactccaagctcaccgtggataagtcccgctggcagcagggcaacgtgttcagctgcagcgtgatgcacgaggccctccacaaccactacacccagaaaagcctgagcctgagcccgggcaag

SEQ ID NO: 509 - DNA, 1404 bp, synthetic construct
  misc_feature 1..1404: note = CD80_Fc-CO12
  source 1..1404: mol_type = other DNA
atgggccacaccaggagacagggcaccagccccagcaagtgcccctatctcaacttcttccagctcctcgtacttgccggcctttcgcacttctgctccggagtcatccacgtaaccaaggaggttaaggaggtcgccaccctcagctgtgggcacaacgtcagcgtcgaggagctagcccagaccaggatctactggcaaaaggagaagaagatggtactcaccatgatgtccggagacatgaacatttggcccgagtacaagaataggaccatcttcgatatcacgaacaacctctccatcgtgatcctggccctcaggcccagcgacgaaggcacctacgagtgcgtggtgctgaagtacgaaaaggacgccttcaagagggagcacctggccgaggtgaccctgagcgtgaaggccgacttccccaccccaagcatcagcgacttcgagattccgaccagcaacatcaggcgcatcatctgcagcaccagcggcggctttcccgagccgcatctgagctggctggagaacggcgaggagctgaacgccatcaacacgaccgtgagccaggatcccgagacggagctgtacgccgtcagctccaagctggacttcaacatgaccaccaaccacagctttatgtgcctgatcaagtacgggcatctgcgggtgaaccagacctttaactggaacaccaccaagcaggagcattttccggacgacaagacccacacgtgtcccccctgccccgctcccgagctgctcggcggcccctccgtcttcctgttccctcccaagcccaaggacaccctgatgatctccaggacccccgaggtcacctgtgtggtggtggatgtgtcccacgaggaccccgaggtgaagttcaattggtacgtggacggcgtggaggtgcacaacgccaaaaccaagccccgggaggagcagtacaattccacctacagggttgtgagcgtcctcaccgtgctgcaccaggactggctcaatgggaaggagtacaagtgcaaggtcagcaacaaggccctgcccgcccccatcgagaagacgatcagcaaggccaaagggcagccccgcgagccccaggtctataccctgccccccagccgggatgagctgaccaagaaccaggtgtctctgacatgcctggtgaaggggttctatcccagcgacatcgccgtggagtgggagagcaacgggcaacccgagaacaactataagacgactccccccgtcctggactccgacggcagcttcttcctgtactccaagctgaccgtggacaagtccaggtggcagcaggggaacgtgtttagctgcagcgtcatgcacgaggccctgcacaaccactatacacagaaaagcctgagcctgtcacccgggaag

SEQ ID NO: 510 - DNA, 1404 bp, synthetic construct
  misc_feature 1..1404: note = CD80_Fc-CO13
  source 1..1404: mol_type = other DNA
atgggccacaccaggcgccaaggaaccagcccctcgaagtgcccctacctcaacttctttcagcttctagtcctcgccggcttatcccatttctgcagcggcgtaatacacgttaccaaggaggtcaaggaggtcgcgaccctcagctgcggacataacgtgtccgtagaggagctcgctcagacccggatctattggcagaaggagaagaagatggtcctcaccatgatgagcggcgacatgaacatctggcccgagtacaagaacaggaccatcttcgacatcaccaacaacctaagtatcgtgatcctggccctgcggcccagcgacgagggcacctacgagtgcgtggtgctgaagtacgagaaggacgccttcaagagggagcacctggccgaggtgaccctgtcagtgaaggccgacttcccaacccccagcatcagcgatttcgagatccccaccagcaatatcaggcgcataatctgcagcaccagcggcggctttcccgagccgcacctcagctggctggagaatggcgaagaactgaacgccatcaacaccaccgtctcgcaggaccccgagacggagctctacgccgtgagctccaagctggactttaacatgacgaccaatcactcctttatgtgcctcattaaatacggacatctgcgcgtgaaccagaccttcaactggaacaccaccaagcaggaacactttcccgacgacaagacgcatacgtgcccaccctgccccgccccggagctgctgggcggccccagcgtgttcctcttcccgcccaagcccaaggacacgctgatgatctcccggacccccgaggtgacctgcgtggtggtggatgtctcgcacgaggacccggaggtgaagttcaactggtacgtggatggcgtggaagtccataacgccaagacaaagccccgggaggaacagtacaacagcacctatagggtggtgagcgtgctgacggtgctgcaccaggattggctgaacggcaaggaatacaagtgcaaggtgtccaacaaggccctgcctgcccccatcgagaaaaccatctccaaggccaagggccaaccccgagagccccaggtttacactttacccccctccagggacgagctgaccaagaatcaggtgagcctcacctgcctggtcaaggggttctaccccagcgacatcgccgtggagtgggaaagcaacggccagcccgagaacaactacaagacaaccccgcccgtgctggacagcgacgggagcttcttcctgtatagcaagctgaccgtggataagagccggtggcagcagggcaacgtgtttagctgcagcgttatgcacgaggccctgcacaaccactacacccagaaatccctgtccctgtcccccggtaag

SEQ ID NO: 511 - DNA, 1404 bp, synthetic construct
  misc_feature 1..1404: note = CD80_Fc-CO14
  source 1..1404: mol_type = other DNA
atgggccacacgaggcgtcagggcaccagccccagcaagtgcccctacctcaatttcttccagctcctcgtcctagccggtctgagccacttctgcagcggggtcatccacgtaaccaaggaggtcaaggaggtcgccaccttgtcctgcggccataacgtctccgtagaggagctcgcgcaaacgcggatatattggcaaaaagagaagaagatggtcctcaccatgatgtccggggacatgaatatctggcccgaatacaaaaacaggaccatcttcgacatcacgaacaatctctccatcgtgatcctggccctgaggcccagcgacgagggcacctacgagtgcgtggtcctgaagtacgagaaggacgccttcaagagggagcacctggccgaggtgaccctgtccgtgaaggcagacttccccacccccagcatcagcgacttcgagatccccacctccaacatcagaaggatcatctgctccacctcgggcggtttccccgagccccacctgagttggctcgagaacggcgaggaactgaatgccattaacaccaccgtcagccaggaccccgagacggagctgtacgccgtctcatccaaactggacttcaacatgaccaccaatcacagcttcatgtgtctgattaagtacgggcatctgcgggtcaaccaaacctttaactggaacacaaccaaacaggaacatttcccggacgacaagacccacacgtgcccaccctgccccgcccccgagctgctcggcgggccgagcgtgttcctgttcccgcccaaacccaaggacactctgatgatctcccggacccccgaggtgacgtgcgtggtggtggacgtgagtcacgaggaccccgaggtgaagttcaactggtacgtggacggggtggaggtgcataatgccaagaccaagccgagggaggagcagtacaactccacctacagggtcgtgagcgtgcttacggtgctccaccaggactggctgaacgggaaggagtacaagtgtaaggtgagcaataaggcgctgcccgcccccatcgagaaaaccatcagcaaagccaaggggcagccccgggagccccaggtgtacaccctccccccatccagagacgagctcaccaagaatcaggtgagcctcacctgcctggtcaagggcttctatccctccgacatcgccgtggagtgggaatccaacgggcagcccgagaacaactataaaaccaccccaccggtcctggactcagatgggagcttcttcctgtacagcaagctcaccgtcgacaagtcgaggtggcagcaggggaacgtgttcagctgctccgtgatgcacgaagccctgcacaaccactacacccagaagtcgctcagcctgagcccagggaag

SEQ ID NO: 512 - DNA, 1404 bp, synthetic construct
  misc_feature 1..1404: note = CD80_Fc-CO15
  source 1..1404: mol_type = other DNA
atgggccacacgaggaggcaggggacctccccctcaaagtgcccctatctcaacttcttccagctcctcgtccttgccggcctctctcacttctgcagcggggtcatccacgtcacaaaggaggtcaaggaggtcgccaccctctcctgcgggcacaacgtcagcgttgaggagcttgcccagaccaggatctactggcagaaggagaagaagatggtcctcaccatgatgtccggggacatgaacatttggcccgagtacaagaataggaccatcttcgatatcaccaacaacttgagcatcgtgatcctggccctgcggcccagcgacgagggcacctacgagtgtgtcgtgctgaagtacgagaaggacgccttcaagcgggagcatctcgccgaggtgaccctgagcgtcaaggccgacttccccaccccctccatcagcgatttcgagatcccgaccagcaacatccggcgtatcatatgcagcaccagcggcggattcccggagccccatctgtcctggcttgagaacggcgaggagctgaatgccatcaataccacggttagccaggacccggagacagaactgtacgccgtgtccagcaaactggacttcaacatgacaaccaatcactccttcatgtgcctgatcaagtacggccacctgagggtgaaccagacgttcaactggaataccaccaagcaggagcacttccccgacgacaaaacgcacacatgcccgccctgccccgcccccgagctgctgggcggtccctccgtgttcctgttcccacccaagccgaaggacacgctgatgatcagccgcacccccgaggtgacatgcgtggtggtcgacgtcagccacgaggaccccgaggtgaagttcaactggtacgtggacggcgtggaagtgcacaacgccaagaccaagccccgcgaggaacagtacaattcgacctacagggtggtgagcgtgctgaccgtgctgcaccaggactggctgaatggcaaggaatacaagtgcaaggtcagcaataaggccctgcccgcccccatcgagaagaccatcagcaaggccaagggccagcccagggaaccccaggtgtacaccctgcccccgagccgggacgagctgaccaagaaccaggtgagcctgacgtgtctggtgaagggcttctaccccagcgacatcgccgtggagtgggagagcaacggtcagcccgagaacaactacaagaccacccctcccgtcctggatagcgacggctccttcttcctgtacagcaagctgaccgtggacaaaagcaggtggcagcagggcaacgtgttcagctgcagcgtgatgcacgaggcgctgcacaaccactacacccaaaagagcctgtcgctgagccccggcaag

SEQ ID NO: 513 - DNA, 1404 bp, synthetic construct
  misc_feature 1..1404: note = CD80_Fc-CO16
  source 1..1404: mol_type = other DNA
atgggccacaccaggaggcagggcacctcgccctcgaagtgcccctaccttaatttcttccagctacttgtactcgccggcctcagccacttctgcagcggcgtcatccacgttaccaaagaagtaaaggaggtcgcaaccctcagctgcggacacaacgtgagcgtcgaggagctcgcgcagacccggatctactggcagaaggaaaagaagatggtcctcacgatgatgtccggagatatgaacatttggcccgagtacaaaaaccgcaccatcttcgacatcaccaacaacctttcgatagtgatcctggcgctcaggcccagcgacgagggcacatacgaatgcgtggtgcttaagtacgagaaggatgccttcaagcgggagcacctggccgaggtgacgctgtccgtgaaggccgacttccccacccctagcataagcgatttcgagatccccaccagcaacatcaggcgcatcatctgcagcaccagcgggggcttccccgagccccacctgtcctggctggaaaacggcgaggagctgaacgccatcaacaccaccgtcagccaggaccccgagacagagctgtacgccgtgagctccaagctggatttcaacatgaccacaaaccattccttcatgtgcctgattaagtatggtcacctgcgggtgaaccagacctttaactggaacacgaccaagcaggagcacttccccgacgacaagacccacacgtgccccccttgccccgcccccgagctgctcggcggcccctccgtgttcctgttcccacccaagccgaaggacaccctcatgatcagccgcacccccgaggtgacctgcgtggtcgtggacgtgagccatgaggatcccgaagtgaagttcaattggtacgtggacggggtggaggtgcacaacgcaaagaccaagccgagggaggagcagtacaacagcacctacagggtggtgtccgtcctgaccgtgctgcaccaggattggctgaacgggaaggagtataagtgcaaggtgagcaataaagccctgcccgcccccatcgagaagaccatcagcaaggcgaagggccaaccccgggagccgcaggtctatacgctgccccccagccgggacgagctcaccaagaaccaggtgagcctgacctgtctggtgaagggattctatccctccgacatcgccgtggagtgggaatccaacggccagcccgaaaacaactacaagacaacgccccccgtgctggactccgacggcagcttcttcctgtatagcaagctgaccgtcgacaagtcgcgctggcagcagggcaacgtgttcagctgcagcgtgatgcatgaggccctgcacaaccattacacgcagaagtccctctcccttagccccggtaag

SEQ ID NO: 514 - DNA, 1404 bp, synthetic construct
  misc_feature 1..1404: note = CD80_Fc-CO17
  source 1..1404: mol_type = other DNA
atgggccatacgaggcgccaaggcacgagccccagcaagtgcccctaccttaacttcttccaacttctcgtcctcgccggcttaagccacttttgcagcggggtcatccacgtgaccaaggaggtcaaagaggtcgccacgctcagctgcggtcacaacgtatcggttgaggagttagcgcagaccaggatctactggcagaaggaaaagaagatggtcctcaccatgatgagcggcgatatgaacatctggcccgagtataagaaccgaaccatcttcgacataaccaacaacctctccatcgtcatcctggccctgcgccccagcgacgagggcacctacgagtgcgtggtcctgaagtatgagaaggatgcctttaagcgggagcacctggcggaggtcacgctgagcgtgaaggccgacttccccacgcccagcatcagcgatttcgagatccctaccagcaatatccggcggattatctgtagcaccagcggcggctttcccgagccccacctgtcctggctggagaatggcgaggagctgaacgccatcaataccaccgtgtcgcaggaccccgagacggagctctacgccgtgagctccaagctggacttcaacatgaccacaaatcacagctttatgtgcctgatcaagtacggccacctgagggtaaaccagacgtttaactggaacaccaccaagcaggagcacttccccgatgacaagacccacacctgccctccctgccccgcccccgagttgctcggcggccccagcgtgtttctctttccccccaagcccaaggacaccctgatgatctccaggacccccgaggttacctgcgtcgtggtcgacgtgagccacgaggatcccgaggtcaagttcaactggtacgtagacggcgtggaggtgcataacgccaagacaaagcccagggaggagcaatacaactcgacctacagggttgtaagcgtgctgaccgtcctgcaccaggactggctgaacgggaaggagtacaagtgcaaggtcagcaacaaggccctgccggcccccatcgagaagaccatcagcaaggccaagggccagcccagggagccgcaggtgtataccctgccacccagcagggacgagctgaccaaaaaccaggtgagcctcacctgcttggtgaagggcttctacccctccgatatcgccgtcgaatgggagagcaacggccagcccgagaataactataagaccacacccccggtgctagacagcgacggcagcttcttcctgtactcgaagctgaccgtggacaagagccgttggcagcagggcaacgtgttcagctgctccgtgatgcacgaagccctgcacaatcactacacccagaaaagcctgtccctgagcccgggcaag

SEQ ID NO: 515 - DNA, 1404 bp, synthetic construct
  misc_feature 1..1404: note = CD80_Fc-CO18
  source 1..1404: mol_type = other DNA
atgggccacactcggcggcagggcaccagcccctcaaagtgtccctaccttaacttcttccagctcctcgtcctagccgggctctcccacttctgctcgggcgtcatccacgtcacgaaggaggtcaaggaggtcgccaccctctcctgcggtcacaacgtctccgtcgaagaactcgcccagaccaggatctactggcaaaaagagaagaagatggtcctcaccatgatgagcggcgacatgaatatctggcccgagtacaagaaccggaccatcttcgacatcaccaacaacctaagcatcgtgatcctggccctgcgcccctcggacgaggggacctacgagtgcgtggtgttaaagtacgagaaggatgcctttaagagggagcacctggctgaggtcaccctcagcgtgaaggccgactttccgacccccagcatctccgacttcgagatacccaccagcaacatcaggaggatcatctgcagcaccagcggaggctttcccgagccccacctgtcgtggctggagaacggggaagaactgaacgccatcaacaccaccgtgagccaggacccggagacggagctctacgccgtgtccagcaagctggactttaacatgacgaccaatcacagcttcatgtgcctgatcaagtacgggcacctgagagtcaaccagaccttcaactggaacaccaccaagcaggagcactttccggatgacaagacccatacctgcccgccctgccccgcgcccgagctgctgggcggccccagcgtgtttctgttcccgcccaagcccaaggataccctgatgatcagccggacccccgaagtgacgtgcgtggtggtggacgtgagccacgaggaccccgaggtgaagtttaactggtacgtggacggcgtggaggtgcataacgccaagaccaagccccgcgaggagcagtacaacagcacctatagggtcgtctccgtgctgaccgtgctgcaccaggattggctgaacggcaaggagtacaagtgcaaggtgtcgaacaaggccctgcccgcgcccatcgagaaaaccatctccaaggccaagggccaacccagggaaccccaggtttacacgctcccgccctcccgcgacgagctcaccaagaaccaagtgagcctgacgtgtctggtcaaggggttttaccccagcgatatcgcggtggagtgggagagcaacggtcagcccgagaacaactacaagaccaccccgccggtgctggacagcgatgggtccttcttcctctacagcaagctgaccgtggacaagagcaggtggcagcagggcaacgtgttcagctgctccgtgatgcacgaggcgctgcacaaccactacacccagaagtccctgagcctgtcgcccggcaag

SEQ ID NO: 516 - DNA, 1404 bp, synthetic construct
  misc_feature 1..1404: note = CD80_Fc-CO19
  source 1..1404: mol_type = other DNA
atgggtcacacacggaggcaggggaccagccccagcaagtgcccctacctcaacttctttcagctcctcgtcctcgcggggctctcccacttctgcagcggggtcatccacgtgaccaaggaggtaaaggaggtagccacactcagctgcggccacaacgttagcgtcgaggaactcgcgcagacgcggatctattggcagaaggagaagaagatggtcttaaccatgatgagcggcgacatgaacatctggcccgagtacaagaacaggaccatcttcgacatcacaaacaacctctccatcgtgatcctggccctgcgaccctcagatgagggcacctacgagtgtgtggtgctcaagtacgagaaagacgccttcaagagggagcacctggcagaggtgaccctgagcgtcaaggcggacttccccaccccaagcatctccgatttcgaaatccccaccagcaacattcggaggatcatctgcagcactagcggtggcttccccgagccccatctgagctggctggagaacggcgaggagctcaatgccatcaacaccaccgtgagccaggaccccgagacggagctctacgccgtgagctcgaagctggatttcaacatgaccacgaaccacagcttcatgtgcctgatcaaatatggccacctgcgggtgaaccagaccttcaactggaacaccacgaagcaggagcacttccccgacgataagacccatacctgcccgccgtgccccgcccccgagctgctgggcggtccgtccgtcttcctgttcccgcccaagcccaaggacaccctcatgatctccaggacgccggaggtgacctgtgtggtcgtggacgtgagccacgaggaccccgaggtgaagttcaactggtacgtggacggggtggaggtgcataacgccaagaccaagccgcgggaggaacagtacaacagcacctatcgggtggtgtccgtgctcacggtcctgcaccaggattggctgaatggcaaagaatacaagtgcaaagtgagcaacaaggccctgcccgcccccatcgaaaagaccatcagcaaggccaagggccagcccagggagccccaggtgtatacgctgccccccagccgggacgagctcaccaaaaaccaagtctcactgacctgcctggtgaagggcttctacccatccgatatcgccgtggaatgggagtccaatgggcagcccgagaacaactacaagaccaccccaccggtgctcgactccgacggcagcttcttcctctatagcaagctgaccgtggacaagagcaggtggcagcaaggcaacgtgttcagctgctccgtgatgcacgaagccctgcacaaccattacactcagaagtccctgagcctgagccccgggaag

SEQ ID NO: 517 - DNA, 1404 bp, synthetic construct
  misc_feature 1..1404: note = CD80_Fc-CO20
  source 1..1404: mol_type = other DNA
atggggcacaccaggaggcaggggaccagcccctccaagtgcccctaccttaacttttttcagctactggtgctagccgggctcagccacttctgcagcggcgtcatccacgtgaccaaagaggtcaaggaggtcgccaccctctcctgcggccacaacgtctccgtcgaagaactagcgcagaccaggatatactggcagaaggagaagaagatggtcctcaccatgatgtccggggacatgaacatctggcccgagtacaagaacaggaccatcttcgatataaccaataacctcagcatcgtgatcctggccctgaggcccagcgacgagggcacctatgagtgcgtggtcctgaagtacgagaaggacgccttcaagcgtgagcacctggccgaggtcaccctgagcgtgaaggccgacttccccacccccagcatcagcgacttcgagatccccaccagcaacatccgccgtattatctgcagcaccagcggggggttcccggagccgcacctgagctggctggagaacggcgaggagctgaacgccatcaacactactgtctcccaggatcccgaaaccgaactgtacgccgtgtccagcaagctggactttaacatgaccaccaaccactcgtttatgtgcctgatcaaatacggacacctgcgggtaaaccagaccttcaactggaacaccaccaagcaggagcacttcccggatgacaagacccacacctgcccgccctgcccggctcccgagcttctgggcggccccagcgtgtttctgtttccccccaagcccaaggataccctgatgatctccaggacccccgaggtgacctgcgtggtggtggatgtgtcccacgaggatcccgaggtgaaatttaattggtatgtggacggggtcgaggtgcacaatgccaagaccaagcccagagaggagcagtacaacagcacctacagggtggtgagcgtgctgacggtgctgcatcaggactggctgaacgggaaggagtacaagtgcaaggtgtccaacaaggccctcccggcccccatcgagaagaccatctccaaggccaagggtcagccgcgcgagccccaagtgtacaccctgccccccagccgggacgagctgaccaagaaccaggtgagcctgacctgtctggtgaagggcttctaccccagcgacatcgccgtcgagtgggagagcaacggccagcctgagaacaactacaagaccaccccgcccgtcctggacagcgacggaagcttcttcctatacagcaagctgaccgtagacaagagcaggtggcagcagggcaacgtgttctcatgcagcgtgatgcacgaggccctgcataaccattacacccagaaaagcctctcgctcagccccggcaag

SEQ ID NO: 518 - DNA, 1404 bp, synthetic construct
  misc_feature 1..1404: note = CD80_Fc-CO21
  source 1..1404: mol_type = other DNA
atgggccataccaggaggcagggcacgagccccagcaagtgcccctacctcaacttcttccagctcctcgtccttgccgggctcagccacttctgtagcggcgttattcacgtaaccaaggaagtaaaagaggtcgccaccctaagctgtggccacaacgtcagcgtcgaggagctcgcccagaccaggatctactggcagaaggagaagaagatggtcctcacaatgatgtcgggcgacatgaatatctggcccgaatacaagaaccggacaatcttcgacatcaccaacaacctcagcatcgtgatcctggccctgaggcccagcgacgaagggacctacgagtgtgtcgtgctcaagtacgaaaaggacgccttcaaaagggagcacctcgcggaggtgacgctgagcgtgaaggccgacttccccaccccatccatcagcgacttcgagattcccacgtccaacatccgtaggatcatttgcagcacctccggcggcttccccgagccccacctcagctggctggagaacggcgaggaactgaacgccatcaacaccaccgtgagccaggatcccgagacggagctgtatgccgtgagcagcaagctggatttcaacatgaccaccaaccattcattcatgtgcctgataaagtacggccacctgagggtgaaccagaccttcaactggaacaccaccaaacaggaacacttcccggacgataagacccatacctgcccgccctgccccgcccccgagctgctgggcggcccctccgtcttcctgttcccgcccaagcctaaggataccctgatgatttccaggacccccgaggtgacctgcgtcgtggtggacgtcagccacgaggatcccgaggtgaagtttaattggtacgtcgacggggttgaggtgcacaacgccaagacgaagcccagggaggagcagtacaacagcacctaccgggtggtgagcgtgctcaccgtgctgcatcaggactggctgaatgggaaagagtacaaatgcaaggtgagcaataaggccctgccggcccccatcgagaagaccatcagcaaagccaagggccagccgagggaaccccaggtgtacacgctcccgccctccagggacgagctgaccaagaatcaggtcagcctcacctgcctcgtgaaggggttttacccctccgatatcgccgtggaatgggagagcaacgggcagcccgagaacaactacaaaacgacgccccccgtcctggactcggacgggagctttttcctgtattctaagctgaccgtggacaaaagccggtggcagcagggcaacgtcttcagctgcagcgtgatgcacgaggccctgcacaaccattacacccagaaaagcctgagcctgtcgcccggcaag

SEQ ID NO: 519 - DNA, 1404 bp, synthetic construct
  misc_feature 1..1404: note = CD80_Fc-CO22
  source 1..1404: mol_type = other DNA
atggggcacacccgcaggcaagggaccagccctagcaagtgcccctacctcaacttcttccagctcctcgtcctcgccggtctgagccacttctgcagcggcgtcatccacgtcaccaaggaggtcaaggaggtcgccacgctcagctgcggccacaacgtctccgtagaggagttggcccagaccaggatctactggcagaaggagaagaagatggtcttaacgatgatgagcggcgacatgaacatctggcccgagtacaagaaccgcaccatcttcgacattaccaacaacctctccatagtgatcctggccctccggccgagcgatgagggcacctacgaatgcgtggtgctgaagtacgaaaaggacgccttcaaaagggagcacctggcggaggtgaccctgtccgtgaaggccgactttcccacgcccagcattagcgatttcgagatccccacgagcaacatcaggcgcatcatctgcagcaccagcggcgggttccccgagccccacctgtcctggctggagaacggcgaagaactgaacgccatcaacaccaccgtgagccaggatcccgagacggagttgtacgccgtgagcagcaaactggactttaacatgaccaccaaccactcattcatgtgcctcatcaagtacggccacctgcgggtgaaccagaccttcaactggaacacgaccaagcaggagcacttccccgacgacaagacgcatacttgcccgccctgcccagcccctgagctgctgggcggtccttcggtattcctgtttccccccaagcccaaggataccctgatgatcagccggaccccggaggtgacctgcgtcgtggtggacgttagtcacgaagaccccgaggtgaagtttaattggtacgtggacggcgtggaggtccacaacgccaagaccaagccccgtgaggagcagtacaatagcacgtacagggtggtgagcgtgctcaccgtgctccatcaggactggctcaacgggaaggagtacaagtgcaaggtgagcaataaggccctccccgccccgatcgagaagaccatctcgaaggccaaggggcagccccgggaaccccaggtgtacaccctcccgcccagccgggacgaactgaccaagaaccaggtgtccctgacctgcctagtgaagggcttctacccctccgacatcgccgtggagtgggagagcaacggccagcccgagaacaactataagaccaccccgcccgtgctggacagcgatggcagctttttcctgtacagcaaactgaccgtggacaagtccaggtggcagcagggcaacgtgttcagctgcagcgtcatgcacgaggccctgcacaaccactacacccagaaaagcctgtccctcagccccggcaag

SEQ ID NO: 520 - DNA, 1404 bp, synthetic construct
  misc_feature 1..1404: note = CD80_Fc-CO23
  source 1..1404: mol_type = other DNA
atgggccatacccgcaggcaaggcaccagccccagcaagtgcccctacctcaacttcttccagctcttggtcctcgccgggctcagccacttctgctccggcgtcatacacgtgaccaaggaggtcaaggaggtcgccaccctctcgtgcgggcacaacgtcagcgtcgaggagctcgcccagaccaggatctactggcagaaggagaagaagatggtcctcaccatgatgagcggggacatgaacatctggcccgaatacaagaaccggacgatcttcgacatcacgaacaacctcagcatcgtgatcctcgccctgcggcccagcgacgagggtacctatgagtgcgtcgtgctgaagtacgagaaggacgcgttcaagagggagcatctggcggaagtgaccctgagcgtcaaggcggacttcccgacgccctcgatcagcgacttcgaaattcccacctccaacatccgcaggatcatctgcagcacctccggaggcttccccgagccccacctctcctggctggagaacggcgaggagctgaacgccatcaacaccacggtgtcccaagacccagagacggagctgtatgccgtgtccagcaaactggacttcaacatgaccaccaaccactccttcatgtgcctcatcaaatacggccacctgagggtgaaccagaccttcaattggaacaccaccaaacaggagcacttccccgacgataagacccatacctgtcccccctgccccgcccccgagctgctgggcggccccagcgtgttcctgttcccgcccaagcccaaggacaccctgatgatcagtaggacccccgaggttacctgcgtggtggtggacgtgagccacgaggaccccgaggtcaagttcaactggtatgtggatggcgtcgaggtgcacaacgccaagaccaaaccccgggaggagcaatacaacagcacctatagggtggtgagcgtcctgaccgtgctccaccaggattggctcaatggcaaggagtataagtgtaaggtgtccaacaaggccctgccggcccccatagagaagaccatctccaaggccaagggccagcccagggagccccaggtatacaccctgcccccctcccgggatgagctgacgaagaaccaggtgagcctgacctgcctggtgaaggggttctaccccagcgacatagccgtggaatgggaatccaacggccagcccgaaaacaactacaagaccacgccgcccgtgctggacagcgacggcagcttcttcctgtatagcaagctgaccgtggacaagtcccgctggcagcagggcaacgtcttctcctgctccgtgatgcatgaggccctgcacaatcactacacccaaaagagcctgagcctgagccccggtaag

SEQ ID NO: 521 - DNA, 1404 bp, synthetic construct
  misc_feature 1..1404: note = CD80_Fc-CO24
  source 1..1404: mol_type = other DNA
atggggcacaccaggcgccaggggacttctcctagcaagtgcccctacctcaacttcttccagctcctcgtcctcgccggcctctcgcatttttgcagcggggtcatccacgtcaccaaggaagtcaaggaggtcgccaccctcagctgcggccacaacgtcagcgtcgaggagctcgctcagacccggatatactggcagaaggagaagaagatggtcctcaccatgatgtcgggcgatatgaacatctggcccgaatataaaaaccggaccatcttcgacatcaccaacaatctctccatcgtgatcctcgccctgcggccctccgatgaaggaacatacgagtgcgtggtcctgaaatacgagaaagacgccttcaagagggagcatctggccgaggtcaccctgtcggtgaaagccgacttcccgacccccagcatctccgacttcgagatccccaccagcaacattaggcggatcatctgcagcaccagcgggggctttcccgaaccgcacctgagctggctggagaacggggaggaactgaacgccatcaacaccaccgtgtcccaagaccccgagacggaactgtacgcggtcagcagcaagctggacttcaatatgaccaccaaccactcgttcatgtgcctgatcaagtacggccacctcagggttaaccagaccttcaactggaacaccaccaagcaggagcacttccccgacgataagacccacacgtgccccccgtgccccgccccggagctgctgggcggccccagcgtgttcctgttccctcccaagcccaaggataccctgatgatcagcaggacacccgaggtgacctgcgtggtggtagacgtgtcccacgaggacccggaagtgaagttcaactggtacgtggacggcgtagaggtgcacaacgccaaaacgaagccccgcgaagaacagtacaacagcacctacagggtggtgagcgtgctgaccgtgctgcaccaagactggctgaacgggaaggagtacaagtgtaaggtgagcaataaggccctgcccgcccccatcgagaagaccatcagcaaggcgaaggggcagcccagggagccgcaggtgtacaccctgcccccctccagggacgagttgacgaagaatcaggtgtccctgacgtgcctggtgaagggcttctaccccagcgacatcgccgtggagtgggagagcaacgggcagcccgagaacaattacaagaccaccccacccgtgctggattccgacggcagcttttttctgtactccaagctgaccgtggacaaatcccgctggcagcaggggaacgtgttctcgtgcagcgtgatgcacgaggccctgcacaaccactacactcagaaaagcttgagcctgagccccgggaaa

SEQ ID NO: 522 - DNA, 1404 bp, synthetic construct
  misc_feature 1..1404: note = CD80_Fc-CO25
  source 1..1404: mol_type = other DNA
atgggccatacccggcgtcaagggacctccccgagcaagtgtccctacctcaacttcttccagctcctagtcctcgccggcctctcccacttctgctccggcgtaatccacgttacgaaggaggtcaaagaggtcgcgaccctcagctgtggccataacgtctccgtagaggagttggcgcagacaaggatctattggcagaaggagaagaagatggtccttaccatgatgagcggcgacatgaacatctggccggagtacaagaatcggaccatcttcgacatcactaacaatcttagcatagtgatcctcgccctgaggcccagcgatgaggggacctacgaatgcgtggtgcttaagtacgagaaggacgccttcaagagggagcacctcgccgaggtgacactgagcgtgaaagccgacttccccaccccgagcatcagcgacttcgagatccccaccagcaacatcaggaggatcatctgtagcaccagcggaggctttcccgagccccacctcagctggctggagaacggggaggagctcaatgctatcaataccaccgtgagccaggaccccgaaacggagctctacgccgtctcctcgaagctggacttcaacatgaccaccaaccacagcttcatgtgcctgatcaagtacgggcacctgcgggtgaaccagaccttcaactggaacaccacaaagcaggagcattttccagacgacaaaacccacacgtgccccccgtgccccgcgcccgagctcctggggggacccagcgtgttcctgtttccccccaagcccaaagacaccctgatgatcagcaggaccccggaggtgacctgtgtcgtggtggacgtgagccacgaggaccccgaggtgaagttcaattggtacgtggacggcgtggaggtgcacaacgccaagaccaagccccgcgaggagcagtacaacagcacctaccgggtggtgagcgtgctgaccgtcctgcaccaggactggctgaacgggaaggagtacaagtgcaaggtgagcaacaaggccctccccgccccgatcgagaaaacaatcagcaaggccaaggggcaaccccgggaaccccaggtctacaccctgccccccagccgcgacgagctgaccaagaaccaagtgagcctgacctgcctggtgaaggggttctacccgagcgatatcgccgtggagtgggagagcaacggtcagcccgagaacaactacaagaccaccccgcccgtgctcgacagcgacggtagcttcttcctgtacagcaagctgaccgtcgataagagcaggtggcagcaaggcaacgtgttctcctgcagcgtgatgcacgaggccctccacaaccactacacccagaaaagcctgtcgctttcccccggcaag

SEQ ID NO: 523 - protein, 839 aa, synthetic construct
  REGION 1..839: note = TLR4, Toll-like receptor 4, isoform 1 (wtTLR4)
MMSASRLAGTLIPAMAFLSCVRPESWEPCVEVVPNITYQCMELNFYKIPDNLPFSTKNLDLSFNPLRHLGSYSFFSFPELQVLDLSRCEIQTIEDGAYQSLSHLSTLILTGNPIQSLALGAFSGLSSLQKLVAVETNLASLENFPIGHLKTLKELNVAHNLIQSFKLPEYFSNLTNLEHLDLSSNKIQSIYCTDLRVLHQMPLLNLSLDLSLNPMNFIQPGAFKEIRLHKLTLRNNFDSLNVMKTCIQGLAGLEVHRLVLGEFRNEGNLEKFDKSALEGLCNLTIEEFRLAYLDYYLDDIIDLFNCLTNVSSFSLVSVTIERVKDFSYNFGWQHLELVNCKFGQFPTLKLKSLKRLTFTSNKGGNAFSEVDLPSLEFLDLSRNGLSFKGCCSQSDFGTTSLKYLDLSFNGVITMSSNFLGLEQLEHLDFQHSNLKQMSEFSVFLSLRNLIYLDISHTHTRVAFNGIFNGLSSLEVLKMAGNSFQENFLPDIFTELRNLTFLDLSQCQLEQLSPTAFNSLSSLQVLNMSHNNFFSLDTFPYKCLNSLQVLDYSLNHIMTSKKQELQHFPSSLAFLNLTQNDFACTCEHQSFLQWIKDQRQLLVEVERMECATPSDKQGMPVLSLNITCQMNKTIIGVSVLSVLVVSVVAVLVYKFYFHLMLLAGCIKYGRGENIYDAFVIYSSQDEDWVRNELVKNLEEGVPPFQLCLHYRDFIPGVAIAANIIHEGFHKSRKVIVVVSQHFIQSRWCIFEYEIAQTWQFLSSRAGIIFIVLQKVEKTLLRQQVELYRLLSRNTYLEWEDSVLGRHIFWRRLRKALLDGKSWNPEGTVGTGCNWQEATSI

SEQ ID NO: 524 - DNA, 2520 bp, synthetic construct
  misc_feature 1..2520: note = Nucleotide sequence of wt TLR4, isoform 1
  source 1..2520: mol_type = other DNA
atgatgtctgcctcgcgcctggctgggactctgatcccagccatggccttcctctcctgcgtgagaccagaaagctgggagccctgcgtggaggtggttcctaatattacttatcaatgcatggagctgaatttctacaaaatccccgacaacctccccttctcaaccaagaacctggacctgagctttaatcccctgaggcatttaggcagctatagcttcttcagtttcccagaactgcaggtgctggatttatccaggtgtgaaatccagacaattgaagatggggcatatcagagcctaagccacctctctaccttaatattgacaggaaaccccatccagagtttagccctgggagccttttctggactatcaagtttacagaagctggtggctgtggagacaaatctagcatctctagagaacttccccattggacatctcaaaactttgaaagaacttaatgtggctcacaatcttatccaatctttcaaattacctgagtatttttctaatctgaccaatctagagcacttggacctttccagcaacaagattcaaagtatttattgcacagacttgcgggttctacatcaaatgcccctactcaatctctctttagacctgtccctgaaccctatgaactttatccaaccaggtgcatttaaagaaattaggcttcataagctgactttaagaaataattttgatagtttaaatgtaatgaaaacttgtattcaaggtctggctggtttagaagtccatcgtttggttctgggagaatttagaaatgaaggaaacttggaaaagtttgacaaatctgctctagagggcctgtgcaatttgaccattgaagaattccgattagcatacttagactactacctcgatgatattattgacttatttaattgtttgacaaatgtttcttcattttccctggtgagtgtgactattgaaagggtaaaagacttttcttataatttcggatggcaacatttagaattagttaactgtaaatttggacagtttcccacattgaaactcaaatctctcaaaaggcttactttcacttccaacaaaggtgggaatgctttttcagaagttgatctaccaagccttgagtttctagatctcagtagaaatggcttgagtttcaaaggttgctgttctcaaagtgattttgggacaaccagcctaaagtatttagatctgagcttcaatggtgttattaccatgagttcaaacttcttgggcttagaacaactagaacatctggatttccagcattccaatttgaaacaaatgagtgagttttcagtattcctatcactcagaaacctcatttaccttgacatttctcatactcacaccagagttgctttcaatggcatcttcaatggcttgtccagtctcgaagtcttgaaaatggctggcaattctttccaggaaaacttccttccagatatcttcacagagctgagaaacttgaccttcctggacctctctcagtgtcaactggagcagttgtctccaacagcatttaactcactctccagtcttcaggtactaaatatgagccacaacaacttcttttcattggatacgtttccttataagtgtctgaactccctccaggttcttgattacagtctcaatcacataatgacttccaaaaaacaggaactacagcattttccaagtagtctagctttcttaaatcttactcagaatgactttgcttgtacttgtgaacaccagagtttcctgcaatggatcaaggaccagaggcagctcttggtggaagttgaacgaatggaatgtgcaacaccttcagataagcagggcatgcctgtgctgagtttgaatatcacctgtcagatgaataagaccatcattggtgtgtcggtcctcagtgtgcttgtagtatctgttgtagcagttctggtctataagttctattttcacctgatgcttcttgctggctgcataaagtatggtagaggtgaaaacatctatgatgcctttgttatctactcaagccaggatgaggactgggtaaggaatgagctagtaaagaatttagaagaaggggtgcctccatttcagctctgccttcactacagagactttattcccggtgtggccattgctgccaacatcatccatgaaggtttccataaaagccgaaaggtgattgttgtggtgtcccagcacttcatccagagccgctggtgtatctttgaatatgagattgctcagacctggcagtttctgagcagtcgtgctggtatcatcttcattgtcctgcagaaggtggagaagaccctgctcaggcagcaggtggagctgtaccgccttctcagcaggaacacttacctggagtgggaggacagtgtcctggggcggcacatcttctggagacgactcagaaaagccctgctggatggtaaatcatggaatccagaaggaacagtgggtacaggatgcaattggcaggaagcaacatctatctga

SEQ ID NO: 525 - protein, 251 aa, synthetic construct
  REGION 1..251: note = Constitutively active TLR4 (caTLR4) construct, protein sequence
MAAPGSARRPLLLLLLLLLLGLMHCASAAMPVLSLNITCQMNKTIIGVSVLSVLVVSVVAVLVYKFYFHLMLLAGCIKYGRGENIYDAFVIYSSQDEDWVRNELVKNLEEGVPPFQLCLHYRDFIPGVAIAANIIHEGFHKSRKVIVVVSQHFIQSRWCIFEYEIAQTWQFLSSRAGIIFIVLQKVEKTLLRQQVELYRLLSRNTYLEWEDSVLGRHIFWRRLRKALLDGKSWNPEGTVGTGCNWQEATSI

SEQ ID NO: 526 - DNA, 753 bp, synthetic construct
  misc_feature 1..753: note = Constitutively active TLR4 (caTLR4) construct, nucleic acid sequence
  source 1..753: mol_type = other DNA
atggcggcccccggcagcgcccggcgacccctgctgctgctactgctgttgctgctgctcggcctcatgcattgtgcgtcagcagcaatgcctgtgctgagtttgaatatcacctgtcagatgaataagaccatcattggtgtgtcggtcctcagtgtgcttgtagtatctgttgtagcagttctggtctataagttctattttcacctgatgcttcttgctggctgcataaagtatggtagaggtgaaaacatctatgatgcctttgttatctactcaagccaggatgaggactgggtaaggaatgagctagtaaagaatttagaagaaggggtgcctccatttcagctctgccttcactacagagactttattcccggtgtggccattgctgccaacatcatccatgaaggtttccataaaagccgaaaggtgattgttgtggtgtcccagcacttcatccagagccgctggtgtatctttgaatatgagattgctcagacctggcagtttctgagcagtcgtgctggtatcatcttcattgtcctgcagaaggtggagaagaccctgctcaggcagcaggtggagctgtaccgccttctcagcaggaacacttacctggagtgggaggacagtgtcctggggcggcacatcttctggagacgactcagaaaagccctgctggatggtaaatcatggaatccagaaggaacagtgggtacaggatgcaattggcaggaagcaacatctatc

SEQ ID NO: 527 - protein, 4 aa, synthetic construct
  REGION 1..4: note = amino acids of the EC domain
MPVL

SEQ ID NO: 528 - protein, 5 aa, synthetic construct
  REGION 1..5: note = amino acids of the EC domain
MPVLS

SEQ ID NO: 529 - protein, 6 aa, synthetic construct
  REGION 1..6: note = amino acids of the EC domain
MPVLSL

SEQ ID NO: 530 - protein, 7 aa, synthetic construct
  REGION 1..7: note = amino acids of the EC domain
MPVLSLN

SEQ ID NO: 531 - protein, 7 aa, synthetic construct
  REGION 1..7: note = amino acids of the EC domain
MPVLSLN

SEQ ID NO: 532 - protein, 8 aa, synthetic construct
  REGION 1..8: note = amino acids of the EC domain
MPVLSLNI

SEQ ID NO: 533 - protein, 9 aa, synthetic construct
  REGION 1..9: note = amino acids of the EC domain
MPVLSLNIT

SEQ ID NO: 534 - protein, 10 aa, synthetic construct
  REGION 1..10: note = amino acids of the EC domain
MPVLSLNITC

SEQ ID NO: 535 - protein, 11 aa, synthetic construct
  REGION 1..11: note = amino acids of the EC domain
MPVLSLNITCQ

SEQ ID NO: 536 - protein, 12 aa, synthetic construct
  REGION 1..12: note = amino acids of the EC domain
MPVLSLNITCQM

SEQ ID NO: 537 - protein, 13 aa, synthetic construct
  REGION 1..13: note = amino acids of the EC domain
MPVLSLNITCQMN

SEQ ID NO: 538 - protein, 14 aa, synthetic construct
  REGION 1..14: note = amino acids of the EC domain
MPVLSLNITCQMNK

SEQ ID NO: 539 - DNA, 753 bp, synthetic construct
  misc_feature 1..753: note = TLR4ca-CO01
  source 1..753: mol_type = other DNA
atggccgcccccggttccgcccggcgcccactcttgctcctcctcctcctgctcctactcggcctcatgcactgcgccagcgccgccatgcccgtactcagcctcaacataacctgccagatgaataagaccatcatcggcgtgagcgtcctcagcgttctcgtcgtctccgtcgtagcagtactcgtttacaagttctacttccacctcatgctcctcgccgggtgtatcaagtacggccgcggggaaaacatctacgacgccttcgtcatctatagcagccaggacgaggactgggtccggaatgagctggtgaagaacctggaggaaggcgtcccgcccttccagctgtgtctgcactaccgggatttcatccccggggtggcgatcgccgcgaacatcatccacgagggattccacaagtcccggaaggtgatcgtggtcgtgagccagcacttcatccaaagccggtggtgcatcttcgagtacgagatcgcccagacctggcagtttctgtcctccagggcgggaatcatcttcatagtgctgcagaaggtggaaaaaaccctcctgcggcagcaggtggagctgtacaggctgttgagcaggaacacctatctggagtgggaggacagcgtgctgggacgccacatcttctggaggcggctgcggaaagctctgctggacgggaagtcttggaacccggaggggacggtgggcaccggttgcaactggcaggaggccacctccatc

SEQ ID NO: 540 - DNA, 753 bp, synthetic construct
  misc_feature 1..753: note = TLR4ca-CO02
  source 1..753: mol_type = other DNA
atggccgccccaggctccgccaggcggccgctcctcctcctccttctactcctcctcctcggcttgatgcactgcgccagcgccgcgatgcccgttctcagcctcaacatcacgtgccagatgaacaagaccatcatcggagtctccgtcctcagcgttctcgtcgtcagcgtcgtagccgtcctcgtctacaagttctatttccacctcatgctcctggccgggtgcatcaagtacgggcgcggcgagaacatctacgacgccttcgtcatatactccagccaggacgaggactgggtcaggaacgagctggtgaagaacctcgaggagggggtcccgccctttcagctgtgcctgcactaccgggacttcatccccggcgtggccatcgccgccaacatcatccacgaggggttccacaagagcaggaaggtgatagtggtggtgagccagcacttcattcagagccggtggtgcatcttcgagtatgagatcgcccagacctggcaattcctgtcctcccgggcaggcatcatcttcatcgtgctgcagaaggtggagaagaccctgctgaggcagcaggtggagctgtacaggctgctgagcaggaacacttacctggaatgggaggacagcgtgctgggcaggcatatcttctggaggaggctgcggaaggccctgctggacggcaagagctggaaccccgagggcaccgtggggaccggctgtaactggcaggaagccacgagcatc

SEQ ID NO: 541 - DNA, 753 bp, synthetic construct
  misc_feature 1..753: note = TLR4ca-CO03
  source 1..753: mol_type = other DNA
atggccgcccccggcagcgccaggcggcccctcctactcctccttttgctcctcctcctcgggctcatgcactgcgcgtccgccgccatgccggtcctcagcctcaacatcacctgccagatgaacaagacgatcatcggcgtctccgtcctctccgtcctcgtcgtctccgtagttgccgtcttggtctacaaattctacttccatcttatgctccttgccgggtgtataaagtacggcaggggggagaacatctacgacgccttcgtcatctacagcagccaggacgaagactgggttcggaacgagctggtgaagaacctggaggagggcgtgccccccttccagctgtgtctgcattaccgggacttcatcccgggggtggccatagccgccaacatcatccatgagggcttccacaagtcccggaaggtgatcgtggtggtgagccagcacttcattcaatccaggtggtgcatcttcgagtacgagatcgcgcagacctggcagttcctgagctcccgcgccgggatcatcttcatcgtcctccagaaagtggagaagacgctgctgcggcagcaggtggaactgtaccgtctgctctcccggaacacctacctggagtgggaggatagcgtcctgggccggcacatcttctggcggcggctccggaaggcgctgctcgacgggaaaagctggaacccggagggcaccgtgggcactggctgcaattggcaggaagcaacgtccatc

SEQ ID NO: 542 - DNA, 753 bp, synthetic construct
  misc_feature 1..753: note = TLR4ca-CO04
  source 1..753: mol_type = other DNA
atggccgcccccgggtccgcgaggcggcccctactcctcctccttctccttcttctactcggcctcatgcattgcgccagcgccgccatgcccgtcctcagcctcaacatcacctgccagatgaacaagaccatcatcggggtgagcgtcctcagcgtcctcgtcgtcagcgtcgtcgcggtcctcgtatataagttctactttcatctcatgctcctcgccggctgcatcaagtacggcaggggcgagaacatctacgacgccttcgtcatctactccagccaagacgaggattgggttaggaacgagctggtgaagaacctggaggagggcgtgccccccttccagctctgcctccactaccgggactttatccccggtgtggcgatcgccgcgaacatcatccacgagggcttccacaagagcaggaaagtgatcgtggtggtgtcccagcacttcatccagtcccggtggtgcatcttcgagtacgagatcgcccaaacctggcagttcctaagctccagggccggcatcatcttcattgtgctccagaaggtggagaagaccctgctgaggcagcaggtggaactgtaccgcctgctgagcaggaacacctacctggagtgggaggatagcgtcctggggcggcacatcttctggaggcgcctgaggaaggcgctgctggacggcaagtcctggaaccccgaaggcaccgtcgggacgggctgcaattggcaggaggccacctccatc

SEQ ID NO: 543 - DNA, 753 bp, synthetic construct
  misc_feature 1..753: note = TLR4ca-CO05
  source 1..753: mol_type = other DNA
atggccgcccccggcagcgccagacgacccctcctcctcttgctcctccttctcctcttgggcctcatgcactgcgccagcgccgcgatgccggtcctctcccttaacatcacctgccagatgaacaagacaatcatcggggtatccgtcctttccgtccttgtcgtcagcgtcgtcgccgtactcgtttacaagttctacttccaccttatgctcttggccgggtgcatcaaatacggccgcggcgagaatatatacgacgcgttcgtgatctacagctcacaggacgaggactgggtccgcaacgagctggtgaagaacctggaggagggggtgccccccttccagctgtgtctgcactacagggacttcatccccggcgtggccatcgccgccaacatcatccacgaggggttccacaagagcagaaaggtgatcgtggtggtcagccagcacttcatccagtccaggtggtgcatcttcgagtatgagatcgcccagacctggcagtttctgtcctccagggccgggatcatcttcatcgtgctgcagaaggtggagaagaccctgctcaggcagcaggtggagctctacaggctgctgagcaggaatacctacctggaatgggaggacagcgtgctgggtcgccacatcttctggaggcgcctgcggaaggccctgctggatggcaagagctggaaccccgaagggaccgtgggtaccggctgcaactggcaggaggccaccagcata

SEQ ID NO: 544 - DNA, 753 bp, synthetic construct
  misc_feature 1..753: note = TLR4ca-CO06
  source 1..753: mol_type = other DNA
atggccgccccgggcagcgcccgcaggcccctcctcctcttgctcctcctcctcctcctcggattgatgcactgcgccagcgccgcgatgcccgtcctctccctcaacatcacgtgccagatgaacaagaccattatcggcgtttccgtcctcagcgtcctcgtcgtcagcgtcgtagccgtcttggtttacaagttctactttcacttgatgctcctcgccggctgtatcaagtacggccggggcgagaacatatacgacgccttcgtcatctacagcagccaggacgaggactgggtccgcaacgagctggtgaagaacctggaggagggcgtgcccccttttcagctgtgcctccattaccgggacttcattcccggcgtggccatcgccgccaacatcatccacgaaggcttccacaagtccaggaaggtgatcgtggtggtgagccagcacttcatccagagcaggtggtgcatcttcgagtacgagatcgcccagacctggcagttcctgagcagccgggccggcatcatcttcatcgtgctccagaaggtcgagaagaccctcctgaggcagcaggtggagctgtacaggctccttagccggaacacgtacctggagtgggaagactccgtgctgggccggcacatcttctggaggcgactgaggaaggccctgctcgacggcaagtcctggaaccccgagggcaccgtgggcaccggctgcaactggcaggaggccaccagcatc

SEQ ID NO: 545 - DNA, 753 bp, synthetic construct
  misc_feature 1..753: note = TLR4ca-CO07
  source 1..753: mol_type = other DNA
atggccgccccggggagcgcccgccggcccctcctcctccttctccttctcctcctcctagggctcatgcattgcgccagcgccgcaatgcccgtactcagcctcaacatcacctgccagatgaacaagacgatcatcggcgttagcgtactcagcgttctcgtcgtcagcgtcgtcgcggtcctcgtctacaaattctacttccacctcatgctcctagccggctgcatcaaatacggcaggggagagaacatctacgacgccttcgtaatctacagcagccaggacgaggactgggtccgcaacgagctggtgaagaacctggaggagggcgtgccccccttccagctgtgcctccactacagggacttcatcccaggtgtggcgatcgccgccaacataatccacgagggcttccacaagtccaggaaggtgatcgtggtggtgagccagcactttatccagagcaggtggtgtatcttcgagtacgagatcgcccagacctggcagttcctcagcagtcgcgccggcatcatcttcatcgtgctccagaaggtggagaagaccctgctgcggcagcaggtggagctctaccggctgctgtcgcgcaacacctacctcgagtgggaggacagcgtgctggggcgacatatcttttggcgaaggctgaggaaggccctgctggacggcaagagctggaacccggagggcaccgtgggcaccggatgtaactggcaagaggccaccagcatc

SEQ ID NO: 546 - DNA, 753 bp, synthetic construct
  misc_feature 1..753: note = TLR4ca-CO08
  source 1..753: mol_type = other DNA
atggccgcccccggcagcgccaggcggcccctcctcctcttgctactcctactcctcctcggccttatgcattgcgcctccgccgccatgcccgtcctcagccttaacatcacctgccagatgaacaagaccataatcggcgtctccgtcctctcggtcctagtcgtcagcgtcgtagccgtccttgtctacaagttctacttccaccttatgttgctcgccggctgcatcaagtacggcaggggcgagaatatctacgacgccttcgtaatctatagctcgcaagacgaggactgggttaggaacgagctggtgaagaatctggaggagggggtgcccccatttcagctgtgcctgcattacagggacttcatccccggcgtggccatcgccgccaatatcatccacgaaggcttccacaagtcccggaaggtgatcgtggtggtgtcgcagcactttatccagagcaggtggtgcatcttcgagtacgagatcgcccagacctggcagttcctgagcagccgcgccgggataattttcatcgtgctgcagaaggtggaaaagacgctgctcaggcagcaggtggagctctaccggctgctgagcaggaacacctacctggaatgggaggactccgtgctgggccgccacatcttctggcggaggctgcggaaggccctgctggatggcaagagctggaaccccgagggcaccgtgggcaccggctgcaattggcaggaggcgaccagcatc

SEQ ID NO: 547 - DNA, 753 bp, synthetic construct
  misc_feature 1..753: note = TLR4ca-CO09
  source 1..753: mol_type = other DNA
atggccgcccccggctccgcccggcggcccctcctcctcctcttactcctcctcctcctcggactcatgcactgcgccagcgccgccatgcccgtcctctccttaaacatcacctgccagatgaacaagaccatcatcggcgtcagcgtcctcagcgtactcgtagtcagcgtcgtagcggtcctcgtctacaagttctacttccacctcatgttacttgccggctgcatcaagtacggcaggggcgagaacatctacgacgcgttcgtcatctatagcagccaagacgaggactgggtccgcaatgagctggtcaagaacctcgaagagggggtgccccccttccagctgtgcctgcactacagggacttcatccccggggtcgccatagcggccaacatcatacacgaaggctttcacaagagccggaaggtgatcgtggtggtgtcccagcacttcatccagtcccggtggtgcatcttcgagtacgagatcgcgcagacctggcagttcctgagcagcagagccggcatcatctttatcgtgctgcagaaggtggagaagaccctgctgcgccagcaggtggagctgtacaggctgctgagcaggaacacctacctcgagtgggaggactccgtgctgggccgacacatcttctggcggcgcctgcgcaaggccctgctggacgggaaaagctggaaccccgagggcaccgtgggcaccgggtgcaactggcaggaagcgaccagcatc

SEQ ID NO: 548 - DNA, 753 bp, synthetic construct
  misc_feature 1..753: note = TLR4ca-CO10
  source 1..753: mol_type = other DNA
atggccgccccggggagcgccaggaggcccctactcctcctcctcctccttcttctactcggcttaatgcattgcgccagcgccgccatgcccgtccttagccttaacatcacttgtcagatgaacaagaccatcatcggggtcagcgtcctcagcgtcctcgtcgtatcggtagtcgccgtcctcgtctacaagttctatttccacctcatgctcctcgccggctgcatcaaatacgggaggggggagaacatctacgacgccttcgttatctacagcagccaggacgaggactgggtccggaacgaactggtgaaaaacctggaagagggggtgccccccttccagctgtgtctgcactacagggacttcatccccggtgtggccatcgcggccaacatcatccacgaggggttccacaaaagcaggaaggtgatcgtggtggtgagccagcacttcatccagagcaggtggtgcatcttcgagtacgagatcgcccagacctggcagttcctgtcgagcagggcggggatcatcttcatcgtgctccagaaggtggagaagaccctgctgcgacagcaggtcgagctgtaccggctgctgagcaggaacacctatctggagtgggaagacagcgtgctgggccgccatatcttctggaggcgcctgaggaaggccctgctggacggcaagagctggaatcccgagggcaccgtgggcacggggtgcaactggcaggaggccaccagcatc

SEQ ID NO: 549 - DNA, 753 bp, synthetic construct
  misc_feature 1..753: note = TLR4ca-CO11
  source 1..753: mol_type = other DNA
atggcggcccccggctccgccaggcgccccctcctcctcctactcctcctcctcctcctcggcctaatgcactgcgccagcgccgctatgcccgtcctcagcctcaatatcacttgtcagatgaacaagaccatcatcggcgtcagcgtcctctcagtcctcgtagtcagcgtcgtcgccgttctcgtctacaagttctacttccatctcatgcttttggcgggctgcatcaagtacggccgaggggagaatatctacgacgcgttcgtgatctactccagccaggacgaggactgggtcaggaacgagctggtgaagaatctggaggagggggtgccccccttccagctgtgcctgcattaccgggacttcattcccggtgtggccatcgccgccaatatcatccacgagggcttccacaagtccaggaaggtgatcgtggtcgtgtcccagcacttcatccaaagccggtggtgcatcttcgagtacgagattgcgcagacctggcaattcctcagctccagggccggcatcatattcattgtgctgcaaaaagtggagaagacgctgctgcggcagcaagtggagctgtaccgcctgctgagcaggaacacctacctcgagtgggaggattccgtgctcggcaggcacatcttctggaggaggctccgcaaggccctgctggacggcaaaagctggaaccccgaggggacagtgggcacaggctgcaactggcaggaggcgaccagcatc

SEQ ID NO: 550 - DNA, 753 bp, synthetic construct
  misc_feature 1..753: note = TLR4ca-CO12
  source 1..753: mol_type = other DNA
atggccgcccccggcagcgcccggcggcctctcctcctcctcctcttgctcctcctcctcggcctcatgcactgcgccagcgcagccatgcccgtactcagcttgaacatcacgtgccagatgaacaaaaccatcatcggcgtcagcgtactctcagtgctcgtcgtcagcgtcgtcgccgtactcgtatacaagttctactttcacttaatgctactcgccggctgcatcaagtacggccgcggcgaaaacatctacgacgccttcgtcatctactccagtcaggacgaggactgggtcaggaacgagctggtgaagaacctggaggagggcgtgccccccttccagctgtgcctgcattaccgggatttcatcccgggggtggccattgccgcgaacatcatccacgagggctttcacaagagcaggaaagtgatcgtggttgtgagccagcactttatccagtccaggtggtgcatctttgagtacgagatcgcccagacctggcagttcctgagcagcagggccggcatcatctttatagtgctgcagaaagttgagaagaccctgctgaggcagcaggtcgagctgtacaggctgctctccaggaacacctacctggagtgggaggactccgtgctcggacgccacatcttttggaggaggctgaggaaggccctcctggacgggaaaagctggaacccggagggcacggtgggaaccgggtgcaactggcaggaggccaccagcatc

SEQ ID NO: 551 - DNA, 753 bp, synthetic construct
  misc_feature 1..753: note = TLR4ca-CO13
  source 1..753: mol_type = other DNA
atggccgcccccgggtccgccaggcggcccctcctactcctcctcttgctcctcctactcgggctaatgcattgcgcctccgccgccatgcccgtattgagcctcaacatcacctgccagatgaacaagacgatcatcggcgttagcgtcctcagcgttctcgtagtctccgtagtcgccgtcctcgtctacaagttctattttcatttgatgctcctggccggctgcatcaaatacggcaggggcgaaaacatctacgacgccttcgtgatctactccagccaggacgaggactgggtccgcaatgagctggtgaagaacctggaggagggggtgccccccttccagctctgcctgcactaccgtgactttatccccggcgtggccatcgcggccaacatcatacacgagggatttcacaagtcccgcaaggtcatcgtggtggtgagccaacacttcatccagtcgcggtggtgcatttttgagtacgagatcgcccaaacctggcaattcctgagctccagggccgggatcatcttcatcgtgctgcagaaggtcgagaagaccttgctgaggcagcaggtggagctctacaggctgctctcgaggaacacctacctggagtgggaggacagcgtcctggggcggcacatcttctggaggaggctgaggaaggccctgctggacggcaagagctggaaccccgagggcaccgtcggcaccgggtgtaactggcaggaggccaccagcatc

SEQ ID NO: 552 - DNA, 753 bp, synthetic construct
  misc_feature 1..753: note = TLR4ca-CO14
  source 1..753: mol_type = other DNA
atggccgcccccgggagcgcccgtcgccccctcctcttgctactcctcctcttgctcctgggcctcatgcattgcgcgtccgcggccatgcccgtcctcagcctcaacatcacctgccagatgaacaaaacgatcatcggagtaagcgtcctcagcgtcctcgtcgtttccgtcgtggccgtactcgtctacaaattctactttcaccttatgttactcgccgggtgcatcaagtacggaaggggcgagaacatctacgacgccttcgtcatctacagctcccaggacgaggactgggtccgcaacgagctggtgaagaacctggaagagggcgtgccgccctttcagctgtgcttgcactaccgggacttcatacctggcgtggcaatcgccgccaatataatccacgagggcttccacaaaagccggaaggtgatcgtggtggtgagccagcactttatccagtcccggtggtgcattttcgagtacgagatcgcgcagacatggcagttcctgagcagcagggccggcatcatcttcatcgtgctgcagaaggtcgagaagacgctgctgcggcagcaggtggagctgtaccggctgctgagccggaacacctacctggagtgggaggatagcgtgctcgggcggcacatcttctggcggcgtctgaggaaggccctcctcgacggcaagagctggaacccggagggcacggtgggcacagggtgcaactggcaagaggccacgtccata

SEQ ID NO: 553 - DNA, 753 bp, synthetic construct
  misc_feature 1..753: note = TLR4ca-CO15
  source 1..753: mol_type = other DNA
atggccgcccccggatccgccaggcggccgttactactcctactcctcctcctactcctcggcctaatgcattgcgcgagcgccgctatgcccgtcctcagcctcaacataacgtgtcagatgaacaagacgatcatcggggtcagcgtcctctccgtcctcgtcgtctccgtcgtcgccgttctcgtctacaagttctacttccacctcatgctcctcgccggctgcatcaagtacggcaggggcgagaacatctacgacgctttcgtcatctacagcagccaggacgaggactgggtccggaacgagctggtgaagaacctggaggagggcgtcccgcccttccagctgtgcctccactatcgggacttcatccccggcgtggccatcgccgccaacatcatccacgagggctttcacaagagccgaaaggtgatcgtggtggtgtcccaacactttatacagagccggtggtgcatcttcgagtacgagatcgcccagacctggcagttcctgtccagccgcgcagggatcatcttcatcgtcctgcagaaggtggagaaaaccctgctgcggcagcaggtggagctgtacaggctgctgtcccggaacacctacctggagtgggaggatagcgtgctggggaggcacatcttttggaggaggctgaggaaggccctgctggacggcaaaagctggaaccccgaggggaccgtgggaaccggctgcaactggcaagaggccaccagcatc

SEQ ID NO: 554 - DNA, 753 bp, synthetic construct
  misc_feature 1..753: note = TLR4ca-CO16
  source 1..753: mol_type = other DNA
atggccgcccccggctccgcccggcgccccctcctcctcctcttgctcctcctactccttggcctcatgcactgcgccagcgcggccatgccggtcctctccttgaacataacctgccagatgaataagaccatcatcggcgtcagcgtcctcagcgtcctcgtcgtcagcgtcgtggcggtcctcgtttacaaattctacttccacctcatgttattggccggctgcataaagtacgggaggggcgagaacatatacgacgccttcgtcatctacagctcccaggacgaggactgggtcaggaacgagctggtgaaaaacctggaggagggtgtgccaccgttccagctgtgcctgcactaccgggacttcatacccggcgtggccatcgccgccaatatcatccatgagggcttccacaagtccaggaaggtgatcgtggtggtgagccaacacttcatccagtcccggtggtgtatcttcgagtacgagatcgcccagacctggcagttcctgtccagccgggccggcatcatcttcatcgtgctgcagaaggtcgagaagaccctgctgcgacagcaggtggagctgtatcgcctgctcagcaggaatacatacctggagtgggaggacagtgtgctgggccggcacatcttctggagaaggctcaggaaggccctgctggacggcaaatcgtggaaccccgagggcaccgtgggcactggttgtaactggcaggaggccacctccatc

SEQ ID NO: 555 - DNA, 753 bp, synthetic construct
  misc_feature 1..753: note = TLR4ca-CO17
  source 1..753: mol_type = other DNA
atggccgcccccggcagcgccaggcgccccctccttctcctcctcctattgctcttgttgggcctcatgcactgcgccagcgccgcgatgcccgtcctctccttgaacatcacctgccagatgaacaagaccatcatcggggtcagcgtcctttccgtcctcgtcgtttccgttgtcgccgtcctggtgtacaagttctacttccatttgatgctactcgccggctgcatcaagtacggcaggggagagaacatctacgacgccttcgtgatctacagctcgcaggacgaggactgggtcaggaacgagctggtgaagaacctggaggagggggtgccccccttccagctgtgtctacattacagggacttcattccgggcgtcgccatcgccgccaacatcatccacgaaggcttccacaagagccgaaaggtgatcgtggtggtgtcccagcatttcatacaatcgcgctggtgcatatttgagtacgagattgcccagacctggcagttcctaagcagccgggcggggatcatctttatcgtgctgcagaaggtcgagaagaccctactgagacagcaggtggagctgtaccggctgctctcgaggaacacctacctggagtgggaggacagcgtgctggggcggcacatcttctggaggcggctgaggaaggccctgctggatgggaaaagctggaaccccgagggcacagtggggaccggctgcaactggcaggaggcgacgagcatc

SEQ ID NO: 556 - DNA, 753 bp, synthetic construct
  misc_feature 1..753: note = TLR4ca-CO18
  source 1..753: mol_type = other DNA
atggcggccccgggcagcgccaggaggcccctcctcctcctcctcctcttattgctcttgggcctcatgcactgcgccagcgccgccatgccggtcctcagcctaaatatcacctgccagatgaataagaccatcatcggggtcagcgtccttagcgtcctcgtagtcagcgtcgtagcggtccttgtctacaagttttactttcacctcatgctcttagccggctgcatcaagtacggccggggggagaacatctacgacgccttcgttatctactccagccaagacgaggattgggttcgtaacgagctggtgaagaacctggaggagggcgtgccccccttccagctgtgcctgcactaccgggactttatccccggcgtggccatcgccgccaacatcatccatgagggcttccacaaaagccgcaaggtgatagtggtggtgagccagcactttatccagtccaggtggtgtatcttcgagtacgagatcgcccagacctggcagttcctgagctccagggccggaatcatcttcattgtgctgcagaaggtggagaaaaccctcctccgccaacaggtcgagctgtacaggctgctgtcccgcaatacctatctggagtgggaagacagcgtcctcgggcggcacatcttctggcgccgcctgcggaaggccctgctggatggcaagagctggaaccccgaaggaaccgtcggcacgggttgcaactggcaagaggccacctccatc

SEQ ID NO: 557 - DNA, 753 bp, synthetic construct
  misc_feature 1..753: note = TLR4ca-CO19
  source 1..753: mol_type = other DNA
atggccgcccccgggtccgcgaggcggccactcctcctcctcttgctcctcctccttctcggcctcatgcactgtgcgagcgccgccatgccggtcctcagccttaacatcacctgccagatgaacaagaccataatcggggtcagcgtcctctccgttctcgtcgtctcggtagtcgccgtcttagtctacaagttctatttccacctcatgcttctcgcgggctgcatcaagtacggcaggggggagaacatctacgacgccttcgtcatctactccagccaggacgaggactgggtccggaacgaactggtgaagaacctggaggagggcgtgccccccttccagctgtgcctgcactaccgggacttcatccccggagtggccatcgccgccaacatcatccatgagggatttcacaagtcccggaaagtgatcgtggtggtgagccagcacttcatccagagcaggtggtgcatctttgagtatgagatcgctcagacctggcagttcctgtcctcccgggccggaataattttcatcgttctgcagaaggtggaaaagaccctgctgagacagcaggtggagctctacaggctgctcagcaggaacacctacctggagtgggaggactccgtactggggcggcacatcttctggcggcgcctgaggaaggcccttctcgacggcaagagctggaaccccgagggtaccgtcggcaccggatgcaactggcaggaggccaccagtatc

SEQ ID NO: 558 - DNA, 753 bp, synthetic construct
  misc_feature 1..753: note = TLR4ca-CO20
  source 1..753: mol_type = other DNA
atggccgcccccggcagcgcgcggcgtcccctcctcctcctcctcctactcctcctcctcgggctcatgcattgcgcctccgccgccatgccggtcctcagcctcaacatcacctgccagatgaacaagaccatcatcggcgttagcgtcctcagcgtcctggtggtgtccgtcgtcgccgttctcgtctacaagttctactttcacctcatgctcctcgccgggtgcatcaagtacggcaggggcgaaaacatctacgacgccttcgtcatctactccagccaggacgaggactgggtccgtaacgagctcgtaaagaacctggaggagggcgtgcctcccttccagctgtgcctgcactacagggacttcatcccaggggtggccatcgccgccaacattatccacgagggcttccacaagagcaggaaagtgatcgtggtggtgagccagcacttcatccagtcccggtggtgcatcttcgaatatgagatcgcccagacctggcagtttctgtcctcccgggccggcatcattttcatcgtgcttcagaaggtcgaaaagaccctgctgaggcaacaggtggaactctataggctcctgagccgtaacacctacctcgaatgggaggacagcgtgctgggccgccacatcttctggaggaggctgaggaaggccctgctggacggcaagagctggaaccccgagggcaccgtgggtaccgggtgcaactggcaggaggccaccagcata

SEQ ID NO: 559 - DNA, 753 bp, synthetic construct
  misc_feature 1..753: note = TLR4ca-CO21
  source 1..753: mol_type = other DNA
atggccgcgccgggctccgccaggaggcccctcctcctactcctcttgctcctactcctcggcctcatgcactgcgcgtccgcggcgatgcccgtcctcagcctcaacattacctgccaaatgaacaaaaccatcataggcgtcagcgtcctctccgtcctcgtagtcagcgtcgtcgccgttctcgtctacaagttctacttccacttgatgctactcgccggctgtataaagtacggccggggggagaacatctacgacgccttcgtcatctacagctcgcaggacgaggactgggtccggaacgagctggtgaaaaacctggaagagggcgttcccccattccagctgtgcctgcactaccgggactttatcccgggggtggccatcgccgccaatatcatccatgagggcttccacaagagccggaaggtgatcgtcgtcgtcagccaacacttcatccagtccaggtggtgcatcttcgagtacgagatcgcccagacctggcagttcctgtcctcccgcgccggcatcatcttcatcgtgctgcagaaggtcgagaagaccctgctgcggcagcaggtggagctgtatcgcctgctctcccgaaacacttacctcgagtgggaggatagcgtgctcggccggcacatcttctggaggaggctgaggaaggctctcctggacggcaagagctggaaccccgagggaaccgtgggcaccgggtgcaactggcaagaggccaccagcatc

SEQ ID NO: 560 - DNA, 753 bp, synthetic construct
  misc_feature 1..753: note = TLR4ca-CO22
  source 1..753: mol_type = other DNA
atggccgcccccggcagcgcccggaggcccctcctcctcctccttctcctactcttgctcgggctcatgcattgcgcctccgccgccatgcccgtattgtccctcaacatcacgtgccagatgaacaagactatcatcggcgttagcgtactcagcgtcctcgttgtcagcgtcgtcgccgtactcgtctataagttttacttccaccttatgctcctcgccggctgcatcaagtacggcaggggcgagaacatctacgacgccttcgtgatctacagcagccaggacgaggactgggttaggaacgagctggtgaagaacctggaggagggcgtgcccccctttcagctgtgcctccactatagggacttcatccccggggtggccatcgccgccaacatcatacatgaggggttccacaagagcaggaaggtgatcgtggtggtcagccagcacttcatccagagcagatggtgcatattcgagtacgagatcgcccagacctggcagttcctgagcagcagggccggcatcatcttcattgtgctgcagaaggtagaaaagacgctgctcaggcagcaagtggagctgtaccggctcctgagcaggaacacctacctggagtgggaggacagcgtgctgggccggcacatcttctggcgacggctgaggaaggccctgctggacggcaagtcctggaaccccgagggcaccgtggggaccggctgtaactggcaggaggctactagcatc

SEQ ID NO: 561 - DNA, 753 bp, synthetic construct
  misc_feature 1..753: note = TLR4ca-CO23
  source 1..753: mol_type = other DNA
atggcggcccccggcagcgcgcgccggcccctcctcctcttgttactcttgttgctcctcggtctaatgcactgcgccagcgccgccatgcccgtcctcagccttaacatcacgtgccaaatgaacaagactatcatcggggtcagcgtcctctccgtacttgtagttagcgttgtcgccgtcttagtctacaagttctacttccacctcatgctcctggccggctgcataaagtacggtaggggcgagaatatatacgacgccttcgtgatctactccagccaggacgaggactgggtcaggaacgagttagtgaaaaacctggaggagggggtgccccccttccagctgtgcctgcactaccgggacttcatcccgggcgtggccatcgccgccaacatcatccacgagggcttccacaaaagccggaaggtgatagtggtggtgagccagcacttcatccagtccaggtggtgcatattcgagtacgagatcgcccagacctggcagttcctgtccagtagggccggcatcatcttcattgtgctccagaaggtggagaagaccctgctgcggcagcaggtcgagctgtaccggctgctgtcccgcaacacctacctggaatgggaagacagcgtgctgggccggcacatcttctggaggcggctgaggaaggccctgctggacggcaagtcatggaaccccgagggcaccgtgggcaccggctgcaactggcaggaggccaccagcatc

SEQ ID NO: 562 - DNA, 753 bp, synthetic construct
  misc_feature 1..753: note = TLR4ca-CO24
  source 1..753: mol_type = other DNA
atggccgcccccggcagcgcccgccgtccactcttgctcctcctccttctcctcctccttgggctcatgcattgtgccagcgcggccatgccagtcctcagcctcaatatcacctgtcagatgaacaagacgatcatcggcgtcagcgtccttagcgtactcgtcgtctcagtggtcgccgtccttgtctataagttttatttccacctcatgctactcgccggctgtatcaagtacggccggggcgagaacatctacgacgccttcgtcatctacagctctcaggacgaggactgggtaaggaatgagctggtgaagaacctggaggaaggggtgccacccttccagctgtgcctgcactaccgggacttcatccccggggtggccatcgccgccaacatcatccacgaagggttccacaagagcaggaaggtgatagtggtggtcagccagcacttcatccaaagcaggtggtgcatcttcgagtacgagatcgcccagacctggcagttccttagcagcagggccgggatcatcttcatcgtgctgcagaaggtggagaagacgctcctgaggcagcaagtggagctgtacaggctgctgtcaaggaacacctacctggagtgggaggacagcgtgctgggcaggcacatcttttggcggagactgaggaaggccctcctggacggcaagtcctggaacccggaggggaccgtggggacgggctgcaactggcaggaggccacctccata

SEQ ID NO: 563 - DNA, 753 bp, synthetic construct
  misc_feature 1..753: note = TLR4ca-CO25
  source 1..753: mol_type = other DNA
atggccgcgcccggcagcgccaggcgccccctcctcctcctattactcctactcctcctcggcctcatgcactgcgcctcggccgccatgcccgtcctctccctcaacatcacgtgccagatgaataagaccatcatcggcgtcagcgtcctatccgtcctcgtcgtaagcgtcgttgccgtactcgtctacaagttctattttcacctaatgcttctcgccgggtgcatcaagtacgggaggggcgagaacatctacgacgccttcgtcatctactcgagccaggacgaggactgggtccggaacgagctggtgaagaacctggaggagggcgtgccccccttccagctctgcctgcactaccgggattttatccccggcgtggccatcgccgccaacatcatccatgagggcttccataagtccaggaaggtgatcgtggtcgtgtcccagcactttatccagagcaggtggtgcatcttcgagtacgagatcgcccaaacctggcagtttctgagctcccgggccggcatcatcttcatcgtactgcagaaggtggagaagaccctgctcaggcagcaggtggagctgtaccgcctgctctccaggaacacctacctggagtgggaggacagcgtcctgggaaggcacatcttctggcggcggctccgtaaggccctgctggatggaaagagctggaaccccgagggcaccgtggggaccggctgcaactggcaggaggcgacctccatc

SEQ ID NO: 564 - protein, 193 aa, Homo sapiens
MAAEPVEDNCINFVAMKFIDNTLYFIAEDDENLESDYFGKLESKLSVIRNLNDQVLFIDQGNRPLFEDMTDSDCRDNAPRTIFIISMYKDSQPRGMAVTISVKCEKISTLSCENKIISFKEMNPPDNIKDTKSDIIFFQRSVPGHDNKMQFESSSYEGYFLACEKERDLFKLILKKEDELGDRSIMFTVQNED

SEQ ID NO: 565 - DNA, 579 bp, Homo sapiens
  source 1..579: mol_type = other DNA
atggctgctgaaccagtagaagacaattgcatcaactttgtggcaatgaaatttattgacaatacgctttactttatagctgaagatgatgaaaacctggaatcagattactttggcaagcttgaatctaaattatcagtcataagaaatttgaatgaccaagttctcttcattgaccaaggaaatcggcctctatttgaagatatgactgattctgactgtagagataatgcaccccggaccatatttattataagtatgtataaagatagccagcctagaggtatggctgtaactatctctgtgaagtgtgagaaaatttcaactctctcctgtgagaacaaaattatttcctttaaggaaatgaatcctcctgataacatcaaggatacaaaaagtgacatcatattctttcagagaagtgtcccaggacatgataataagatgcaatttgaatcttcatcatacgaaggatactttctagcttgtgaaaaagagagagacctttttaaactcattttgaaaaaagaggatgaattgggggatagatctataatgttcactgttcaaaacgaagac

SEQ ID NO: 566 - protein, 189 aa, Homo sapiens
MAAEPVEDNCINFVAMKFIDNTLYFIENLESDYFGKLESKLSVIRNLNDQVLFIDQGNRPLFEDMTDSDCRDNAPRTIFIISMYKDSQPRGMAVTISVKCEKISTLSCENKIISFKEMNPPDNIKDTKSDIIFFQRSVPGHDNKMQFESSSYEGYFLACEKERDLFKLILKKEDELGDRSIMFTVQNED

SEQ ID NO: 567 - DNA, 567 bp, Homo sapiens
  source 1..567: mol_type = other DNA
atggctgctgaaccagtagaagacaattgcatcaactttgtggcaatgaaatttattgacaatacgctttactttatagaaaacctggaatcagattactttggcaagcttgaatctaaattatcagtcataagaaatttgaatgaccaagttctcttcattgaccaaggaaatcggcctctatttgaagatatgactgattctgactgtagagataatgcaccccggaccatatttattataagtatgtataaagatagccagcctagaggtatggctgtaactatctctgtgaagtgtgagaaaatttcaactctctcctgtgagaacaaaattatttcctttaaggaaatgaatcctcctgataacatcaaggatacaaaaagtgacatcatattctttcagagaagtgtcccaggacatgataataagatgcaatttgaatcttcatcatacgaaggatactttctagcttgtgaaaaagagagagacctttttaaactcattttgaaaaaagaggatgaattgggggatagatctataatgttcactgttcaaaacgaagac

SEQ ID NO: 568 - protein, 20 aa, Homo sapiens
MYRMQLLSCIALSLALVTNS

SEQ ID NO: 569 - protein, 20 aa, Homo sapiens
MAWTVLLLGLLSHCTGSVTS

SEQ ID NO: 570 - protein, 25 aa, Homo sapiens
MEICRGLRSHLITLLLFLFHSETIC

SEQ ID NO: 571 - protein, 35 aa, Homo sapiens
MDAMKRGLCCVLLLCGAVFVSPSQEIHARFRRGAR

SEQ ID NO: 572 - protein, 192 aa, synthetic construct
  REGION 1..192: note = Chimeric human construct
MDAMKRGLCCVLLLCGAVFVSPSQEIHARFRRGARYFGKLESKLSVIRNLNDQVLFIDQGNRPLFEDMTDSDCRDNAPRTIFIISMYKDSQPRGMAVTISVKCEKISTLSCENKIISFKEMNPPDNIKDTKSDIIFFQRSVPGHDNKMQFESSSYEGYFLACEKERDLFKLILKKEDELGDRSIMFTVQNED

SEQ ID NO: 573 - DNA, 576 bp, synthetic construct
  misc_feature 1..576: note = Chimeric human construct
  source 1..576: mol_type = other DNA
atggatgcaatgaagagagggctctgctgtgtgctgctgctgtgtggagcagtcttcgtttcgcccagccaggaaatccatgcccgattcagaagaggagccagatactttggcaagcttgaatctaaattatcagtcataagaaatttgaatgaccaagttctcttcattgaccaaggaaatcggcctctatttgaagatatgactgattctgactgtagagataatgcaccccggaccatatttattataagtatgtataaagatagccagcctagaggtatggctgtaactatctctgtgaagtgtgagaaaatttcaactctctcctgtgagaacaaaattatttcctttaaggaaatgaatcctcctgataacatcaaggatacaaaaagtgacatcatattctttcagagaagtgtcccaggacatgataataagatgcaatttgaatcttcatcatacgaaggatactttctagcttgtgaaaaagagagagacctttttaaactcattttgaaaaaagaggatgaattgggggatagatctataatgttcactgttcaaaacgaagac

SEQ ID NO: 574 - protein, 177 aa, synthetic construct
  REGION 1..177: note = Chimeric human construct
MYRMQLLSCIALSLALVTNSYFGKLESKLSVIRNLNDQVLFIDQGNRPLFEDMTDSDCRDNAPRTIFIISMYKDSQPRGMAVTISVKCEKISTLSCENKIISFKEMNPPDNIKDTKSDIIFFQRSVPGHDNKMQFESSSYEGYFLACEKERDLFKLILKKEDELGDRSIMFTVQNED

SEQ ID NO: 575 - DNA, 531 bp, synthetic construct
  misc_feature 1..531: note = Chimeric human construct
  source 1..531: mol_type = other DNA
atgtacaggatgcaactcctgtcttgcattgcactaagtcttgcacttgtcacaaacagttactttggcaagcttgaatctaaattatcagtcataagaaatttgaatgaccaagttctcttcattgaccaaggaaatcggcctctatttgaagatatgactgattctgactgtagagataatgcaccccggaccatatttattataagtatgtataaagatagccagcctagaggtatggctgtaactatctctgtgaagtgtgagaaaatttcaactctctcctgtgagaacaaaattatttcctttaaggaaatgaatcctcctgataacatcaaggatacaaaaagtgacatcatattctttcagagaagtgtcccaggacatgataataagatgcaatttgaatcttcatcatacgaaggatactttctagcttgtgaaaaagagagagacctttttaaactcattttgaaaaaagaggatgaattgggggatagatctataatgttcactgttcaaaacgaagac

SEQ ID NO: 576 - protein, 177 aa, synthetic construct
  REGION 1..177: note = Chimeric human construct
MAWTVLLLGLLSHCTGSVTSYFGKLESKLSVIRNLNDQVLFIDQGNRPLFEDMTDSDCRDNAPRTIFIISMYKDSQPRGMAVTISVKCEKISTLSCENKIISFKEMNPPDNIKDTKSDIIFFQRSVPGHDNKMQFESSSYEGYFLACEKERDLFKLILKKEDELGDRSIMFTVQNED

SEQ ID NO: 577 - protein, 182 aa, synthetic construct
  REGION 1..182: note = Chimeric human construct
MEICRGLRSHLITLLLFLFHSETICYFGKLESKLSVIRNLNDQVLFIDQGNRPLFEDMTDSDCRDNAPRTIFIISMYKDSQPRGMAVTISVKCEKISTLSCENKIISFKEMNPPDNIKDTKSDIIFFQRSVPGHDNKMQFESSSYEGYFLACEKERDLFKLILKKEDELGDRSIMFTVQNED

SEQ ID NO: 578 - protein, 193 aa, synthetic construct
  REGION 1..193: note = human mutant
MAAEPVEDNCINFVAMKFIDNTLYFIAEDDENLESDYFGKLESKLSVIRNLNDQVLFIDQGNRPLFEDMTSSDCRNNAPRTIFIISMYKDSQPRGMAVTISVKCEKISTLSCENKIISFKEMNPPDNIKDTKSDIIFFQRSVPGHDNKMQFESSSYEGYFLACEKERDLFKLILKKEDELGDRSIMFTVQNED

SEQ ID NO: 579 - protein, 192 aa, synthetic construct; identical to SEQ ID NO: 572
  REGION 1..192: note = tPA_IL18-WT amino acid sequence

SEQ ID NO: 580 - DNA, 576 bp, synthetic construct; identical to SEQ ID NO: 573
  misc_feature 1..576: note = tPA_IL18-WT nucleotide sequence
  source 1..576: mol_type = other DNA

SEQ ID NO: 581 - protein, 177 aa, synthetic construct; identical to SEQ ID NO: 574
  REGION 1..177: note = IL2sp_IL18-WT

SEQ ID NO: 582 - DNA, 531 bp, synthetic construct; identical to SEQ ID NO: 575
  misc_feature 1..531: note = IL2sp_IL18-WT
  source 1..531: mol_type = other DNA

SEQ ID NO: 583 - DNA, 576 bp, synthetic construct
  misc_feature 1..576: note = tPA_IL18
  source 1..576: mol_type = other DNA
atggacgccatgaagaggggcctctgctgcgtcctattgctctgcggggccgtcttcgtctcccccagccaggagatccacgcccggtttaggaggggggcgaggtacttcgggaagctcgagagcaagctcagcgtaatcaggaacttgaacgaccaagtcctctttatcgaccagggtaaccgtcccctcttcgaggacatgaccgactccgattgccgcgacaacgccccgcggaccatctttatcatcagcatgtacaaggactcccagccgagggggatggccgtcacaatcagcgtcaaatgcgagaagatctcgaccctgagctgcgagaacaaaatcatctcctttaaggagatgaatcccccggacaacataaaggacaccaagtcggacatcatcttcttccagaggtcggtccctggccacgacaacaaaatgcagttcgagagctccagctacgagggctatttcctcgcctgcgagaaggagagggacctgttcaagctcatcctgaagaaggaggacgagctgggcgacaggtcgatcatgttcactgtgcagaacgaggac

SEQ ID NO: 584 - DNA, 576 bp, synthetic construct
  misc_feature 1..576: note = tPA_IL18
  source 1..576: mol_type = other DNA
atggacgcgatgaagcggggcctctgctgcgtactcctactctgcggggccgtcttcgtgtccccgtcccaggagatccacgccaggttccggaggggggcgcggtacttcggaaagcttgagagcaagctctcagtcatccgaaatctcaacgaccaggtactcttcatcgaccagggcaaccgccccttgttcgaggatatgaccgactccgactgccgggacaacgccccccggaccattttcatcataagcatgtacaaggactcccagccccggggcatggcggtaaccatcagcgtcaagtgcgagaagatctccaccctgtcctgcgaaaacaagatcatcagcttcaaggagatgaaccctcccgacaacatcaaggacaccaagagcgacatcatcttcttccagaggagcgtccccggccacgacaacaagatgcagttcgagtccagtagctacgagggctacttcctggcctgcgagaaggagagggatctgtttaagctcatcctcaagaaggaggacgagctgggggaccgcagcatcatgtttacggtgcagaacgaggac

SEQ ID NO: 585 - DNA, 576 bp, synthetic construct
  misc_feature 1..576: note = tPA_IL18
  source 1..576: mol_type = other DNA
atggacgccatgaagaggggcctctgctgcgtcctactcctctgcggcgccgtcttcgtgagcccctcgcaggaaatccacgcgaggttcaggcggggcgccaggtacttcggcaagctcgagtcgaagcttagcgtcatccgcaacctcaacgaccaggtcctcttcatcgaccagggcaaccgccccctcttcgaagatatgaccgacagcgactgcagggacaacgcccccaggaccatcttcatcatcagcatgtacaaggactcccagccccgggggatggccgttaccatcagcgtgaaatgcgagaagatcagcacccttagctgcgagaacaagatcatctccttcaaggagatgaacccgcccgataacatcaaggacaccaagtcggacatcatcttcttccaacgtagcgtgcccggccacgacaacaagatgcagtttgagagttccagctacgagggctacttcctcgcctgcgagaaggagcgcgacctgttcaagctcatcctgaaaaaagaggatgagctgggggacaggtccatcatgttcactgtgcagaacgaggac

SEQ ID NO: 586 - DNA, 576 bp, synthetic construct
  misc_feature 1..576: note = tPA_IL18
  source 1..576: mol_type = other DNA
atggacgcgatgaagcgggggctctgctgcgtcctactcttgtgcggcgccgtcttcgtgtcccccagccaggaaatccacgccaggttcaggaggggcgccaggtatttcggaaagctcgagagcaagctcagcgtcatcagaaacctcaacgaccaggtcctcttcatcgatcagggcaaccggcccctcttcgaggatatgaccgacagcgactgcagggacaacgccccccggaccatcttcatcatctccatgtacaaggatagccagcccaggggcatggccgtcacaatctccgtgaagtgcgagaagatcagcaccctgagctgcgaaaataagatcatctccttcaaggagatgaatccccccgataacattaaggacaccaagtccgacatcatcttcttccagaggagcgtccccggacatgacaataagatgcagttcgagagctccagctatgagggctatttcctggcctgcgaaaaggaaagggacctgttcaagctgatcctgaagaaggaagatgagctgggggaccggtccatcatgttcacagtccagaacgaggac

SEQ ID NO: 587 - DNA, 576 bp, synthetic construct
  misc_feature 1..576: note = tPA_IL18
  source 1..576: mol_type = other DNA
atggacgccatgaagcgcggtctttgctgcgtactccttctctgcggcgccgtcttcgtgtcgccgagtcaggagatccacgcgcgcttcaggaggggggcccggtacttcggcaagttggagagcaagctctcggtcatacgcaacctcaacgaccaggttctctttatcgaccagggcaataggcccctcttcgaagacatgaccgactccgactgcagggacaacgccccccggaccatctttatcatcagcatgtataaagacagccagccccgagggatggccgtcaccatctccgtcaaatgcgagaagatctccacgctgtcctgcgagaacaagatcatttccttcaaggagatgaacccccctgacaacatcaaggacaccaagtccgacatcatcttcttccaaaggagcgtgcccggccacgacaacaagatgcagttcgagagcagctcctacgaaggatacttcctcgcatgtgagaaggagcgcgatctgttcaagctgatcctgaagaaggaggacgagctgggggataggtccatcatgtttacggtgcagaacgaggac

SEQ ID NO: 588 - DNA, 576 bp, synthetic construct
  misc_feature 1..576: note = tPA_IL18
  source 1..576: mol_type = other DNA
atggacgccatgaagcggggcctttgctgcgtcttgcttctctgcggcgccgttttcgtctcccccagccaagagatccacgccaggttcaggaggggggccaggtacttcggtaagctcgagagcaagctctcggtcatcaggaacttgaacgaccaggtcctcttcatcgaccagggcaaccggcccctcttcgaggacatgaccgacagcgactgcagggacaacgcccccagaacgatcttcatcatctcgatgtacaaggacagccagccccgcggcatggccgtcaccatctccgtcaagtgcgagaagatcagcacgctgtcctgcgagaataaaatcatctccttcaaggagatgaacccacccgacaacatcaaggacaccaagagcgacatcatcttcttccagcgtagcgtgcccggccacgacaacaagatgcagttcgagagcagcagctacgagggctactttctcgcctgcgagaaggagcgcgacctgtttaagctgatcctcaaaaaggaggacgagctcggcgacaggtccatcatgttcacggtgcagaacgaggac

SEQ ID NO: 589 - DNA, 576 bp, synthetic construct
  misc_feature 1..576: note = tPA_IL18
  source 1..576: mol_type = other DNA
atggacgcgatgaagcggggcctctgctgcgtcctactcttgtgcggagccgtcttcgtttcaccgagccaggagatccacgcgcgtttccggaggggcgcccgatatttcgggaagctcgaaagcaagctcagcgtcatccgcaacctcaacgaccaggtcctcttcatcgaccaggggaacaggcccctgttcgaagacatgaccgactccgactgccgggacaacgccccccgcaccattttcatcatcagcatgtacaaagacagccagccccggggcatggccgtcacaatctccgtgaagtgtgaaaagatctccaccctgtcgtgcgagaacaagatcatcagcttcaaggagatgaacccgcccgacaacatcaaggacaccaagtccgatattatcttcttccagaggagcgtgcccggccacgacaacaagatgcagttcgaaagctcgagctacgagggctacttcctggcctgtgagaaggagcgtgatctcttcaagctgatcctcaagaaggaggacgagctcggcgataggagcatcatgtttacggtgcagaacgaggac

SEQ ID NO: 590 - DNA, 576 bp, synthetic construct
  misc_feature 1..576: note = tPA_IL18
  source 1..576: mol_type = other DNA
atggacgccatgaagaggggcctctgctgcgtcctcctcctctgcggcgccgttttcgtgagccccagccaggagatccacgcccgtttcaggaggggagcccggtatttcggcaagcttgagagcaagctcagcgtcatcaggaacctaaacgaccaggttctattcatcgaccagggcaacagacccctattcgaggacatgaccgatagcgactgtcgggacaacgccccacggaccatcttcatcatcagcatgtacaaggatagccagcccaggggcatggccgtcaccatctccgtgaagtgtgagaagatctccaccctgagctgtgagaacaaaatcatcagcttcaaggagatgaacccgcccgataatatcaaggacaccaagagcgatatcatcttcttccagaggagcgtgccgggccacgacaacaagatgcagttcgagtcctccagctacgagggttacttcctcgcctgcgagaaggaacgtgacctgttcaagctcatcctcaaaaaggaggatgagctgggggacaggagcataatgttcaccgtgcagaacgaagac

SEQ ID NO: 591 - DNA, 576 bp, synthetic construct
  misc_feature 1..576: note = tPA_IL18
  source 1..576: mol_type = other DNA
atggacgcgatgaagaggggcctctgttgtgtcctcctcctctgcggggcggtcttcgtcagccccagccaggagatccacgcccgcttccgccggggcgcccggtacttcggcaagctcgaaagcaagttgagcgttatcaggaacctcaacgaccaagtccttttcatcgaccaaggcaataggcccctcttcgaggacatgaccgacagcgactgccgggacaacgccccgcggaccatcttcatcatctccatgtataaggactcccagcccaggggcatggccgtcaccatctccgtgaagtgtgagaagatctccaccctgtcctgcgagaacaaaatcatcagcttcaaggagatgaacccgcccgataacatcaaagacacgaagtcggatataatcttcttccagaggagcgtgcccgggcatgacaataagatgcagttcgaaagcagctcctacgagggctacttcctcgcctgcgagaaggaacgggatctattcaagctgatcctgaaaaaagaggacgagctgggcgaccgcagcatcatgttcaccgtgcagaacgaggac

SEQ ID NO: 592 - DNA, 576 bp, synthetic construct
  misc_feature 1..576: note = tPA_IL18
  source 1..576: mol_type = other DNA
atggacgccatgaaacgcggtctgtgctgcgttctcctcctctgcggggccgtcttcgttagccccagccaggagatccacgcccgcttcaggaggggcgcgaggtatttcggcaagttggaaagcaagctctcggtcatccgaaacttgaacgatcaggtcctcttcatcgaccagggcaacaggcccctcttcgaggacatgaccgacagcgactgccgggataacgccccccggaccatcttcatcatcagcatgtataaggacagccagccccgcggcatggccgtcaccatcagcgtgaagtgcgagaaaatcagcaccctgagctgcgagaacaagatcatctccttcaaggagatgaacccgcccgacaacatcaaggataccaaaagcgacataatcttcttccagaggtcggtacccggccatgacaacaagatgcagttcgagagcagctcctatgagggctacttcctggcctgcgagaaggagagggatctgtttaagctcatcctcaagaaagaagatgagctgggggaccgcagcatcatgttcaccgtgcaaaatgaggac

SEQ ID NO: 593 - DNA, 576 bp, synthetic construct
  misc_feature 1..576: note = tPA_IL18
  source 1..576: mol_type = other DNA
atggacgccatgaagaggggcctctgttgcgtccttctcctctgcggcgccgtattcgtcagccccagccaggagatacacgccaggttccggaggggcgcccggtatttcggaaagctcgagagcaagctcagcgtcatccggaacctcaacgaccaggtcctcttcatcgaccaggggaatcggcccttgttcgaggacatgaccgattccgactgcagagataacgcgcccaggacgatcttcatcatctccatgtataaggacagccagccaaggggcatggccgtcaccatcagcgtgaagtgcgagaagatcagcaccctgagctgcgagaacaaaatcatctccttcaaggagatgaacccgcccgacaacatcaaggacaccaagtccgacataatctttttccagcgcagcgtgcccggccatgacaacaagatgcagttcgagagctcctcctacgaaggctacttcctggcctgcgagaaggagagggacctgttcaagctgatcctgaagaaggaggacgagctgggcgaccggagcataatgttcaccgtgcagaacgaagac

SEQ ID NO: 594 - DNA, 576 bp, synthetic construct
  misc_feature 1..576: note = tPA_IL18
  source 1..576: mol_type = other DNA
atggacgccatgaagcggggcttatgttgtgtccttctcttgtgcggcgccgtattcgtgagcccgagccaggagatccacgcccgcttcaggcggggggcgcgatacttcggcaagctcgagagcaagctctcggttatccgcaacctcaacgaccaggtcctcttcatcgaccagggcaaccgtcccctcttcgaggatatgacggattcagattgcagggacaacgccccccgcacgatattcatcatcagcatgtacaaggacagccagccccgcggcatggccgtcacgataagcgtcaagtgcgaaaagatcagcaccctgagctgtgagaacaagatcatctccttcaaggaaatgaacccgccggacaacatcaaggacacgaaaagcgacatcatattcttccaaaggagcgtgcccggccacgacaacaagatgcagttcgagtccagcagctacgagggctactttctggcctgcgaaaaagaacgcgacctgttcaagctgatcctgaagaaggaggatgagctgggggacaggagcatcatgttcaccgtgcagaacgaggac

SEQ ID NO: 595 - DNA, 576 bp, synthetic construct
  misc_feature 1..576: note = tPA_IL18
  source 1..576: mol_type = other DNA
atggacgccatgaaacgcggcctctgctgcgttctcctcctctgcggcgcggtcttcgtcagccccagccaggagattcacgcccgcttcagaaggggcgcccggtacttcgggaagctcgagagcaagctcagcgtcatcaggaacttgaacgatcaggttcttttcatcgatcaggggaacaggcccctcttcgaggacatgacagacagcgactgtcgggacaacgcccctagaaccatcttcatcatcagcatgtacaaggattcccagcccaggggcatggccgtcactatcagcgtcaagtgtgagaaaatctccaccctgagctgcgagaacaaaatcatctcgttcaaggagatgaacccacccgacaacatcaaagataccaagagcgacatcatcttcttccaacggtccgtgcccggccatgataacaagatgcagttcgagtcctccagctatgaaggctacttcctggcctgcgagaaggagagggacctgttcaagctgatcctgaagaaggaggatgagctcggcgacaggagcatcatgttcaccgtgcagaacgaggac

SEQ ID NO: 596 - DNA, 576 bp, synthetic construct
  misc_feature 1..576: note = tPA_IL18
  source 1..576: mol_type = other DNA
atggacgctatgaagcggggcctctgctgtgtcctcctcctctgtggggccgtcttcgtgtccccgagccaggaaatccacgcccgttttaggaggggggcccggtacttcggcaagctcgagagcaagctcagcgtcataaggaatctcaacgaccaggtcctcttcatcgaccaaggcaaccggccactcttcgaagatatgacggactcagactgcagggacaacgctccccgcacgatcttcataatctccatgtataaggactcgcagcccaggggcatggccgtcaccatctccgtgaagtgcgagaagatctccaccctgagctgcgagaacaaaatcatcagcttcaaggagatgaaccccccggacaacatcaaagacacgaagtccgacataatcttcttccagcggagcgtgccgggccacgacaataaaatgcagttcgaatccagctcctacgagggctacttcctggcctgcgagaaggagagggacctgttcaagctgatcctgaagaaggaggacgagctgggggaccggtcgatcatgttcacggtgcagaatgaggac

SEQ ID NO: 597 - DNA, 576 bp, synthetic construct
  misc_feature 1..576: note = tPA_IL18
  source 1..576: mol_type = other DNA
atggacgcgatgaagcggggcctctgctgtgtcctcctactctgcggggccgtcttcgttagcccgagccaggagatccacgccaggttcaggcgcggcgcccgatacttcggcaagctcgagtccaagctctccgtcatccggaacctcaacgaccaagtcctcttcatcgaccagggcaaccggccgctgttcgaggacatgaccgactccgactgtcgggacaacgcccccaggaccatcttcatcatcagtatgtataaggactcccagcccagaggcatggccgtcaccatcagcgtgaaatgcgagaagatcagcaccctgagctgcgagaataagatcatcagcttcaaggaaatgaaccccccggataatatcaaagacacgaagtcggacatcatcttcttccagaggagcgtccccggccacgacaacaagatgcagttcgagagcagcagctatgaggggtacttcctggcgtgcgagaaggagagggatctgttcaagctcatcctcaagaaggaggacgagctgggggacaggtcgatcatgttcaccgttcagaacgaggac

SEQ ID NO: 598 - DNA, 576 bp, synthetic construct
  misc_feature 1..576: note = tPA_IL18
  source 1..576: mol_type = other DNA
atggacgccatgaagcggggcctatgctgtgttctcctcctctgtggcgccgtcttcgtgagccccagccaggaaatccacgcgaggttcaggcggggcgcccggtacttcgggaagctcgagtccaagctcagcgtaatccgaaacctaaacgaccaggtcttgttcatcgaccagggcaaccggcccctcttcgaggacatgaccgacagcgactgccgggacaacgcccccaggaccatattcatcatcagcatgtacaaggacagccagcccaggggtatggccgtcacgattagcgtcaagtgcgagaagatctccacgctcagctgcgagaacaagatcatcagcttcaaggagatgaatccacccgacaatatcaaggacaccaaaagcgacatcatcttctttcagcgttccgtgcccggccacgacaacaagatgcagttcgagtccagcagctacgaaggttacttcctggcctgcgaaaaagaaagggacctgttcaagctcatcctgaagaaagaggatgagctgggcgacaggagcatcatgtttacggtgcagaacgaggac

SEQ ID NO: 599 - DNA, 576 bp, synthetic construct
  misc_feature 1..576: note = tPA_IL18
  source 1..576: mol_type = other DNA
atggacgccatgaagaggggcttatgctgcgtactcctcctatgcggcgccgttttcgtgagccccagccaggagatccacgcccggttccggaggggggccaggtacttcggtaagctggagtccaagctctccgtcatccggaacttgaacgatcaggtccttttcatcgaccagggcaacaggcccttattcgaggacatgacggactccgactgcagggataacgccccgaggaccatcttcatcatcagcatgtacaaggacagccagcccaggggcatggcggtcaccatcagcgtgaagtgcgagaagatttccaccctgagctgcgagaacaagatcatcagcttcaaagagatgaacccgccggacaatatcaaggacacgaagtccgacatcatctttttccagcggtccgtcccgggacacgacaacaagatgcagtttgagtcgagctcttacgaaggctatttccttgcctgcgagaaggagcgggatctcttcaaactgatcctgaagaaggaggacgagctgggggaccggtccatcatgtttaccgtccaaaacgaagac

SEQ ID NO: 600 - DNA, 576 bp, synthetic construct
  misc_feature 1..576: note = tPA_IL18
  source 1..576: mol_type = other DNA
atggacgccatgaaacggggcctctgctgcgtcctcctactttgcggcgccgtcttcgtaagccccagccaggagatccacgccaggtttcggcgcggcgccaggtacttcgggaaactcgagtccaagctcagcgtcatcaggaaccttaacgaccaggtcctcttcatcgaccagggcaacaggccgctgttcgaggacatgaccgactccgactgccgcgacaacgccccgaggaccatctttattatcagcatgtacaaggactcccagccccgcggaatggccgtcaccatctccgtgaagtgcgagaaaatctccaccctgagctgtgagaacaagatcatcagcttcaaggagatgaacccgcccgacaatatcaaggacaccaagtcggacatcatcttctttcagaggtccgtccccggccacgataacaagatgcagttcgagtccagctcctacgagggttacttcctcgcctgcgagaaggagagggacctgttcaagctgatcctgaaaaaggaggacgagctgggcgatcgcagcatcatgttcacggtgcagaacgaagat

SEQ ID NO: 601 - DNA, 576 bp, synthetic construct
  misc_feature 1..576: note = tPA_IL18
  source 1..576: mol_type = other DNA
atggacgccatgaagcgcggactctgctgcgtcctcctcctctgcggggcggtcttcgttagccccagccaggagattcacgcccggttccgtaggggcgcgagatacttcgggaagctcgagtccaagctatcagtcatcaggaacctaaacgaccaggtcctcttcatcgaccagggcaacaggcccctcttcgaggacatgaccgatagcgactgtcgcgacaacgcgccccggaccatctttatcatcagcatgtacaaggatagccagcccaggggcatggccgtcaccatctcggtgaagtgtgagaaaatcagcaccctctcatgtgaaaacaagatcatcagcttcaaagagatgaatccccccgacaacatcaaggacaccaagagcgacatcatcttcttccagcgttcggtgcccggccatgacaacaagatgcagttcgagtccagctcctacgagggctacttcctggcctgcgagaaggagagggacctgttcaaactgatcctcaagaaggaggacgagctgggcgacaggagcattatgttcacggtgcagaacgaggac

SEQ ID NO: 602 - DNA, 576 bp, synthetic construct
  misc_feature 1..576: note = tPA_IL18
  source 1..576: mol_type = other DNA
atggacgcgatgaagagggggctctgctgtgtcctcttattgtgcggggcagtcttcgtctcccccagccaggagatccacgcccgatttaggaggggcgcccggtacttcgggaagctcgagagcaagttgagcgtgatccggaacctcaacgaccaggtcctctttatcgaccagggcaacagaccgctgttcgaggacatgaccgacagcgattgccgcgacaacgcccccaggaccatcttcatcatcagcatgtacaaggatagccaaccgcgggggatggccgtcaccatcagcgtgaaatgtgagaagatcagcacgctgagctgtgagaacaagatcatctccttcaaggaaatgaatccccccgacaacatcaaagacactaagagcgacatcatcttcttccagcgcagcgtgcccggccacgataacaagatgcagttcgagagcagctcctacgagggctacttcctggcctgtgagaaggagagggatctgttcaagctgatcctgaagaaggaggacgagctcggggatcggagcatcatgttcaccgtgcagaacgaggac

SEQ ID NO: 603 - DNA, 576 bp, synthetic construct
  misc_feature 1..576: note = tPA_IL18
  source 1..576: mol_type = other DNA
atggacgccatgaaacggggtttgtgctgcgtcctcttgctctgcggggccgtattcgtttcccccagccaggagatccacgcccggttcaggcggggcgccaggtacttcgggaagctcgagagtaagctaagcgtcatccgtaacctcaacgaccaggtcctcttcatcgatcagggcaacaggcccctcttcgaggacatgaccgatagcgactgccgggacaacgccccccggaccatctttatcatcagcatgtacaaggacagccagcccagagggatggccgtcaccatcagcgtgaagtgcgagaaaatctccacactgtcatgcgagaacaagatcatctcctttaaggagatgaatccgcctgacaacataaaggacaccaagtccgacatcatcttcttccaacggagcgtacccggccatgataacaagatgcagttcgagagcagcagctacgagggctacttcctggcctgcgaaaaggagcgagatctcttcaagctgatcctgaagaaggaggacgagctgggcgaccgcagcattatgttcacggtgcagaacgaggat

SEQ ID NO: 604 - DNA, 576 bp, synthetic construct
  misc_feature 1..576: note = tPA_IL18
  source 1..576: mol_type = other DNA
atggacgccatgaagaggggcctttgttgtgtcctcctcctctgcggggccgtcttcgtgagcccctcgcaagagatccacgcccggtttaggcggggcgcccggtacttcgggaagcttgaaagcaagctcagcgttatccgcaacctcaacgatcaggtccttttcatcgatcagggcaaccgccccctcttcgaggatatgaccgactccgattgcagggataacgcccccaggaccatctttatcatcagcatgtacaaggacagccagcccaggggcatggccgtaaccatcagcgtgaagtgcgaaaagatttccaccctctcctgcgagaacaaaatcatctccttcaaggagatgaatccccctgacaatatcaaggacaccaagagcgacatcatctttttccagaggtccgtgcccggacacgacaacaagatgcagttcgagagctccagctacgaaggctacttcctggcctgcgagaaagagcgggacctgttcaagctaatcctgaagaaggaagatgagctgggcgatcggagcatcatgttcaccgtccaaaacgaggat

SEQ ID NO: 605 - DNA, 576 bp, synthetic construct
  misc_feature 1..576: note = tPA_IL18
  source 1..576: mol_type = other DNA
atggacgcgatgaagcgagggctctgctgcgtcctcctcctctgcggcgccgtcttcgtcagccccagccaggagatccacgccaggttcaggaggggggctaggtatttcgggaagcttgagtccaagctctccgttatcaggaacctcaacgaccaggtcctcttcatcgaccagggcaaccggcccctcttcgaggacatgaccgacagcgactgcagggacaacgcccccaggaccatcttcatcatcagcatgtacaaggattcccagccaaggggcatggccgtcacaatctccgtgaagtgtgagaaaatcagcaccctgagctgcgaaaacaagataatcagcttcaaggagatgaacccgcccgataacatcaaggacaccaagagcgatatcattttcttccagcgcagcgtgcccggccatgacaacaagatgcagttcgaaagctcgagctatgagggctacttcctggcctgcgagaaggagagggacctgttcaagctcatcctgaagaaggaggatgagctgggggacaggagcattatgttcacggtccagaacgaggac

SEQ ID NO: 606 - DNA, 576 bp, synthetic construct
  misc_feature 1..576: note = tPA_IL18
  source 1..576: mol_type = other DNA
atggacgccatgaagagggggttgtgctgcgtccttctcctctgcggggccgtcttcgtgagcccgagccaggagatacacgccaggttcaggaggggcgcccgctatttcggcaagcttgaaagcaagctcagcgtcatccggaacctcaacgaccaggtcctctttatcgaccaggggaacaggcccttgttcgaggatatgacggactccgactgtagggacaacgccccccgaaccatctttatcatcagcatgtacaaggacagccagcccaggggcatggccgtcacgatcagcgtgaagtgcgagaaaatcagcacactcagctgtgagaacaagatcatcagctttaaagagatgaacccgcccgacaacatcaaggacaccaagagcgacatcatcttcttccagcgcagtgtgcccggccacgataacaaaatgcagttcgagtccagcagctacgagggctacttcctggcctgtgagaaggagagggacctgttcaagctgatcctgaagaaggaggatgagctcggcgacaggagcatcatgtttacggtgcagaacgaggac

SEQ ID NO: 607 - DNA, 576 bp, synthetic construct
  misc_feature 1..576: note = tPA_IL18
  source 1..576: mol_type = other DNA
atggacgccatgaagaggggactctgctgcgtactccttctctgcggcgccgtcttcgtcagcccgagccaggaaatccacgcccggttccggcggggggccaggtacttcggcaagctcgagagcaagctcagcgtcatccggaacctcaacgatcaggtcctcttcatcgaccagggcaacaggcccctcttcgaggacatgacggacagcgactgcagagacaacgccccgaggactatcttcatcatcagcatgtacaaggacagccagccccgcggcatggcggtcaccatttcggtgaagtgcgagaagataagcacgctcagctgcgaaaacaagatcatctcctttaaggagatgaacccgccggacaacatcaaggacaccaagagcgacatcatcttcttccagaggagcgtgcccggccacgacaataagatgcagttcgagtcctccagctatgagggttacttcctggcctgcgagaaggagagggacctgttcaaactgatactgaagaaggaagacgagctgggcgataggtccataatgttcaccgtgcagaacgaggac

SEQ ID NO: 608 - DNA, 579 bp, synthetic construct
  misc_feature 1..579: note = IL18_WT
  source 1..579: mol_type = other DNA
atggccgccgagccagttgaagacaactgcatcaacttcgtcgccatgaagtttatcgacaacacgctctactttatcgccgaggacgacgagaatctcgagtccgactacttcggcaaactcgagagcaagctcagcgtcatccggaacctaaacgaccaggtccttttcatcgaccagggcaacaggccgctgttcgaagacatgaccgactccgattgcagggataacgccccgaggaccatattcatcatctcgatgtataaggactcccagcccaggggcatggccgtcacgatctccgtgaagtgcgagaagatctccaccctctcctgcgagaacaagatcatctccttcaaggagatgaatccccccgacaacataaaggacaccaagtccgacattatcttcttccagaggagcgtgcctggccatgacaacaagatgcagttcgagtccagctcctacgagggctacttcctggcctgcgagaaggagcgggacctgttcaagctgatcctcaagaaggaggacgagctgggggataggtccatcatgttcaccgtgcagaacgaggac

SEQ ID NO: 609 - DNA, 579 bp, synthetic construct
  misc_feature 1..579: note = IL18_WT
  source 1..579: mol_type = other DNA
atggccgccgagcccgtcgaggataactgcatcaacttcgttgccatgaagttcatcgacaacacgctctacttcatcgcggaggacgacgagaacctcgagtccgattacttcggcaagcttgagtccaagcttagcgtcatcaggaatctcaacgaccaggttttgttcatcgaccagggcaacaggcccctattcgaagacatgaccgattcagactgtcgggacaacgcccccaggaccatcttcataataagcatgtacaaggattcccagcccaggggcatggccgtcaccatctccgtgaagtgcgagaagatctccaccctcagctgcgagaataagatcatctccttcaaggagatgaacccgcccgacaacatcaaggacactaagtccgacatcatcttcttccagaggagcgtccccggccatgataacaagatgcagttcgagagcagcagctacgaggggtacttcctggcctgcgagaaggagagggatctgttcaagctcatcctcaaaaaggaggacgagctgggggacaggtccatcatgttcaccgtgcagaacgaggac

SEQ ID NO: 610 - DNA, 579 bp, synthetic construct
  misc_feature 1..579: note = IL18_WT
  source 1..579: mol_type = other DNA
atggcggccgagcccgtcgaagacaactgcatcaacttcgtcgccatgaagttcatcgacaacacactctacttcatcgccgaggacgacgagaacctcgagagcgactacttcgggaaactcgagagcaagctatccgtcatcaggaacctcaacgaccaggtcctcttcatcgaccagggcaacaggcccctcttcgaggacatgacggatagcgattgcagggataacgcccctaggaccatcttcatcatctccatgtacaaggacagccagccgagaggcatggcggtcaccatttccgtgaagtgcgagaagatcagcaccctgagctgcgagaacaagatcatcagctttaaagagatgaacccgccggacaacataaaagacactaagagcgacatcatcttcttccagaggagcgtccccggccacgacaacaagatgcagttcgagtccagcagctacgaggggtacttcctggcctgcgagaaggagagggatctgttcaagctgatcctcaagaaagaggacgagctgggtgaccgaagcatcatgttcaccgtgcagaacgaggac

SEQ ID NO: 611 - DNA, 579 bp, synthetic construct
  misc_feature 1..579: note = IL18_WT
  source 1..579: mol_type = other DNA
atggcggccgagccagtcgaggacaactgcatcaatttcgtcgccatgaagttcatcgacaacaccttgtacttcatcgccgaggacgacgagaacctcgagagcgattacttcggcaagctcgagagcaagttgagcgtaatcaggaacttgaacgaccaggtcctcttcatcgaccagggcaacaggccccttttcgaggatatgaccgacagcgactgcagggacaacgcgcctcgcaccatctttatcatcagcatgtacaaggattcccagcccagggggatggccgtcaccatatcggtgaagtgcgagaaaatctccaccctgagctgcgagaacaagatcatcagctttaaggagatgaatccccccgacaatatcaaggacaccaagtccgacatcatcttcttccagaggtcggtccccggtcacgataataagatgcagtttgagtccagctcctacgagggctactttctggcctgcgagaaggagcgggacctgttcaaactgattctgaagaaggaggacgagctgggggataggagcatcatgttcaccgtccaaaacgaggac

SEQ ID NO: 612 - DNA, 579 bp, synthetic construct
  misc_feature 1..579: note = IL18_WT
  source 1..579: mol_type = other DNA
atggccgccgagcccgtagaggataactgcatcaacttcgttgccatgaagttcatcgacaacacgttgtacttcatcgccgaggacgacgagaacctcgagtccgattacttcggcaagctcgagagcaaactttccgtcattaggaatctcaacgaccaggtcctcttcatcgaccagggcaataggcccctcttcgaggacatgaccgactccgactgcagggacaacgcccccaggaccatcttcatcatctccatgtacaaggacagccagccccggggcatggccgtcaccatcagcgtgaagtgcgaaaagatcagcaccctgagctgtgagaacaagatcatcagcttcaaggagatgaacccgcccgacaacatcaaggacacgaagtccgatatcatcttcttccaacgctccgtgcccggccacgacaacaagatgcagttcgaatccagctcatacgaggggtacttcctggcgtgcgagaaggagagagatctgttcaagctgatcctgaaaaaggaggacgagctgggcgacaggagcatcatgttcacggtccagaacgaggac

SEQ ID NO: 613 - DNA, 579 bp, synthetic construct
  misc_feature 1..579: note = IL18_WT
  source 1..579: mol_type = other DNA
atggccgccgagcccgtcgaggacaactgcatcaacttcgtagcgatgaagttcatcgacaataccctctacttcatcgccgaggacgacgagaacctcgagagcgactacttcggcaaactcgagagcaagctcagcgtcatcaggaacttgaacgaccaagtcctcttcatagatcagggcaacaggcccctcttcgaggatatgaccgatagcgactgccgggacaacgccccgaggaccatcttcatcatcagcatgtacaaggacagccagcccaggggcatggcggtcaccatctcggtgaagtgcgagaagatctccaccctgagctgtgagaacaagatcatcagcttcaaggagatgaaccctcccgacaacatcaaggacaccaaaagcgatataatcttctttcagaggagcgtgcccggccacgacaacaagatgcagtttgagtcctcgagctacgagggctacttcctggcatgcgaaaaggaacgggacctgttcaagctgatcctgaagaaagaggacgagctgggggaccggagcatcatgttcaccgtgcagaatgaggat

SEQ ID NO: 614 - DNA, 579 bp, synthetic construct
  misc_feature 1..579: note = IL18_WT
  source 1..579: mol_type = other DNA
atggccgccgagcccgtagaagataactgcatcaacttcgtcgcgatgaagtttatcgacaatacgctatacttcatcgccgaggacgacgaaaacctcgagtccgactacttcggaaagcttgagagcaagctcagcgtcatccggaacctcaacgaccaggtcctctttatcgaccagggcaaccggccgctgttcgaggacatgaccgactccgactgccgggacaacgccccgcgaaccatattcatcatcagcatgtacaaggacagccagccccgcggcatggccgtaactatcagcgtcaagtgcgagaagatcagcaccctgagctgcgaaaataagatcatctcctttaaggagatgaacccgcccgataacatcaaggataccaagtccgacatcatctttttccagaggagcgtgcccggccacgataataagatgcagttcgagagcagcagctacgaggggtacttcctggcctgcgagaaggagagggatctcttcaagctgatcctgaagaaagaggatgaactgggcgacagaagcatcatgttcaccgtgcaaaacgaggac

SEQ ID NO: 615 - DNA, 579 bp, synthetic construct
  misc_feature 1..579: note = IL18_WT
  source 1..579: mol_type = other DNA
atggccgccgagcccgttgaggacaactgcattaacttcgtcgcgatgaagttcatcgataacaccctctacttcatcgccgaggacgacgagaacctcgagagcgattacttcgggaagcttgaatccaagctcagcgtaatcaggaaccttaacgaccaggtcctctttatcgaccagggcaacaggccgctgttcgaggatatgaccgacagcgactgcagggacaacgcccccaggaccatcttcatcatctccatgtacaaggacagccagcccaggggcatggccgtcaccatcagcgtgaagtgcgagaagatcagcaccctgtcctgcgaaaacaagatcatctccttcaaggagatgaacccgcccgacaacatcaaggatacaaagtccgacatcatctttttccagcggagcgtgcccggccacgacaacaagatgcagttcgagagcagcagctacgaggggtacttcctggcgtgcgagaaggagcgggatctgttcaagctgatcctgaagaaggaggacgagctcggcgaccggtccatcatgttcactgtccagaacgaagac

SEQ ID NO: 616 - DNA, 579 bp, synthetic construct
  misc_feature 1..579: note = IL18_WT
  source 1..579: mol_type = other DNA
atggccgcggagcccgtcgaggacaactgtatcaacttcgtcgcgatgaagttcatcgacaataccctctacttcatcgccgaggacgacgagaacctcgaaagcgactacttcggcaagctcgagtccaagctctccgttatcaggaacctcaacgaccaggtcctctttatcgaccagggcaacaggcctctcttcgaggacatgaccgactcggattgtcgggacaacgccccgcggaccatctttatcatcagcatgtacaaggattcgcagcccaggggcatggccgtcaccatcagcgtgaaatgcgagaaaatttccaccctgagctgcgagaacaagataatcagcttcaaagagatgaacccgcccgacaacatcaaggacacaaagagcgacatcatcttctttcagcgcagcgtgcccggccacgacaacaagatgcagttcgagagcagcagctatgaggggtactttctggcctgcgagaaggagagggatctgttcaagctcatactcaagaaggaggatgagctgggggacaggagcattatgttcaccgtgcagaacgaggac

SEQ ID NO: 617 - DNA, 579 bp, synthetic construct
  misc_feature 1..579: note = IL18_WT
  source 1..579: mol_type = other DNA
atggccgccgagcccgtcgaggacaactgcatcaacttcgtcgccatgaagttcatcgacaacacgctctacttcatcgcggaggacgacgagaatctcgagtccgattatttcggtaagctagagtccaaactcagcgtaatcaggaacctcaacgatcaggttctctttatcgaccaggggaacaggcccctcttcgaggatatgaccgacagcgactgcagggataacgccccgcggaccatcttcatcatctccatgtataaggactcccagcccaggggcatggccgtcaccataagcgtcaagtgcgagaagatcagcacgctcagctgtgagaacaagatcatctccttcaaggagatgaatccccccgacaacatcaaggacaccaagagcgacatcatctttttccaaaggagcgtgcccggccacgacaacaagatgcagttcgagtcctcttcctacgaggggtattttctggcctgcgagaaggaacgggacctgtttaagctgatcctgaaaaaggaggatgagctgggcgacaggagcatcatgttcacggtgcagaacgaggac

SEQ ID NO: 618 - DNA, 579 bp, synthetic construct
  misc_feature 1..579: note = IL18_WT
  source 1..579: mol_type = other DNA
atggccgccgagccggtcgaggacaactgtatcaacttcgttgccatgaagtttatcgacaataccctatacttcatcgcggaggacgacgagaacctcgagtccgattacttcggcaagctcgagagcaaactctccgtcatccggaacctcaacgaccaggtcctcttcatcgaccagggcaacaggccgctattcgaggacatgaccgatagcgattgcagggacaacgcgccgaggaccatcttcatcatctccatgtacaaggacagccaaccccgcgggatggccgtcaccataagcgtgaagtgcgaaaagatcagcacactgtcatgtgagaacaaaatcatctcgttcaaggagatgaacccacccgacaacatcaaggacacgaagtccgacatcatctttttccagcggagcgtgcccggccacgataacaagatgcagttcgagagctccagctacgaaggttacttcctggcgtgcgagaaggagcgggatctgtttaagctgatcctgaaaaaggaggatgagctgggggaccgcagcatcatgttcaccgtgcagaatgaggac

SEQ ID NO: 619 - DNA, 579 bp, synthetic construct
  misc_feature 1..579: note = IL18_WT
  source 1..579: mol_type = other DNA
atggccgcggagcccgttgaggacaactgcatcaacttcgttgccatgaagttcatcgacaacacgttgtacttcatagccgaggacgacgagaacctcgagtccgattacttcggcaaactcgagagcaagctcagcgtcatcaggaatctcaacgaccaggtattattcatcgaccagggcaacaggcccctcttcgaggatatgaccgacagcgactgtcgggacaacgccccgaggaccatctttatcataagcatgtacaaggactcccagccccgaggcatggcagtcaccatcagcgtaaagtgcgaaaaaatctccaccctgagctgcgagaacaagatcatctccttcaaggagatgaaccctcccgacaacatcaaggataccaagagcgacatcatcttcttccagaggtccgtgcccggccatgacaacaagatgcagttcgagagctccagctacgaggggtacttcctggcctgcgagaaggagagagatctgttcaagctgatcctcaagaaggaggacgagctgggggaccggagcatcatgttcacagtccagaatgaggac

SEQ ID NO: 620 - DNA, 579 bp, synthetic construct
  misc_feature 1..579: note = IL18_WT
  source 1..579: mol_type = other DNA
atggccgccgagcccgtcgaggacaactgcatcaacttcgtcgccatgaagtttatcgataataccctctactttatcgccgaggacgacgagaatctcgaaagcgattacttcggaaagctcgaatccaagctaagcgtcatccggaacctcaacgaccaggttctctttatcgaccagggcaaccgccccctcttcgaggacatgaccgacagcgattgcagggacaacgcaccccggacgatcttcatcatcagcatgtacaaggacagccagccccggggcatggccgtcaccatcagcgtgaagtgtgaaaagatctccaccctcagctgcgagaacaagatcatctccttcaaggagatgaaccccccagacaacatcaaggacaccaagtccgacatcatcttcttccaaaggagcgtgccgggccacgacaacaagatgcagttcgagtccagctcatacgaggggtacttcctggcgtgcgagaaggagcgggacctgttcaagctcatcctcaagaaggaggatgagctcggggacaggtccataatgttcaccgtccagaacgaagac

SEQ ID NO: 621 - DNA, 579 bp, synthetic construct
  misc_feature 1..579: note = IL18_WT
  source 1..579: mol_type = other DNA
atggccgccgagcccgtcgaggataattgtatcaacttcgtcgcgatgaagttcatcgacaacaccctctacttcatcgccgaggacgacgagaacctcgaatccgactacttcggcaagctcgagtccaagctcagcgtcatcaggaaccttaacgaccaggtcctcttcatcgatcaagggaatcgacccctattcgaggatatgaccgacagcgactgtcgggacaacgccccccggaccatcttcatcatcagcatgtacaaagactcccagccgagggggatggccgtcaccatcagcgtgaagtgcgaaaaaataagcaccctgtcgtgtgagaacaaaatcatcagcttcaaggagatgaaccccccggacaacataaaggacaccaagagcgacatcatcttcttccagaggagtgtccccgggcacgacaacaagatgcagtttgagagctccagctacgagggctacttcctggcttgcgagaaggagagggacctgttcaagctcatcctcaaaaaggaggacgagctgggcgacaggagcatcatgttcaccgtccagaacgaagac

SEQ ID NO: 622 - DNA, 579 bp, synthetic construct
  misc_feature 1..579: note = IL18_WT
  source 1..579: mol_type = other DNA
atggccgccgaacccgtcgaagacaactgcatcaacttcgttgccatgaagttcatcgacaacaccctctactttatcgcagaggacgacgagaacctcgagagcgactacttcggaaagctcgagagcaagctcagcgtaatcaggaacctcaacgaccaggtcctgttcatcgaccagggcaacaggcccctcttcgaagacatgacggactccgattgccgcgataacgcccccaggaccatcttcatcatcagcatgtacaaggacagccagccccgaggcatggccgtcaccatatccgtcaagtgcgagaagatctcgacgctgagctgcgagaacaagatcatcagcttcaaggagatgaacccacccgacaacatcaaggacacgaaaagcgatatcatcttcttccagaggtcagttcccgggcacgacaataagatgcagttcgagtcgagcagctacgaggggtacttcctggcgtgcgagaaggagagggacctgttcaagctcatcctgaagaaggaagatgagctgggtgacaggagcatcatgttcaccgtgcagaacgaagac

SEQ ID NO: 623 - DNA, 579 bp, synthetic construct
  misc_feature 1..579: note = IL18_WT
  source 1..579: mol_type = other DNA
atggccgccgagcccgtcgaggataattgcatcaacttcgtcgccatgaaatttatcgacaacaccctctactttatcgccgaggacgacgagaacctcgaatccgattacttcggcaagctcgagagcaagctctcggtcatccggaacctcaacgatcaagtactcttcatcgaccagggcaacaggcccctcttcgaggatatgaccgactccgactgcagggacaacgcccccaggaccatcttcatcatcagcatgtacaaggacagccagcccagggggatggccgtaaccatctccgtgaagtgcgagaaaataagcaccctgagctgtgagaacaagatcatcagcttcaaggagatgaaccccccggacaacatcaaggacacaaagagcgacattatcttcttccagaggagcgtgccagggcacgataacaagatgcagttcgaatcctcctcctatgaggggtacttcttggcgtgcgagaaggagagggacctcttcaagctgatcctcaagaaagaggatgagctgggggataggagcatcatgttcaccgtccagaacgaggac

SEQ ID NO: 624 - DNA, 579 bp, synthetic construct
  misc_feature 1..579: note = IL18_WT
  source 1..579: mol_type = other DNA
atggccgccgagcccgtcgaggacaactgcatcaacttcgtcgccatgaagtttatcgacaacaccctctacttcatcgccgaggacgacgagaacctcgaaagcgactacttcgggaagctcgagtccaagctcagcgtcatcaggaacctcaacgaccaggtcctgttcatcgaccagggcaacaggcccctcttcgaggacatgaccgacagcgactgcagggacaacgcccccaggaccatcttcattatcagcatgtacaaggacagccagccgcgcggcatggccgtcaccatcagcgtgaagtgcgagaagatcagcaccctgagctgtgagaacaagatcatcagcttcaaggagatgaacccgcccgacaacataaaggacaccaagtcagatatcatctttttccagaggagcgtgcccggccacgacaacaagatgcagttcgagagctccagctacgaagggtatttcctggcctgcgagaaggagagggacctcttcaagctgattctgaagaaggaggacgagctgggggacaggagcatcatgttcaccgtgcagaacgaggac

SEQ ID NO: 625 - DNA, 579 bp, synthetic construct
  misc_feature 1..579: note = IL18_WT
  source 1..579: mol_type = other DNA
atggccgccgagcccgtagaggacaactgcatcaacttcgtggccatgaagtttatcgacaacaccctctacttcatcgccgaggacgacgagaacctcgagtccgactacttcgggaaactcgagagcaagctctcggtcatccggaatctcaacgaccaggttctcttcatcgaccagggcaataggcccctcttcgaagacatgaccgatagcgactgtcgggacaacgccccccgtaccatcttcatcatctccatgtacaaggattcacagccccgaggcatggcggtcacgatcagcgtgaagtgcgagaagatcagcaccctgagctgcgaaaataagatcataagcttcaaggagatgaacccgccggacaacatcaaggacaccaaaagcgacatcatcttcttccagcgaagcgtccccggccacgacaacaagatgcagttcgagtcctcctcctacgaagggtactttctggcctgtgagaaggagagggatctgttcaagctgatcctcaagaaggaggatgaactgggcgacaggagcatcatgttcaccgtccagaacgaggat

SEQ ID NO: 626 - DNA, 579 bp, synthetic construct
  misc_feature 1..579: note = IL18_WT
  source 1..579: mol_type = other DNA
atggcagccgagccagttgaggacaattgtatcaacttcgtggcgatgaaattcatagacaataccttgtacttcatcgccgaggacgacgaaaacttagagagcgactacttcggcaagcttgagagcaagctcagcgtcatccggaatctcaacgaccaggtcctcttcatcgatcaggggaacaggcccctcttcgaggatatgaccgactcggactgcagggacaacgcccccaggacgatcttcatcatctccatgtacaaggattcccaaccccgcgggatggccgtcacgatcagcgtgaagtgtgagaaaatcagcaccctttcctgcgagaataagatcatctcctttaaggagatgaacccgcccgacaacatcaaggacaccaagtccgacatcatctttttccagcgcagcgtgcccggccacgacaacaagatgcagttcgagtccagctcctacgagggctacttcctggcctgcgagaaggagagggacctctttaagctaatcctcaagaaggaggacgagctcggggacaggagcatcatgttcaccgtgcagaacgaggac

SEQ ID NO: 627 - DNA, 579 bp, synthetic construct
  misc_feature 1..579: note = IL18_WT
  source 1..579: mol_type = other DNA
atggcggcggagcccgtcgaggacaattgcatcaatttcgtggccatgaagttcatcgacaatacactctactttatcgccgaagacgacgagaacctcgagtccgactacttcggcaagctcgagagcaagctcagcgtcatcaggaacctcaacgaccaggtcctcttcatcgaccaggggaacaggcccctattcgaggacatgaccgactcggactgcagggacaacgcccccaggacaatcttcatcatcagcatgtacaaggactcccagcccaggggcatggccgtcaccattagcgtgaagtgcgagaagatctccaccctgagctgcgagaacaagatcatctccttcaaggagatgaaccctcccgacaatatcaaggacacgaaaagcgacatcatcttcttccagaggagcgtgccgggtcacgataacaagatgcagttcgagtcctcgagctacgaggggtactttctggcctgcgaaaaggagagggacctgttcaaactgatcctgaagaaggaggacgaactgggcgaccggagcatcatgttcaccgtccagaacgaggac

SEQ ID NO: 628 - DNA, 579 bp, synthetic construct
  misc_feature 1..579: note = IL18_WT
  source 1..579: mol_type = other DNA
atggcagcggagcccgtcgaggacaactgtatcaacttcgtggccatgaagtttatcgacaatacgctatacttcatcgccgaggacgacgagaatctcgagtccgactacttcggcaagctcgagagcaagctcagcgtcatcaggaatctcaacgatcaggtcctatttatcgaccaggggaacaggcccctcttcgaggacatgaccgactccgactgcagggacaacgcccccaggaccatctttatcattagcatgtacaaggacagccagcccagggggatggccgtcacaatcagtgtcaagtgcgagaagatcagcacgctgtcatgcgagaataagatcatcagctttaaagagatgaacccgcccgacaatataaaggataccaaatccgacatcatcttcttccagaggagcgttccgggccacgacaacaagatgcagttcgagtcctcctcctacgagggctatttcctcgcctgcgagaaggagagggacctgttcaagctcatactcaagaaggaggacgagctcggcgacagaagcatcatgttcaccgtgcaaaacgaggat

SEQ ID NO: 629 - DNA, 579 bp, synthetic construct
  misc_feature 1..579: note = IL18_WT
  source 1..579: mol_type = other DNA
atggccgccgagccggtcgaggacaactgcataaatttcgtcgccatgaagttcatagacaacaccctatacttcatcgccgaagacgacgagaacctcgagagcgactacttcggaaagctcgagagcaagctttcggttatcaggaatttgaacgaccaggtcctcttcatcgatcagggcaataggcccctcttcgaggatatgaccgactcggactgcagggataacgcccccaggacaatcttcataatcagcatgtacaaggacagccagcccagaggcatggccgtcactatttctgtcaagtgcgagaagatcagcacgctgagctgcgagaacaaaatcatcagctttaaagagatgaacccgcccgacaacatcaaggacaccaagagcgacatcatcttcttccagaggagcgtccccgggcatgacaacaagatgcagttcgagagcagctcctacgagggctattttctcgcctgcgagaaggagagggacctgtttaagctcatcctgaagaaggaggacgagctgggggacaggtccatcatgtttacggtgcagaacgaggac

SEQ ID NO: 630 - DNA, 579 bp, synthetic construct
  misc_feature 1..579: note = IL18_WT
  source 1..579: mol_type = other DNA
atggccgccgagcccgtcgaagacaactgcatcaacttcgtagccatgaagttcatcgacaacacactctacttcatcgccgaggacgacgagaacttggagtccgactacttcggcaagctcgagagcaagttgagcgtcatcagaaacctcaacgaccaggtcctcttcatagaccaggggaacaggcccctcttcgaggacatgaccgacagcgactgccgggacaacgcccccaggaccatattcatcatcagcatgtataaggacagccagcccaggggcatggccgtcacgatcagcgtcaagtgcgagaagatcagcacgctgtcctgcgagaacaagatcatcagcttcaaggagatgaaccccccggacaacatcaaggacaccaaatccgacatcatcttcttccagcgaagcgtgcccggccacgataacaagatgcagtttgagagcagcagctacgaggggtacttcctggcctgcgagaaggagagggacctcttcaagctgatcctgaagaaagaggacgagctgggcgacaggagcatcatgttcactgttcagaacgaggac

SEQ ID NO: 631 - DNA, 579 bp, synthetic construct
  misc_feature 1..579: note = IL18_WT
  source 1..579: mol_type = other DNA
atggccgccgagccggtggaggataactgcatcaacttcgtcgccatgaagttcatagacaataccctctacttcatcgccgaggacgacgaaaacctcgagtccgattatttcgggaagctcgagagcaagctcagcgtcatcaggaacctcaacgaccaggtcctctttatcgaccaggggaaccggcccttgttcgaggatatgaccgactcagactgcagggataacgcgccccggaccatcttcatcatttccatgtataaggacagccagccgcggggcatggccgtcaccatcagcgtaaagtgcgagaaaatcagtaccctgagctgcgagaacaagatcatcagcttcaaggagatgaacccgccggacaacatcaaagacaccaagtccgatatcatcttcttccaacggtccgtccccggacacgacaataagatgcagttcgagagcagctcctacgaggggtacttcctggcctgtgaaaaggagcgagatctgttcaagctgatcctgaagaaggaggatgagctgggcgacagaagcattatgttcacagtccaaaacgaggac

SEQ ID NO: 632 - DNA, 579 bp, synthetic construct
  misc_feature 1..579: note = IL18_WT
  source 1..579: mol_type = other DNA
atggccgccgagcccgtcgaagacaactgcatcaacttcgtggccatgaaattcatcgacaataccctttactttatcgccgaggacgacgaaaacctcgaaagcgactacttcggcaagctagagtccaagctcagcgtcattaggaacctaaacgatcaagtcctcttcatcgaccagggcaataggcccctcttcgaggacatgaccgatagcgactgcagggacaacgcccccaggaccatcttcataatcagcatgtacaaggacagccagcccaggggcatggccgtcaccatcagcgtcaagtgtgagaagatctccacgctgagctgcgaaaacaagatcatctccttcaaggagatgaacccgcccgacaacatcaaggataccaagtccgacatcatcttcttccaacggagcgtgcccggccacgacaacaagatgcagttcgagagcagcagctatgagggctacttcctggcgtgcgagaaagagagggacctcttcaagctgatcctgaagaaggaggacgagcttggggacaggagcatcatgttcaccgtccaaaatgaggat

SEQ ID NO: 633 - DNA, 579 bp, synthetic construct
  misc_feature 1..579: note = IL18_WT_SN
  source 1..579: mol_type = other DNA
atggccgccgagcccgtcgaggacaactgcatcaacttcgtggccatgaagtttatcgacaacaccctctacttcatcgccgaggacgacgagaatctcgagagcgactacttcggaaagcttgagagcaagctttccgtcatccggaacctcaacgaccaggttctcttcatcgaccagggcaacaggcccctcttcgaggacatgaccagcagcgactgcaggaacaacgcccccaggaccatcttcatcatcagcatgtataaggactcccagcccaggggcatggccgtcaccatctccgtgaagtgcgagaagatctccaccctcagctgtgagaacaagatcatcagcttcaaggagatgaacccacccgacaacatcaaggacaccaagagcgacatcatcttcttccagcggtcagtccccgggcacgacaacaagatgcagttcgaaagcagctcctatgagggctatttcctggcctgcgagaaggagcgggacctcttcaagctgatactgaagaaggaggacgagctgggggataggtccatcatgttcacggtgcaaaacgaggac

SEQ ID NO: 634 - DNA, 579 bp, synthetic construct
  misc_feature 1..579: note = IL18_WT_SN
  source 1..579: mol_type = other DNA
atggccgccgagcccgttgaggacaactgcatcaacttcgtggccatgaagttcatcgataacacactctacttcatcgcggaagacgacgagaacctcgagtccgattacttcgggaaactcgagagcaagctcagcgtcatccgcaacctcaacgatcaggtccttttcatcgaccagggcaacaggccgttgttcgaggacatgacaagcagcgactgccggaataacgccccgaggaccatctttatcatcagcatgtacaaggacagccagccccggggcatggccgtcaccatcagcgtgaagtgcgagaaaatcagcaccctgtcctgtgagaacaagatcatcagcttcaaggagatgaacccacccgataacatcaaggacaccaagtccgacatcatcttcttccagcgttccgtgccgggccatgacaacaagatgcagttcgagagctccagctacgaggggtacttcctggcctgcgagaaggagcgggatctgttcaagctgatcctgaagaaggaggacgagctgggcgaccgctccatcatgttcaccgtgcagaacgaggac

SEQ ID NO: 635 - DNA, 579 bp, synthetic construct
  misc_feature 1..579: note = IL18_WT_SN
  source 1..579: mol_type = other DNA
atggccgccgagcccgtcgaggataactgcatcaacttcgtcgccatgaagttcatagacaacaccctctacttcatcgccgaggacgacgagaatctcgagtccgactacttcggtaagctcgagagcaagctcagcgttattcgcaacctcaacgaccaagtcctcttcatcgaccaggggaaccggccccttttcgaagacatgactagcagcgactgcaggaataacgcgccgcggacgatcttcatcataagcatgtacaaggacagccagcccaggggcatggccgtcaccatcagcgtgaagtgcgagaagataagcacgctgagctgcgagaacaagatcatctccttcaaggagatgaaccctcccgataatatcaaagacaccaaatccgacatcatcttctttcagaggagcgtgcccggccacgacaacaagatgcagtttgagagcagcagctacgaggggtacttcctggcctgcgagaaggaacgggatctgtttaagctgatcctgaaaaaggaggacgagctgggggaccgcagcatcatgtttaccgtccagaacgaggac

SEQ ID NO: 636 - DNA, 579 bp, synthetic construct
  misc_feature 1..579: note = IL18_WT_SN
  source 1..579: mol_type = other DNA
atggccgccgaaccagtcgaggacaattgcatcaacttcgttgccatgaagttcatcgacaacacgctctacttcatcgccgaggacgacgaaaacctcgagtccgactacttcggcaagctcgaatccaagctctccgtcatccggaacctcaacgaccaggtcctcttcatcgaccaggggaaccgccccctcttcgaagacatgaccagcagcgattgtcggaataacgcccccaggaccatcttcataatctccatgtacaaggactcgcagcccaggggcatggccgttaccatcagcgtgaagtgcgagaagatctccaccctgagctgcgagaataagatcatctccttcaaggagatgaacccgcccgataacatcaaggacaccaagtccgacatcatcttcttccagaggagcgtgcccggccacgacaacaagatgcaattcgaaagcagcagctacgaggggtacttcctggcctgcgagaaggagcgggacctcttcaaactgatcctcaagaaggaggacgagctgggcgaccggagcatcatgttcaccgtgcagaacgaggac

SEQ ID NO: 637 - DNA, 579 bp, synthetic construct
  misc_feature 1..579: note = IL18_WT_SN
  source 1..579: mol_type = other DNA
atggccgccgagccagtcgaagataactgcatcaatttcgtcgccatgaagttcatcgacaacacgctctacttcatcgccgaggacgacgaaaacttggagagcgactacttcgggaagctcgagtccaagctctccgtcatccggaatttaaacgaccaggtcctcttcatcgaccagggcaacaggcccttattcgaagacatgacctcgtccgactgccggaacaacgccccacggaccatcttcatcatcagcatgtacaaggacagccaaccgcggggcatggccgtcaccatcagcgtgaagtgcgagaaaatcagtaccctgagctgtgagaacaagatcatcagcttcaaggagatgaacccacccgacaacatcaaggacaccaagtccgacattatcttcttccagaggtccgtgcccggacacgataacaaaatgcagttcgagagcagcagctacgaggggtatttcctggcctgcgagaaggagcgcgacctgttcaagctgatcctgaaaaaggaggacgagctgggggacaggtccatcatgttcaccgtgcaaaacgaggat

SEQ ID NO: 638 - DNA, 579 bp, synthetic construct
  misc_feature 1..579: note = IL18_WT_SN
  source 1..579: mol_type = other DNA
atggccgccgagcccgttgaggacaactgcatcaacttcgtagccatgaagttcatcgacaacacgctctacttcatcgccgaggacgacgagaatctcgagagcgactacttcgggaagctcgagagcaaacttagcgtaatccgcaacctcaacgaccaggtcttgttcatcgaccagggcaacaggcccctcttcgaggacatgacctcgtcggactgcaggaacaacgcgccccgcaccatctttattatctccatgtacaaggatagccaacccaggggcatggccgtcaccatcagcgtcaagtgcgagaagatctccactctaagctgcgagaacaagataatcagcttcaaggagatgaacccgcccgataatatcaaggacaccaagagcgacatcatcttctttcagcggtccgtgccagggcacgacaacaagatgcagttcgagagcagctcctacgaggggtacttcctggcctgcgagaaggagagggacctgtttaagctgatcctgaagaaggaggacgagctgggggacaggagcatcatgttcactgtccagaatgaggac

SEQ ID NO: 639 - DNA, 579 bp, synthetic construct
  misc_feature 1..579: note = IL18_WT_SN
  source 1..579: mol_type = other DNA
atggccgccgagccggtcgaggacaattgcatcaatttcgtcgcaatgaagttcatcgataataccttgtacttcatcgccgaggacgacgagaacctcgagagcgactacttcgggaagctcgagagcaagctctccgtcatcaggaacctcaacgaccaggtcttattcatcgatcagggcaataggcccctcttcgaggacatgaccagctcagattgcaggaacaacgccccaaggaccatctttataatcagcatgtacaaggacagccagccgaggggcatggccgtcaccatctccgtgaagtgcgagaagatcagcaccctgtcctgcgagaacaagatcatcagtttcaaggagatgaaccccccggacaatatcaaagacaccaagtccgacatcatcttcttccaaaggagcgtgcccggccacgacaacaagatgcagttcgagtcctcctcctacgagggctacttcctggcatgcgagaaggagagggacctgttcaagctgatcctgaagaaggaggacgagctgggggacaggagcatcatgttcaccgtccaaaacgaggac

SEQ ID NO: 640 - DNA, 579 bp, synthetic construct
  misc_feature 1..579: note = IL18_WT_SN
  source 1..579: mol_type = other DNA
atggccgccgagcccgtcgaggacaactgcatcaatttcgtcgccatgaagttcatcgacaacacgttgtacttcatcgccgaggacgacgagaacctcgaatccgactacttcgggaagttggagagcaagctcagcgtcatccggaacctcaacgaccaggtactctttatcgaccagggcaaccgcccgctgttcgaggacatgacctcctcagactgcaggaataacgcaccgaggaccatcttcatcatcagcatgtacaaagactcccaacctaggggcatggcggtaaccattagcgtcaagtgcgaaaagatcagcacactgtcgtgcgagaacaaaatcatcagcttcaaggagatgaaccccccggacaacatcaaggacaccaagtccgacatcatcttcttccagcggagcgtgccgggacacgacaacaaaatgcagttcgagagctcctcctacgagggctacttcctggcctgcgagaaggagcgggacctgttcaagctgatcctgaagaaggaggacgagctgggggaccggagcatcatgttcaccgtccagaacgaggac

SEQ ID NO: 641 - DNA, 579 bp, synthetic construct
  misc_feature 1..579: note = IL18_WT_SN
  source 1..579: mol_type = other DNA
atggccgccgagcccgtagaagacaattgcatcaacttcgtagccatgaagtttatcgataatacattgtactttatcgcggaggacgacgagaacctcgagagcgactatttcggcaaactcgaatccaaactcagcgtcatccgaaacctaaacgatcaggttctcttcatcgaccaggggaaccggcccctcttcgaagacatgacttcctccgactgccggaataacgccccgaggaccatcttcatcattagcatgtataaggacagccagcccagggggatggccgtcaccatcagcgtgaagtgcgagaagatctccaccctgagctgtgagaacaaaatcatcagcttcaaggaaatgaacccacccgacaacatcaaggacaccaagtccgatatcatcttcttccagagaagcgtgcccggccacgataataagatgcagttcgagagcagcagctacgaggggtactttctggcctgcgagaaggaacgggacctgttcaagctgatcctgaagaaggaggatgagctgggggacaggagcatcatgttcaccgtccagaacgaggac

SEQ ID NO: 642 - DNA, 579 bp, synthetic construct
  misc_feature 1..579: note = IL18_WT_SN
  source 1..579: mol_type = other DNA
atggccgccgagcccgtcgaggacaactgcatcaacttcgtcgccatgaagttcatcgataacactttatacttcatcgccgaggacgacgaaaatctcgagtccgactacttcggcaaactcgaatcaaagctctccgtcatcaggaacctcaacgaccaagtcctcttcatcgaccaggggaaccggcccctcttcgaggacatgacgtcgagcgactgccgcaacaacgccccgcggaccatattcattatctcgatgtataaggacagccagccgcgggggatggccgtaacgatctccgtcaagtgcgaaaagatctcgaccctgtcctgtgagaacaagataatcagcttcaaggagatgaaccctccagacaacatcaaggacaccaagagcgatatcatattcttccagcggagcgtccccggccatgacaacaagatgcagttcgagtccagcagctacgaggggtacttcctggcgtgcgaaaaggagcgggatctgttcaagctgatcctgaaaaaggaggacgagctgggggacaggagcatcatgtttaccgtgcaaaacgaggac

SEQ ID NO: 643 - DNA, 579 bp, synthetic construct
  misc_feature 1..579: note = IL18_WT_SN
  source 1..579: mol_type = other DNA
atggccgccgaacccgtagaggacaactgcatcaacttcgtcgccatgaagtttatcgataacaccctctatttcatcgccgaggacgacgagaacctcgagagcgactacttcggcaagctcgaatccaagttgtcggtcattaggaacctcaacgaccaggtcctattcatcgaccaggggaacaggcccctcttcgaggatatgaccagcagcgactgtcgaaacaacgccccccggacaatcttcatcatctccatgtacaaggacagccagccaaggggcatggccgtcacgatcagcgtcaagtgtgagaagatctccaccctgagctgcgagaataagattatcagcttcaaggagatgaacccacccgataatatcaaggacaccaaaagcgacattatctttttccaaaggtccgtgccgggccacgacaacaagatgcagttcgagtccagctcctacgagggctacttcctggcctgcgaaaaggagcgggacctgttcaagctgatcctcaagaaggaggacgagctgggggatcgcagcatcatgttcacggtgcagaacgaggac

SEQ ID NO: 644 - DNA, 579 bp, synthetic construct
  misc_feature 1..579: note = IL18_WT_SN
  source 1..579: mol_type = other DNA
atggccgccgaacccgtcgaagacaactgcatcaatttcgtcgcgatgaagttcatcgacaacaccctctatttcatcgccgaagacgacgagaacttagaatccgactacttcggcaaattggagtccaagctctccgtaataaggaacctcaacgatcaagtcctcttcatcgatcagggcaacaggcccctcttcgaggacatgaccagctccgactgcaggaacaacgccccccggaccatattcatcatcagcatgtataaggacagccagccgaggggcatggccgtcaccatttccgtgaagtgcgagaagatctccactctgagctgcgagaacaaaatcatctccttcaaggagatgaatccccccgacaatatcaaggacaccaagtccgacatcatcttctttcagcgaagcgtgcccggccacgacaacaagatgcagtttgagtccagctcgtatgaaggctacttcctcgcctgcgagaaggagagggatctcttcaaactgatcctgaagaaggaggacgagctgggcgacaggagcatcatgttcacggtgcagaacgaggac

SEQ ID NO: 645 - DNA, 579 bp, synthetic construct
  misc_feature 1..579: note = IL18_WT_SN
  source 1..579: mol_type = other DNA
atggccgccgaacccgttgaagacaattgcatcaatttcgtggccatgaagttcatcgacaacaccctctacttcatcgccgaggacgacgagaacctcgagagcgactacttcgggaagctcgaaagcaagctctcggtcatccgcaatctcaacgaccaggtactcttcatcgatcaggggaaccggcccctcttcgaggacatgaccagctccgactgcaggaacaacgcccccaggaccatctttattatctccatgtacaaagactcacagccgagggggatggccgttacgatcagcgtgaaatgcgaaaagatcagcaccctgagctgcgagaataagatcatctccttcaaggagatgaatccccccgacaacatcaaagataccaagtcggacatcatattcttccaacgtagcgtgccggggcacgacaacaagatgcagttcgagagctcctcctacgaggggtattttctggcgtgcgagaaggagcgggacctgttcaagctgatcctgaaaaaggaggacgaactgggggacaggagcatcatgttcaccgtgcagaatgaggac

SEQ ID NO: 646 - DNA, 579 bp, synthetic construct
  misc_feature 1..579: note = IL18_WT_SN
  source 1..579: mol_type = other DNA
atggccgccgagcccgtagaggacaattgcatcaacttcgttgcgatgaagttcatcgacaataccctatacttcatcgccgaggacgacgagaacctcgaatcagactacttcggcaagctcgagtccaagctatcggtcatcaggaacctcaacgaccaggtcctcttcatcgaccagggcaacaggcctttgttcgaggacatgactagcagcgactgcaggaacaacgcgccccgcaccatctttatcatcagcatgtacaaggacagccagcccaggggcatggccgtcacgatctccgtgaaatgcgagaaaatcagcacgctgtcctgtgagaacaagatcatctctttcaaggagatgaacccgcccgacaacatcaaggacaccaagtccgatatcatcttcttccagcgcagcgtgcccggccacgacaacaagatgcagttcgagagcagcagctacgaggggtactttctggcctgcgagaaggagagggatctgttcaagctgatcctgaagaaggaggatgagctgggcgaccggagcatcatgttcaccgtccagaatgaggac

SEQ ID NO: 647 - DNA, 579 bp, synthetic construct
  misc_feature 1..579: note = IL18_WT_SN
  source 1..579: mol_type = other DNA
atggccgccgagcccgttgaggataactgcatcaatttcgtcgccatgaagttcatcgataacaccctttacttcatcgccgaggacgacgagaacttggaaagcgactacttcggcaagctcgagagcaagctcagcgtcatccggaacctcaacgatcaggtcttgttcatcgaccagggcaataggcccctcttcgaggacatgaccagctccgactgccgcaataacgcccccaggacgatctttatcatcagcatgtacaaggacagccagccccggggcatggcagtcaccatcagcgtgaagtgcgagaagatctcgaccctgagctgcgagaataagatcatctccttcaaggagatgaatccccccgacaacatcaaggataccaagagcgacatcatcttcttccagaggtccgtgcccggtcacgacaacaagatgcagttcgaatcctctagctacgaggggtacttcctggcctgcgagaaggagcgggatctgttcaagctcatcctgaaaaaggaagatgagctgggggataggagcatcatgttcaccgtgcaaaatgaggac

SEQ ID NO: 648 - DNA, 579 bp, synthetic construct
  misc_feature 1..579: note = IL18_WT_SN
  source 1..579: mol_type = other DNA
atggccgccgagccggtggaagataattgtatcaacttcgtcgcgatgaagttcatcgacaataccctatattttatcgccgaggacgacgagaacctcgaatccgactatttcgggaagctcgagtccaagctcagcgttatccgcaacctcaacgaccaggtcctcttcatcgatcagggcaacaggcccctcttcgaggacatgaccagctccgactgcagaaacaacgcccccaggaccatcttcatcatatccatgtacaaggacagccagccccggggcatggccgtcaccatcagcgtgaagtgcgaaaagatcagcaccctctcctgcgagaacaagatcatctccttcaaggagatgaatccccccgacaacatcaaggacaccaagagcgacatcatcttcttccagcggagcgtgcccggccacgacaacaagatgcagttcgaaagctccagctacgaggggtacttcctggcctgcgaaaaggagagggacctgttcaagctcatcctcaagaaggaggatgagctgggggaccgaagcatcatgttcaccgtccagaacgaggac

SEQ ID NO: 649 - DNA, 579 bp, synthetic construct
  misc_feature 1..579: note = IL18_WT_SN
  source 1..579: mol_type = other DNA
atggcggccgagccggtcgaggacaactgcatcaatttcgtcgcgatgaagtttatcgacaacacgctctacttcatagcagaggacgacgagaacctcgagagcgactacttcggcaagctcgagagcaagctctccgtaatcaggaacctcaacgaccaggtcctcttcatcgaccagggcaataggccgctgttcgaagacatgaccagcagcgactgcaggaacaacgccccgcggaccatcttcatcatcagcatgtacaaggacagccagccccgggggatggccgtcaccatcagcgtgaagtgcgagaaaatcagcaccctcagctgcgagaataagatcatctccttcaaggagatgaaccccccggacaatatcaaggacaccaagtcagacatcatcttctttcagaggagcgtgcccggccacgacaacaagatgcagtttgagagcagctcctacgagggctactttctcgcgtgcgagaaggagagagatctgttcaagctcattctcaagaaggaggacgagctgggcgacaggagcattatgttcaccgtgcagaacgaggat

SEQ ID NO: 650 - DNA, 579 bp, synthetic construct
  misc_feature 1..579: note = IL18_WT_SN
  source 1..579: mol_type = other DNA
atggcggccgagcccgtagaggacaactgcatcaacttcgtcgccatgaaattcatcgacaacaccctatatttcatcgccgaggacgacgagaatctcgaaagcgactatttcggcaagctcgaaagcaagctcagcgtcatacgtaatctcaacgatcaggtcctcttcatcgatcagggcaatcggcctctcttcgaggatatgaccagcagcgactgcaggaacaacgcccccaggaccatcttcatcatctccatgtacaaggactcgcagcccaggggcatggccgtcaccatcagcgtgaagtgcgagaagatcagcaccctgagctgcgaaaataagatcatctccttcaaggagatgaaccctcccgacaacatcaaggacaccaagtcagacatcatcttctttcagaggtccgtgccggggcatgataacaagatgcagttcgagagctccagctacgaggggtacttcctggcctgcgagaaggagagggatctcttcaagctgatcctgaagaaggaggacgagctgggcgacaggagcatcatgttcaccgtccagaacgaggac

SEQ ID NO: 651 - DNA, 579 bp, synthetic construct
  misc_feature 1..579: note = IL18_WT_SN
  source 1..579: mol_type = other DNA
atggccgccgaacccgtagaggacaactgcatcaacttcgtcgccatgaagttcatcgacaacaccctctacttcatcgcggaggacgacgagaacctcgagagcgactacttcggcaagctcgagtccaagctcagcgtcatcaggaacctcaacgatcaggtcctcttcatcgaccagggcaacaggcccctcttcgaggacatgacctcgagcgactgcaggaacaacgccccccgcacgatctttatcatctctatgtataaggattcccaacccagggggatggccgtcaccatctccgtgaagtgcgaaaagatcagcacgctgtcctgtgagaataagatcatcagctttaaggaaatgaatccccccgacaacatcaaggataccaagagcgacatcatctttttccagaggagcgtgcctgggcacgataacaaaatgcagttcgagtccagcagctacgagggctacttcctggcctgcgagaaggagagggacctgttcaaactgatcctcaagaaggaggatgagctcggggacaggtccatcatgttcacggtgcagaacgaggac

SEQ ID NO: 652 - DNA, 579 bp, synthetic construct
  misc_feature 1..579: note = IL18_WT_SN
  source 1..579: mol_type = other DNA
atggcggcagagcccgtcgaggataactgtatcaacttcgtagccatgaagttcatagacaacaccctttacttcatcgccgaggacgacgagaatcttgagtccgactacttcggaaaactcgagagcaagctcagcgtcatcaggaacctcaacgaccaggtcttgttcatcgaccaaggcaacaggcccttgttcgaggatatgacctcctcagactgcaggaataacgcccctcgaacaatcttcatcatctcgatgtacaaggacagccagcccaggggcatggcggtcaccatctccgtgaagtgtgagaagatctccacactcagctgtgaaaacaagatcatctcattcaaggagatgaacccgcccgataacatcaaggacacgaaaagcgatatcatcttcttccagaggagcgtccccgggcacgacaacaagatgcaattcgagtccagcagctacgagggctacttcctggcctgcgagaaggagagggacctgtttaagctgatcctcaagaaagaagatgagctgggggaccggtccattatgttcaccgtgcagaacgaggac

SEQ ID NO: 653 - DNA, 579 bp, synthetic construct
  misc_feature 1..579: note = IL18_WT_SN
  source 1..579: mol_type = other DNA
atggccgccgagcccgtcgaggacaactgcatcaacttcgtagcgatgaagttcatcgacaacaccctctacttcatcgccgaggacgacgagaacctcgagagcgattacttcggtaagctcgagagcaagctctcagtcataaggaacctcaacgatcaggtcctctttatcgaccaggggaataggcccctcttcgaggacatgacctcgagcgactgtaggaacaacgcccccaggaccatctttatcatcagcatgtacaaggactcccaaccgaggggcatggccgtcaccatcagcgtaaagtgcgagaagatctcgaccctgagctgcgagaataagatcatctccttcaaggagatgaatccccccgataacatcaaagacaccaagagcgatataatcttttttcagaggtccgtaccggggcacgataacaaaatgcagtttgagtccagcagctatgaaggctacttcctggcctgcgagaaggagagggacctgtttaagctgatcctgaaaaaggaggacgagctgggcgataggagcataatgttcacggtgcagaacgaggac

SEQ ID NO: 654 - DNA, 579 bp, synthetic construct
  misc_feature 1..579: note = IL18_WT_SN
  source 1..579: mol_type = other DNA
atggcagcggaaccggtcgaggacaactgcatcaatttcgtggcgatgaagttcatcgacaacacgctttacttcatcgccgaggacgacgagaacttggaaagcgactatttcggcaagctcgaaagcaagctctcggtcatccgaaacctcaacgaccaagtcctcttcatcgaccagggcaacaggccgctgttcgaagacatgaccagcagcgactgtcggaacaacgcccccaggaccatctttatcatctccatgtacaaggattcccagccaagggggatggcggtcaccatctccgtcaagtgcgaaaaaatcagcaccctgagctgtgagaacaagatcatcagcttcaaggagatgaaccccccagacaacatcaaggacaccaagtctgacataattttcttccaacggagcgtgccgggccacgacaataagatgcagttcgagtccagctcctacgagggatacttcctggcctgcgagaaggagagggacctgttcaagctgatcctcaagaaagaggacgagctgggcgacaggagcatcatgttcacagtccagaatgaggac

SEQ ID NO: 655 - DNA, 579 bp, synthetic construct
  misc_feature 1..579: note = IL18_WT_SN
  source 1..579: mol_type = other DNA
atggcggccgaaccggtcgaagataactgtattaacttcgtggccatgaagttcatcgacaacaccctgtacttcatcgccgaggacgacgagaacctcgagagcgattacttcggcaagctcgagtccaagctcagcgttatccggaacctcaacgaccaggtcctctttatcgaccagggcaaccggccccttttcgaagacatgacgagctccgattgccggaacaacgccccgaggaccatcttcatcatctccatgtacaaggatagccagcccaggggcatggccgtcacgatcagcgtgaagtgcgagaagatctccaccctgtcctgcgagaataagatcatcagcttcaaggagatgaacccgcccgacaacatcaaggataccaagtcggacatcatcttctttcagagaagcgtccccggccatgacaataagatgcagtttgagagcagcagctacgaggggtacttcctggcgtgcgagaaggagcgggacctctttaaactgatcctgaagaaggaggacgagctgggcgaccggtccatcatgttcaccgtccagaatgaggac

SEQ ID NO: 656 - DNA, 579 bp, synthetic construct
  misc_feature 1..579: note = IL18_WT_SN
  source 1..579: mol_type = other DNA
atggcggccgaacccgtagaggacaactgcatcaacttcgtcgccatgaagtttatcgacaacaccttgtatttcatcgcggaggacgacgagaacctcgagtccgactacttcggcaaactcgaaagcaagctcagcgtcatccgaaacctcaacgaccaggttctcttcatcgaccaggggaataggcccctcttcgaagacatgacgagcagcgattgcaggaacaacgcccccaggaccatcttcatcatctccatgtacaaggacagccagccacgaggcatggccgtcacgatctccgtgaagtgtgagaagataagcacgctgtcctgcgagaacaagataatcagcttcaaggagatgaacccccctgataacatcaaagataccaagagcgacataatcttcttccagaggtccgtgcccggacatgacaacaagatgcagtttgagagcagcagctacgaggggtacttcctcgcctgcgagaaggagagggacctgttcaagctgatcctcaagaaggaggacgagctgggggacaggagcatcatgttcaccgtgcagaacgaggac

SEQ ID NO: 657 - DNA, 579 bp, synthetic construct
  misc_feature 1..579: note = IL18_WT_SN
  source 1..579: mol_type = other DNA
atggcggccgagcccgtcgaggacaactgcatcaatttcgtggccatgaagttcatcgacaacaccctctacttcatcgccgaggacgacgaaaacctcgagagcgactacttcggcaagctcgagagcaagctctccgttataaggaacctaaacgaccaggtccttttcatcgaccagggcaacaggcccctcttcgaagacatgaccagcagcgactgtaggaataacgccccccgcacgatcttcatcatcagcatgtacaaggactcccagccccggggcatggccgtcactatcagtgtgaagtgcgagaagatcagcacgctatcgtgcgagaacaagatcatcagcttcaaggagatgaacccacccgacaacatcaaggacaccaagagcgacattatcttcttccagaggagcgtgccgggccacgacaacaagatgcagttcgagtcctccagctacgagggatacttcctggcctgcgagaaggagcgggatctgttcaagctgatcctgaagaaggaggacgagctgggcgacaggagcatcatgttcaccgtgcagaacgaggac

SEQ ID NO: 658 - DNA, 531 bp, synthetic construct
  misc_feature 1..531: note = IL2sp_IL18
  source 1..531: mol_type = other DNA
atgtacaggatgcagctcctctcctgcatcgcccttagcttggccctcgtcaccaacagctacttcggcaagctcgagtcgaagctctccgtcatccgcaacctcaacgaccaggtcctcttcatagaccagggcaaccgccccctcttcgaggacatgaccgactccgattgcagggacaacgcccccaggaccatattcatcatcagcatgtacaaggacagccagcccagggggatggccgtcaccatctccgttaagtgcgagaagatcagcacactctcctgcgaaaataagatcatctcctttaaggagatgaacccgcccgacaatatcaaggacaccaagtccgatattatcttcttccagcggagcgtccccggccacgacaacaagatgcagttcgagtcctcgtcgtacgagggctacttcctggcgtgcgaaaaggagcgcgacctgttcaagctcatcctgaagaaggaggacgagctgggagacaggtccatcatgttcacggtgcagaatgaggac

SEQ ID NO: 659 - DNA, 531 bp, synthetic construct
  misc_feature 1..531: note = IL2sp_IL18
  source 1..531: mol_type = other DNA
atgtaccgaatgcagctcctcagctgcatcgcgctcagcctcgccctcgtcaccaacagctacttcgggaagctcgagtcgaagctcagcgtcatccgaaacctcaacgaccaggtcctctttatcgaccagggcaacaggcccttattcgaagacatgaccgactcagactgcagggacaacgccccaaggaccatctttatcatttccatgtacaaggacagccagccgcgggggatggccgtcaccatcagcgtcaagtgtgagaagatcagcacgctcagctgcgagaataagatcatctccttcaaggagatgaaccctcccgataacatcaaggacaccaagtccgatatcatcttcttccagcggagcgtgcccggccacgacaacaagatgcagttcgaatcgagcagctacgagggctacttcctggcctgcgagaaggaaagggatctgtttaagctgatcctgaagaaagaggatgagctgggggacaggagcatcatgtttaccgtgcagaacgaagac

SEQ ID NO: 660 - DNA, 531 bp, synthetic construct
  misc_feature 1..531: note = IL2sp_IL18
  source 1..531: mol_type = other DNA
atgtacaggatgcagctcctcagctgcatcgccctctcgctcgcgctcgtcaccaactcctacttcgggaagctcgagtccaagctctccgtcatcaggaacctcaacgaccaggtcctcttcatagaccagggcaataggcccctcttcgaagatatgaccgacagcgattgcagggataacgccccccgcaccatcttcatcatcagcatgtacaaagatagccagccgaggggcatggccgtcaccatcagcgtcaagtgcgagaaaatcagcaccctctcctgcgagaacaagatcatctccttcaaggagatgaacccgcccgacaacatcaaggacaccaagagcgacatcatattcttccagaggtccgtccccggccacgataacaagatgcagttcgagtccagcagctacgaggggtacttcctcgcctgcgagaaggagagggacctgttcaagctgatcctgaaaaaggaagatgaactgggggaccggagcatcatgttcacggtgcagaacgaggac

SEQ ID NO: 661 - DNA, 531 bp, synthetic construct
  misc_feature 1..531: note = IL2sp_IL18
  source 1..531: mol_type = other DNA
atgtaccggatgcagctcctctcctgcatcgccctcagcctcgccctagttaccaactcgtacttcggcaagctggagagcaagctctccgtcatacgtaacctcaacgaccaggtcctcttcatagaccagggcaataggccccttttcgaggacatgacggacagcgattgccgggacaacgcccccagaaccatcttcatcatcagcatgtacaaggactcccagccgaggggcatggccgtcaccatctccgtaaagtgcgagaagatctccaccctcagctgcgagaacaagatcatcagctttaaggagatgaacccgccggataatataaaggacaccaagtccgacattatcttcttccaacggtcggtgcccggccatgacaacaagatgcagttcgagagcagctcctacgaggggtactttctggcctgcgaaaaagagagggatctgttcaagctgatcctcaagaaggaggacgagctgggggacaggtcgatcatgttcaccgtgcagaacgaggac

SEQ ID NO: 662 - DNA, 531 bp, synthetic construct
  misc_feature 1..531: note = IL2sp_IL18
  source 1..531: mol_type = other DNA
atgtacaggatgcagctcctaagctgcatcgccctcagcctcgcgctcgtcaccaacagctatttcggcaagctagagagcaagctctccgtcatccggaatttaaacgaccaggtcctattcatcgaccagggaaaccgccccctcttcgaggacatgaccgacagcgactgccgggacaacgctcccaggacgatctttatcatcagcatgtacaaggacagccagccgcgcggcatggccgtcaccataagcgtcaagtgcgaaaagatcagcacgcttagctgcgagaacaaaatcatctccttcaaggagatgaaccctcccgacaacataaaggataccaagagtgacatcatcttctttcagcggagcgtccccggccacgacaacaagatgcagttcgagagcagctcctacgaggggtacttcctcgcctgcgagaaggagagggacctgttcaagctcatcctgaagaaggaagacgagctgggggataggagcatcatgttcacggtgcagaacgaggac

SEQ ID NO: 663 - DNA, 531 bp, synthetic construct
  misc_feature 1..531: note = IL2sp_IL18
  source 1..531: mol_type = other DNA
atgtaccggatgcagctactcagctgcatcgccctcagcttggccctggtcaccaactcctacttcgggaagttggaatccaagctctccgttatcaggaatctcaacgaccaggtcctcttcatcgaccagggcaaccgccccttgttcgaggacatgaccgactccgactgcagggacaacgccccccgtaccatcttcatcatcagcatgtacaaggacagccagcccaggggtatggccgtcaccatcagcgtcaagtgcgagaagattagcactctcagctgtgagaacaaaataatcagcttcaaggagatgaaccccccggacaacataaaagataccaagtccgacatcatcttctttcagaggagcgtccccggccatgacaacaagatgcagttcgagagcagcagttacgaaggctacttcctggcctgcgagaaggagagggacctgttcaagctgatcctgaagaaggaggacgagctgggggatcggagcataatgttcaccgtgcagaatgaggac

SEQ ID NO: 664 - DNA, 531 bp, synthetic construct
  misc_feature 1..531: note = IL2sp_IL18
  source 1..531: mol_type = other DNA
atgtacaggatgcagctccttagctgcatcgcgctctccctcgccctcgtcaccaactcctacttcggcaaattggagtccaagctcagcgtcatccgaaatctaaacgatcaggtcttgtttatcgaccaggggaaccgccccctcttcgaggacatgaccgactccgactgcagggacaacgcccccaggactatcttcatcatcagcatgtacaaggacagccagcccaggggtatggccgtaaccatcagcgtcaagtgcgagaagatctccaccctcagctgtgaaaacaagataatctccttcaaggagatgaaccccccagataacataaaagataccaagtcggacatcatcttcttccagaggtcggtgcccggccacgacaacaagatgcagttcgaaagctccagctacgagggctactttttagcctgtgaaaaggagcgggacctgttcaagctgattctgaagaaggaggacgagctgggggacaggagcatcatgttcaccgtgcagaacgaggac

SEQ ID NO: 665 - DNA, 531 bp, synthetic construct
  misc_feature 1..531: note = IL2sp_IL18
  source 1..531: mol_type = other DNA
atgtacaggatgcaactcctaagttgcatcgccctcagcctcgcgctcgttaccaatagctacttcggcaagctcgagagcaagctctccgtcattaggaacctaaacgaccaggtcctcttcatcgaccaggggaataggcccctcttcgaggatatgacggacagcgactgcagagacaacgcgcccaggacgatcttcatcatcagcatgtacaaggacagccagccccgcggcatggccgtcacaatctccgtcaagtgcgagaagatctccacgctctcgtgcgagaacaagatcatcagcttcaaggagatgaaccctcccgacaatatcaaggacaccaagtccgacatcatcttcttccagaggtccgtgcccggacacgacaacaagatgcagttcgagtccagctcctacgagggctattttctggcgtgcgagaaggagcgggacctgttcaagctgatcctcaagaaggaggatgagctgggggacaggagcatcatgttcaccgtccagaacgaggac

SEQ ID NO: 666 - DNA, 531 bp, synthetic construct
  misc_feature 1..531: note = IL2sp_IL18
  source 1..531: mol_type = other DNA
atgtacaggatgcagttgctcagctgcatcgccctcagcctcgcccttgtaaccaacagctatttcgggaagcttgagagcaagttgagcgtcatcaggaacttgaacgaccaggtactcttcatcgaccagggcaaccggcctctcttcgaggacatgacggactcggattgcagggacaacgcccccaggaccatcttcatcatcagcatgtacaaggactcccagccccgggggatggccgtcacgatctccgtaaagtgcgagaaaatcagcaccctcagctgcgagaacaaaatcatcagcttcaaggagatgaacccgcccgacaatatcaaggacaccaagtccgacatcatcttcttccagaggtcggtgcccggccacgataacaagatgcaattcgagtcgagctcttatgagggctacttcctggcctgcgaaaaggagcgcgacctgttcaagctgatcctgaagaaggaggacgagctgggcgatcggagcatcatgttcacggtgcagaacgaggac

SEQ ID NO: 667 - DNA, 531 bp, synthetic construct
  misc_feature 1..531: note = IL2sp_IL18
  source 1..531: mol_type = other DNA
atgtacaggatgcagctccttagctgcatcgccctctccctcgccctcgtcaccaactcctacttcggcaagctcgagagtaagctttccgtcattcgcaaccttaacgaccaggtactcttcatcgaccagggcaaccgccccctcttcgaggacatgaccgactccgactgcagggacaacgcgccccgaaccattttcatcatcagcatgtacaaggactcccaaccgagggggatggccgtcacaatcagcgtcaagtgcgaaaagataagcacgctctcctgcgagaataagatcatctccttcaaggagatgaatccgccggacaacatcaaggatacaaagagcgatattatcttcttccagcggagcgtgccggggcacgacaacaagatgcagtttgagagctccagctacgagggctacttcctggcctgcgagaaggagcgtgacctgttcaagctcatcctgaagaaggaggacgagctgggggaccgcagcatcatgtttaccgtgcagaatgaggac

SEQ ID NO: 668 - DNA, 531 bp, synthetic construct
  misc_feature 1..531: note = IL2sp_IL18
  source 1..531: mol_type = other DNA
atgtaccgtatgcagctcctcagttgcatcgccctcagcttggccctagtcaccaatagctacttcgggaagctcgagagcaaactctccgtgataaggaacctcaacgatcaggtcctcttcatcgaccagggcaacaggccgctgttcgaggacatgaccgattccgactgccgggacaacgccccccggaccatcttcatcattagcatgtataaagatagccagccgaggggcatggccgtcaccatcagcgtcaagtgcgagaagatcagcaccctcagctgcgagaacaagatcatcagctttaaggagatgaatccccctgacaacataaaggacaccaagagcgatattatcttcttccagcgcagcgtgccggggcatgataacaagatgcagttcgagagcagcagctacgaggggtatttcctggcctgcgagaaggagagggacctcttcaagctgatcctgaagaaggaggacgagctgggcgaccggagcatcatgtttacggtgcagaacgaggac

SEQ ID NO: 669 - DNA, 531 bp, synthetic construct
  misc_feature 1..531: note = IL2sp_IL18
  source 1..531: mol_type = other DNA
atgtacaggatgcagctcctctcctgcatcgctctctccctcgccctcgtcaccaacagctacttcggaaagctcgagtccaagctcagcgtcatccggaacctaaacgaccaggtcctcttcatcgatcaggggaacaggcccctcttcgaggacatgaccgacagcgactgccgagacaacgccccccggaccatcttcatcatcagtatgtacaaggacagccagccccgcggcatggccgtcaccatctccgtcaagtgtgagaagatcagcacgctcagctgtgagaacaagatcatcagcttcaaggagatgaacccgcccgataacatcaaggacaccaagagcgacatcatcttcttccaaaggtccgtcccgggtcacgataacaagatgcagttcgagagcagcagctacgagggctacttcctggcctgcgagaaggagcgggacctgttcaagctgatcctgaagaaagaggacgagctcggggaccgctccatcatgttcaccgtgcagaacgaggac

SEQ ID NO: 670 - DNA, 531 bp, synthetic construct
  misc_feature 1..531: note = IL2sp_IL18
  source 1..531: mol_type = other DNA
atgtaccggatgcagcttctctcctgcatcgccctctccctagccctcgtaaccaacagctacttcggaaagctcgagagcaagctctccgtcatcaggaatctcaacgaccaggttctctttatcgaccaggggaataggcccctattcgaggacatgaccgacagcgactgcagggataacgccccccgcaccatcttcatcatctccatgtacaaggacagccagcccaggggcatggccgtcaccatctcggtcaagtgcgagaaaatcagcaccctcagctgcgagaacaagattatcagctttaaggagatgaacccccctgataacatcaaggacaccaaaagcgacataatcttcttccagaggagcgtgcccggccacgataacaagatgcaattcgagtccagcagctacgagggctacttcctggcctgcgagaaggagagggacctgtttaagctcatcctgaagaaggaggacgagctgggggaccggtccatcatgttcactgtgcagaacgaggac

SEQ ID NO: 671 - DNA, 531 bp, synthetic construct
  misc_feature 1..531: note = IL2sp_IL18
  source 1..531: mol_type = other DNA
atgtacaggatgcaactcctctcgtgcatcgccctcagcctggcactcgtaaccaactcctacttcgggaagttggagagcaagctctcggtcatcaggaatctcaacgaccaggtcctcttcatagaccagggcaaccggcccctcttcgaggacatgaccgactccgattgccgagacaacgcccccaggaccatcttcatcatcagcatgtacaaggactcccagcccagggggatggccgtcacgatctccgtcaagtgcgagaagataagcaccctcagctgcgagaacaaaatcatatccttcaaggagatgaacccgcccgacaacatcaaggacaccaagtccgatatcatatttttccagcggtccgtgccggggcacgacaacaagatgcagttcgagtccagctcctatgaggggtattttctggcgtgcgagaaggagcgggacctgttcaagctcatcctgaagaaggaggacgagctgggcgaccgctccatcatgttcaccgtgcagaacgaggac

SEQ ID NO: 672 - DNA, 531 bp, synthetic construct
  misc_feature 1..531: note = IL2sp_IL18
  source 1..531: mol_type = other DNA
atgtaccgcatgcagttgcttagctgcatcgccctctccctagcactcgtcaccaacagctacttcggcaagctcgagtccaagctctccgtcataaggaacctcaacgaccaggtcctcttcatcgaccaggggaacaggcccctcttcgaggatatgaccgactccgactgcagggacaacgcccccaggaccatctttatcatcagcatgtacaaggatagccagcctcggggcatggcggtcaccatctccgtcaagtgtgagaagatctccacgttgtcctgcgagaacaagatcatctccttcaaggagatgaacccgcccgacaacatcaaggacactaaatccgacatcattttcttccagaggtccgtgcccgggcatgacaataagatgcagttcgagagctccagctacgagggctacttccttgcctgtgagaaggagcgggacctgttcaagctcatactgaagaaggaggacgagctgggggaccggagcattatgttcaccgtgcagaacgaggat

SEQ ID NO: 673 - DNA, 531 bp, synthetic construct
  misc_feature 1..531: note = IL2sp_IL18
  source 1..531: mol_type = other DNA
atgtaccgcatgcagctcttaagctgtatcgccctcagcctcgccctcgtgaccaactcatacttcggcaagctcgagagcaagcttagcgtcatcaggaaccttaacgaccaggtccttttcatcgatcaggggaaccggcccctcttcgaagacatgaccgacagcgactgtagggacaacgcgccccgaaccatcttcataatcagcatgtacaaggacagccagccgaggggcatggccgtcaccatcagcgtcaagtgcgagaagatcagcacgctcagctgcgagaacaagatcatctccttcaaggagatgaacccgcccgacaacatcaaggacacgaagtccgacataattttcttccagcgctccgtgccggggcatgacaacaaaatgcagttcgagagcagcagctacgagggctacttcctcgcctgcgagaaggagagggacctgtttaagctgatcctgaaaaaggaggacgaactgggggacaggagcatcatgtttaccgtgcagaatgaggat

SEQ ID NO: 674 - DNA, 531 bp, synthetic construct
  misc_feature 1..531: note = IL2sp_IL18
  source 1..531: mol_type = other DNA
atgtaccggatgcagttgctcagctgcatcgccctcagcctcgccctcgtcaccaactcctacttcggcaagctcgaaagcaagctctccgtaatccgcaacctcaacgatcaggttttattcatcgaccagggtaacaggcccctcttcgaggacatgaccgacagcgactgcagggacaacgccccccggaccatttttatcatctccatgtacaaagatagccagccgagggggatggccgtcaccatctccgtcaagtgcgaaaagatcagcactctcagctgcgagaacaaaatcatcagcttcaaggagatgaatccccccgacaacatcaaggacaccaagagcgacatcatcttcttccagaggagcgtacctggccacgataacaagatgcagttcgagtccagcagctacgaggggtacttcctggcctgtgagaaggagagggacctgttcaagctcatcctcaaaaaggaggacgagctgggggaccggagcatcatgttcacggtgcagaacgaggac

SEQ ID NO: 675 - DNA, 531 bp, synthetic construct
  misc_feature 1..531: note = IL2sp_IL18
  source 1..531: mol_type = other DNA
atgtaccggatgcagttgctcagctgcatcgcgctctcgctcgccctcgtcaccaattcctacttcggcaagctcgagagcaagttgtccgtcatccgcaacctcaacgatcaggtcctcttcatcgatcagggcaaccggcccctcttcgaggacatgacggacagcgactgccgcgataacgccccccgcaccatcttcatcatcagcatgtacaaggacagccagccccggggcatggccgttaccatcagcgtcaagtgcgagaagatcagcaccctctcgtgcgagaacaaaatcatcagcttcaaggagatgaaccctcccgataacatcaaagacaccaagagcgacatcatcttcttccagcggagcgtgcccggccacgacaacaagatgcagttcgagtccagcagctacgagggctacttcctcgcctgcgagaaggaaagggacctgttcaagctgatcctgaaaaaggaggacgaactgggggacaggagcattatgttcaccgtccagaacgaggac

SEQ ID NO: 676 - DNA, 531 bp, synthetic construct
  misc_feature 1..531: note = IL2sp_IL18
  source 1..531: mol_type = other DNA
atgtaccgcatgcagctcttgagctgcatcgccttaagcctcgccctcgtcaccaatagctatttcggcaagctcgagagcaagctctccgtaattaggaacctcaacgaccaggtcctctttatcgaccagggcaataggcccctcttcgaggacatgaccgactccgactgcagggacaacgcccccaggaccatcttcatcatcagcatgtataaagactcccaacccaggggtatggccgtcaccatcagcgtcaagtgcgagaagatcagcaccctctcctgcgagaataagataataagcttcaaggaaatgaacccgcccgacaacatcaaagacacgaaaagcgacatcattttcttccagaggagcgtgcccggccacgacaataagatgcagttcgagagctcgagctacgaggggtatttcctggcgtgcgagaaggagagggacctgttcaagctcatcctcaagaaggaggatgagctgggcgatcgctccatcatgttcaccgtgcagaacgaggac

SEQ ID NO: 677 - DNA, 531 bp, synthetic construct
  misc_feature 1..531: note = IL2sp_IL18
  source 1..531: mol_type = other DNA
atgtacaggatgcagctcctcagctgcatcgcgctcagtctagcccttgtaaccaactcctacttcggcaaactagagagtaagctctccgtcatccggaatctcaacgaccaggtcctcttcatcgaccagggcaaccggccgctgttcgaggatatgacggatagcgattgcagggacaacgcccccaggactatcttcatcatcagcatgtacaaggacagccagccccgaggcatggccgtaaccatctccgtaaagtgcgagaaaatctccaccctcagctgcgagaacaaaatcatctccttcaaggagatgaacccacccgataacatcaaggacacgaaaagcgacatcatctttttccagaggagcgtccccggccatgacaacaaaatgcagttcgagagtagcagctacgagggctacttcctggcgtgcgagaaggagagggacctgttcaagctcatcctcaagaaggaggacgagctgggcgacaggagcataatgttcacggtgcagaacgaggac

SEQ ID NO: 678 - DNA, 531 bp, synthetic construct
  misc_feature 1..531: note = IL2sp_IL18
  source 1..531: mol_type = other DNA
atgtacaggatgcagctcctaagctgcatcgccctcagcctagcccttgtcaccaacagctacttcgggaagctcgagagcaaactctccgtcatccggaacctcaacgaccaggtcctcttcatcgaccagggcaacaggcccctcttcgaggacatgaccgatagcgactgcagggacaacgccccccggaccatcttcatcatcagcatgtacaaggacagccagccccgaggcatggccgtaaccataagcgtcaagtgcgagaagatctccaccctcagctgcgagaacaaaatcatcagcttcaaggagatgaaccccccggacaatatcaaggacaccaagagcgatatcatcttctttcagcggtccgtcccaggtcacgacaacaagatgcagttcgagagcagcagctatgagggctacttcctcgcctgcgagaaggagagggacctgttcaagctcatcctgaaaaaggaggatgagctgggggaccgcagcatcatgttcaccgtgcagaatgaggac

SEQ ID NO: 679 - DNA, 531 bp, synthetic construct
  misc_feature 1..531: note = IL2sp_IL18
  source 1..531: mol_type = other DNA
atgtacaggatgcagctcctctcctgcatagccctctcgctcgccctcgtaaccaactcctacttcggcaagttggagtccaagttgtcggtaatccggaacttgaacgatcaggtcctcttcatagatcagggcaaccggcccctcttcgaggatatgaccgactccgactgccgggacaacgccccgcgcaccatcttcattatctccatgtacaaagatagccagccgaggggtatggccgtcaccatcagcgtaaagtgtgaaaagatctccacactctcgtgcgagaacaaaatcatctcctttaaggagatgaaccctcccgacaacatcaaggacaccaagagcgatatcatattctttcaaaggtccgtgcccggccacgacaacaagatgcagttcgagagcagcagctacgaggggtacttcctggcctgcgagaaagaacgggacctcttcaagctgatcctcaagaaggaggacgagctgggggaccggagcatcatgttcaccgtccagaacgaagac

SEQ ID NO: 680 - DNA, 531 bp, synthetic construct
  misc_feature 1..531: note = IL2sp_IL18
  source 1..531: mol_type = other DNA
atgtatcggatgcagctcttgagctgtatcgccctcagccttgcgctagtcacaaactcctacttcggcaagctcgagagcaagctctccgtcatcaggaacctcaacgaccaggtcctctttatcgatcaggggaacaggccgcttttcgaggacatgacggacagcgattgcagggataacgcgccgaggaccatcttcatcatctccatgtacaaggacagccagcccaggggcatggccgtaaccatctccgtaaagtgcgagaagatctcgaccctcagctgcgagaataagatcatcagcttcaaggagatgaaccctcccgacaacatcaaggacaccaagtccgacatcatctttttccaacggagcgttcccggacacgataacaagatgcagtttgagagctcctcctacgaggggtacttcctggcgtgcgagaaggagagggacctgttcaagctgatcctgaagaaggaagacgagctcggcgacagaagcatcatgttcaccgtgcagaacgaagac

SEQ ID NO: 681 - DNA, 531 bp, synthetic construct
  misc_feature 1..531: note = IL2sp_IL18
  source 1..531: mol_type = other DNA
atgtaccgcatgcagctcctcagctgcatcgccctaagcttggcccttgtcaccaacagctacttcggcaagctcgagagcaagttgagcgttatcaggaacttgaacgaccaggtcttgttcatcgaccagggcaaccggcccctattcgaggacatgaccgatagcgattgccgggacaacgcaccgagaaccatcttcatcatcagcatgtacaaggacagccaaccccggggcatggcggtaaccatcagcgttaagtgcgagaagatcagtaccctcagctgcgagaacaagatcatcagcttcaaggagatgaacccgcccgacaatatcaaggatacaaagagcgacatcatctttttccagcgaagcgtgcccggccacgacaacaaaatgcagttcgagtcgtcgagctacgagggatatttcctggcgtgcgagaaggagagggacctgttcaaactcatcctcaagaaggaggacgagctgggggataggagcatcatgttcaccgtgcagaacgaggac

SEQ ID NO: 682 - DNA, 531 bp, synthetic construct
  misc_feature 1..531: note = IL2sp_IL18
  source 1..531: mol_type = other DNA
atgtatcggatgcagctcctaagctgcatagccctaagccttgccttggtcaccaatagctacttcgggaagcttgaaagcaagctctccgtcatccggaatttaaacgaccaggtccttttcatcgatcagggcaacaggcccctcttcgaggacatgaccgacagcgactgccgggacaacgcccccaggacgattttcatcatcagcatgtacaaggattcccagccccggggcatggccgtcaccatcagcgtcaagtgcgagaagatctccacccttagctgtgagaacaagatcattagcttcaaggagatgaacccgcccgacaacatcaaggacaccaaaagcgatatcatcttcttccagcggagcgtcccgggccacgacaacaaaatgcagttcgagagcagcagctacgagggctactttctcgcctgcgagaaagagagggatctgttcaagctcatcctgaagaaggaggacgagctgggggatcggagcatcatgttcaccgtgcagaacgaggac

SEQ ID NO: 683 - DNA, 531 bp, synthetic construct
  misc_feature 1..531: note = IL2sp_IL18_SN
  source 1..531: mol_type = other DNA
atgtataggatgcagctccttagctgcatcgccctcagcttggccctcgtcaccaactcctacttcgggaagcttgagagcaagctcagcgtcatcaggaaccttaacgatcaggttctattcatcgaccaggggaacaggcccctcttcgaagacatgaccagcagcgattgccggaacaacgccccccggaccatcttcatcatctccatgtacaaggacagccaacccaggggcatggcggtcaccatctccgtcaagtgcgagaagatcagcaccctctcgtgcgaaaacaagatcatatcgttcaaggagatgaacccgcccgacaacataaaggacaccaagtccgacatcatcttctttcagcggtccgtgcccgggcatgataacaagatgcaattcgagagctccagctacgaggggtacttcctggcctgcgagaaggagagggacctgttcaagctgatcctcaagaaggaggacgagctcggcgaccggagcatcatgttcaccgtccagaacgaggat

SEQ ID NO: 684 - DNA, 531 bp, synthetic construct
  misc_feature 1..531: note = IL2sp_IL18_SN
  source 1..531: mol_type = other DNA
atgtacaggatgcagctcctcagctgcatcgccctctccctcgcgctcgtcacgaactcctacttcggcaagctcgagagcaagctctccgtcatcaggaatctcaacgaccaagtcctctttatcgaccagggcaaccggccgctgttcgaggacatgacctcctccgactgccggaacaacgcccctaggacgatcttcatcatcagcatgtacaaggactcacagcccaggggcatggcggtaaccatcagcgtcaagtgcgagaaaatcagcacactcagctgcgagaacaagatcatctccttcaaggagatgaacccgcccgacaacatcaaggacacgaagtccgacatcatcttctttcagaggagcgtgccgggccacgacaacaagatgcagttcgaaagctccagctacgaggggtatttcctggcctgcgagaaggaacgcgatctgttcaagctcatcctcaagaaagaggacgagctgggggaccggtccatcatgttcaccgtgcagaacgaggac

SEQ ID NO: 685 - DNA, 531 bp, synthetic construct
  misc_feature 1..531: note = IL2sp_IL18_SN
  source 1..531: mol_type = other DNA
atgtacaggatgcagctcctaagctgcatcgccctctccctcgcgctcgtcaccaactcctatttcgggaagctggagagcaagctcagcgtaatcagaaatcttaacgaccaggtcttattcatcgatcaggggaatcgtcccctcttcgaggacatgacctcgagcgactgcaggaacaacgccccccgaaccatcttcataatctccatgtacaaggacagccagcccaggggcatggccgtcaccatcagcgtaaagtgcgagaagatcagcactctctcctgtgagaataaaatcatcagcttcaaggagatgaacccgcccgataacataaaggacacgaaaagcgacatcatcttcttccagaggagcgtccccgggcatgacaacaagatgcagttcgagagcagcagctacgagggctacttcctggcctgcgaaaaggaaagggacctgttcaaactgatcctgaagaaggaggacgagctgggggacaggagcatcatgttcacggtgcagaatgaggac

SEQ ID NO: 686 - DNA, 531 bp, synthetic construct
  misc_feature 1..531: note = IL2sp_IL18_SN
  source 1..531: mol_type = other DNA
atgtacaggatgcagctcctcagctgcatcgcgctttctctcgcccttgtcaccaacagctacttcggtaagctcgagagcaagttgagcgtcatcaggaacctcaacgaccaggtcctcttcatcgaccagggcaaccggcccttgttcgaggacatgacgtcctccgactgtaggaacaacgccccgaggaccatcttcatcatctccatgtacaaggacagccagccccgggggatggccgtcaccatctccgtcaagtgcgagaagatctccacgctctcctgcgagaacaagataatcagcttcaaggagatgaacccgcccgacaatattaaggacacgaagtccgacatcatctttttccaacgtagcgtgccgggccacgacaacaagatgcagttcgagtccagcagctacgaggggtacttcctggcctgcgagaaagagcgggacctgttcaagctcatactcaagaaggaggacgagctgggcgaccggagcatcatgttcaccgtgcaaaatgaagac

SEQ ID NO: 687 - DNA, 531 bp, synthetic construct
  misc_feature 1..531: note = IL2sp_IL18_SN
  source 1..531: mol_type = other DNA
atgtacaggatgcagctactcagctgcatcgccctctccctcgccctcgtaacgaactcctacttcggcaagctagagagcaagctcagcgtcatccggaatctcaacgaccaggtcctcttcatagaccagggcaataggcccctcttcgaggatatgaccagctccgactgtaggaacaacgcccccaggaccatcttcataatcagcatgtacaaggactcccagccccggggcatggccgtcaccatctcggtgaagtgcgagaagatcagcacgctcagctgcgaaaacaagatcatctccttcaaggagatgaaccctcccgataacatcaaagacaccaagtccgacatcatcttcttccagaggagcgtccctggccatgacaacaagatgcagtttgagagctcgagctatgaggggtacttcctggcctgtgagaaggagcgggacctcttcaagctgatcctgaagaaggaggacgagctgggggacaggtccatcatgttcaccgtgcagaacgaggac

SEQ ID NO: 688 - DNA, 531 bp, synthetic construct
  misc_feature 1..531: note = IL2sp_IL18_SN
  source 1..531: mol_type = other DNA
atgtacaggatgcagctcctctcctgcatcgcccttagcttagccctcgtcaccaactcctatttcgggaagcttgagagcaagctctcggtcatcaggaaccttaacgaccaggtcctcttcatcgaccagggcaaccgccccctcttcgaggacatgaccagcagcgactgccgcaacaacgccccccggacgatcttcattatctccatgtacaaggactcccagcccaggggcatggccgtgaccatctcggtcaagtgcgagaagatcagcacgctctcctgtgagaacaagatcatctcgttcaaggagatgaaccctcccgacaacatcaaggataccaagtcagacataatcttcttccagaggagcgtgcccggccacgacaacaagatgcagttcgagagctccagctacgagggctactttctggcctgcgaaaaggagcgcgacctcttcaagctgatcctgaagaaggaggacgagctgggggaccggagcatcatgttcaccgtgcagaacgaggac

SEQ ID NO: 689 - DNA, 531 bp, synthetic construct
  misc_feature 1..531: note = IL2sp_IL18_SN
  source 1..531: mol_type = other DNA
atgtaccgtatgcagctcttgtcctgcatcgcccttagcctcgccctagttaccaacagctatttcggcaagctcgaaagcaagcttagcgtcatcaggaacctcaacgaccaggttcttttcatcgaccagggcaacaggcccctcttcgaggatatgacctccagcgactgcaggaacaacgcacccaggaccatcttcatcatctccatgtacaaggacagccagcccaggggcatggccgtcaccatctccgtcaagtgtgagaagatcagcacgctctcctgcgagaacaagatcatctccttcaaggagatgaaccccccagataacatcaaggacaccaagtccgacatcatattcttccagcggagcgtgccggggcacgacaacaagatgcagttcgagagcagcagctacgagggctacttcctggcgtgcgagaaggagagggacctgttcaagctgatcctcaagaaggaggatgagctgggtgataggagcatcatgttcacggtgcagaacgaggac

SEQ ID NO: 690 - DNA, 531 bp, synthetic construct
  misc_feature 1..531: note = IL2sp_IL18_SN
  source 1..531: mol_type = other DNA
atgtatcggatgcagttactctcctgcatagccttgagcctcgccctcgtcaccaactcctacttcggcaagctagagagcaagctctcggtcatcaggaatctcaacgaccaggtcctctttatcgatcagggcaacaggcccctcttcgaggacatgacttcgtcggactgcaggaacaacgcccctaggaccatcttcatcattagcatgtacaaggactcccagcccaggggcatggccgtaaccatcagcgttaagtgcgagaaaatcagcaccttatcctgcgagaacaagatcatctccttcaaggagatgaaccctcccgacaacatcaaagacaccaagagcgacatcatctttttccagaggtcggtgcccggccacgacaataagatgcagtttgagagctcaagctacgagggctactttctggcctgcgagaaggagagggatctgttcaagctgatcctgaagaaggaggacgagctgggggacaggtccataatgttcaccgtgcagaacgaggac

SEQ ID NO: 691 - DNA, 531 bp, synthetic construct
  misc_feature 1..531: note = IL2sp_IL18_SN
  source 1..531: mol_type = other DNA
atgtacaggatgcagctcttaagctgcatcgccttgtccctcgccctcgtcaccaattcctacttcggcaagctcgaaagcaagctctccgtcatccggaacctcaacgaccaggtcttgttcatcgaccaggggaatcgtcccctcttcgaggacatgaccagctccgactgcaggaacaacgcccccaggaccatcttcatcatctccatgtacaaggacagccagccacggggcatggccgtcaccatcagcgtcaagtgcgagaagatcagcacgctcagctgcgaaaataagatcatcagcttcaaggagatgaacccgccagacaatataaaggacaccaagagcgacatcatcttcttccaaaggagcgtccccggccacgacaacaagatgcagttcgagtccagctcctacgaggggtatttcttggcgtgtgagaaggagagggatctcttcaagctgatcctgaagaaagaggacgagctgggcgataggagcatcatgttcaccgtgcagaacgaggac

SEQ ID NO: 692 - DNA, 531 bp, synthetic construct
  misc_feature 1..531: note = IL2sp_IL18_SN
  source 1..531: mol_type = other DNA
atgtaccggatgcagcttctcagctgcatcgccctcagcctagcgctcgtaaccaatagctatttcgggaagctcgagagcaagctcagcgtcatccgaaacctcaacgaccaggtccttttcatcgaccaggggaacaggcccctcttcgaggacatgacctccagcgactgccggaacaacgcccctcggacgatcttcatcatctccatgtacaaggactcacagccccggggcatggcggttaccatctccgttaagtgcgagaagatcagcaccctcagctgcgagaacaagatcatctccttcaaggagatgaacccgcccgacaatatcaaggatacgaaaagcgatatcatcttctttcagaggagcgtgccgggccatgacaacaagatgcagttcgagagcagcagctatgagggctatttcctggcttgcgagaaggaaagggaccttttcaagctcatcctgaagaaggaggatgaactgggggacaggagcatcatgttcaccgtccagaacgaggac

SEQ ID NO: 693 - DNA, 531 bp, synthetic construct
  misc_feature 1..531: note = IL2sp_IL18_SN
  source 1..531: mol_type = other DNA
atgtaccgtatgcagctccttagctgcatcgcccttagcctcgcgctcgttaccaactcctacttcggcaagctcgagagcaagctctccgttatcaggaacctcaacgaccaggtcctcttcatcgaccagggcaacaggcccctcttcgaggacatgacgtccagcgactgcaggaataacgccccaaggaccatcttcatcatcagcatgtataaggacagccagccccgagggatggccgtcactatcagcgtcaagtgcgaaaagatcagcaccctctcctgcgagaacaagatcatctccttcaaggagatgaatccccccgacaacatcaaggataccaagagcgacatcatcttcttccaaaggagcgtgcccggccacgacaacaagatgcagttcgagtcctccagctacgagggctactttctggcctgcgagaaggagagggatctgttcaagctgatcctgaagaaggaggacgagctgggtgacaggagcatcatgttcaccgtccagaacgaggac

SEQ ID NO: 694 - DNA, 531 bp, synthetic construct
  misc_feature 1..531: note = IL2sp_IL18_SN
  source 1..531: mol_type = other DNA
atgtacaggatgcagctcctcagctgcatcgccttatccctggccctcgtcaccaactcgtacttcgggaagctcgagagcaagctcagcgtcatccggaacctcaacgaccaagtcctcttcatcgatcaggggaaccgacccctcttcgaggacatgaccagcagcgactgtaggaataacgccccgcgcacgatcttcatcatcagcatgtacaaggattcacagccaaggggcatggccgttaccatcagcgtcaagtgcgagaagatcagcacccttagctgcgagaataagatcatctcctttaaggagatgaacccgcccgacaacatcaaggacaccaagtccgacatcatcttcttccagaggagcgtgcccggccacgataacaaaatgcagttcgagagctcctcctacgagggctacttcctcgcatgtgagaaggagcgcgatctcttcaagctgatcctgaagaaggaggacgagctgggggacaggtccattatgttcaccgtgcagaacgaggac

SEQ ID NO: 695 - DNA, 531 bp, synthetic construct
  misc_feature 1..531: note = IL2sp_IL18_SN
  source 1..531: mol_type = other DNA
atgtacaggatgcagctcctctcctgcatagccctctcgcttgccctcgtcaccaatagctacttcggcaagttggagtccaagctcagcgtcatccgaaacctcaacgaccaggtccttttcatcgatcaggggaacaggcccctcttcgaggacatgacctcgtccgactgtaggaacaacgccccccggaccatctttatcatctccatgtacaaggactcccaacccagggggatggccgtcaccatcagcgtcaagtgcgagaagatctccaccctcagctgcgagaacaagatcatctccttcaaggagatgaatccccccgataatatcaaggacacgaagtccgatatcatattcttccagaggagcgtccccggccacgacaacaagatgcagttcgaaagctccagctacgagggttacttcctggcctgcgaaaaagagcgggacctcttcaagctgatcctcaagaaggaggacgagctgggcgaccgcagcatcatgtttacggtgcagaacgaggac

SEQ ID NO: 696 - DNA, 531 bp, synthetic construct
  misc_feature 1..531: note = IL2sp_IL18_SN
  source 1..531: mol_type = other DNA
atgtacaggatgcagctcctcagctgtatcgccctcagcctcgccctcgtaactaactcctacttcggaaagctcgagtccaagctctccgtcatcaggaatcttaacgatcaggttttattcatcgatcaggggaacaggcccctcttcgaggacatgaccagctccgactgcaggaacaacgcccccaggaccatattcatcatctcgatgtataaagacagccagcccaggggcatggccgtcaccatcagcgtcaagtgcgagaagatcagcaccctctcctgtgagaacaagatcatctccttcaaggagatgaacccgcccgataacatcaaggacaccaagtccgacatcatatttttccagcggagcgtgcccgggcatgacaacaagatgcagttcgagagcagctcctacgaaggctacttcctcgcctgcgaaaaggagcgggacctgttcaagctgatcctgaagaaggaggacgagctgggggaccggagcatcatgttcaccgtgcagaacgaagac

SEQ ID NO: 697 - DNA, 531 bp, synthetic construct
  misc_feature 1..531: note = IL2sp_IL18_SN
  source 1..531: mol_type = other DNA
atgtacaggatgcagctcctcagctgcatcgcgctcagcctcgcccttgtcaccaactcctatttcggcaagctcgagagcaagctcagcgttatccggaatctcaacgaccaggtcttgtttatagaccagggcaacaggcccctcttcgaggacatgaccagcagcgactgtcggaacaacgctcccagaaccatcttcatcatatccatgtataaggacagccaaccgaggggcatggccgtcacgatcagcgtcaagtgcgagaagatcagcacccttagctgcgagaataagatcatctccttcaaggagatgaatccgcccgataatatcaaggacaccaagtcggatataatcttctttcagaggtccgtgcccgggcatgacaacaagatgcagttcgagagcagctcctacgaggggtactttctggcgtgcgagaaggagcgtgacctgttcaagctgatcctgaagaaggaggacgagctgggggacaggagcattatgtttactgtgcagaatgaggac

SEQ ID NO: 698 - DNA, 531 bp, synthetic construct
  misc_feature 1..531: note = IL2sp_IL18_SN
  source 1..531: mol_type = other DNA
atgtaccggatgcagctcctcagctgcatcgcgctcagcctcgccctcgtcacaaactcctatttcggcaagctcgagtcgaagctaagcgtcataaggaatctgaacgaccaggtcctcttcatcgaccaggggaacaggcccctcttcgaggacatgaccagcagcgactgtaggaacaacgcccccaggaccatatttatcatcagcatgtacaaggatagccagcccaggggcatggccgtcacgatcagcgtaaagtgcgagaagatcagcaccctcagctgcgagaacaaaatcatcagcttcaaagaaatgaacccacccgacaacatcaaggataccaagtccgatatcatcttctttcagaggtccgtgcccggccacgacaacaagatgcagttcgagtcgagcagctacgagggctatttcctcgcctgcgaaaaggagagggacctctttaagctgatcctcaagaaggaggacgagctgggggacaggagcatcatgttcaccgtgcagaacgaggat

SEQ ID NO: 699 - DNA, 531 bp, synthetic construct
  misc_feature 1..531: note = IL2sp_IL18_SN
  source 1..531: mol_type = other DNA
atgtacaggatgcagctcctcagctgcatagccctcagcctagccttagtcaccaactcctacttcggcaagctcgagtccaagctctccgtcatccgtaaccttaacgatcaggtcctctttatcgaccaggggaacaggcccctcttcgaggacatgacgagcagcgactgcaggaacaacgccccgaggaccatcttcatcatcagcatgtacaaagacagccagccaaggggcatggccgtcaccatctcggtcaagtgcgagaagatcagcaccctcagctgcgagaacaagatcatcagcttcaaggagatgaatccgcccgacaacatcaaggacacgaagtccgacataatcttcttccagaggagcgtgcccggccacgacaacaaaatgcagtttgagtcctccagctacgaaggttactttctcgcctgcgagaaagagagggacctgttcaagctgatcctgaagaaggaggacgagctgggggacaggtccatcatgttcaccgtccagaacgaggat

SEQ ID NO: 700 - DNA, 531 bp, synthetic construct
  misc_feature 1..531: note = IL2sp_IL18_SN
  source 1..531: mol_type = other DNA
atgtacaggatgcagctcctcagctgcatcgccctcagcctcgcactcgtcaccaactcctacttcggaaagctcgagtcaaaactctccgtcatccggaacctcaacgaccaggtactctttatcgaccaggggaacaggcccctcttcgaggacatgacgtccagcgactgccgaaacaacgcacccaggaccatcttcatcatctccatgtacaaggactcccagcccagggggatggccgttaccatcagcgtcaagtgcgagaagatctccacactcagctgcgagaataagatcatatcctttaaggaaatgaacccgcccgacaacatcaaggacaccaagtcagacatcatcttcttccagcgaagcgtgccgggccatgacaacaagatgcagtttgagtcaagctcgtacgagggctacttcctggcgtgtgagaaggagagggacctgttcaagctcatcctgaagaaggaggacgagctgggggataggagcatcatgttcacggtgcagaacgaggac

SEQ ID NO: 701 - DNA, 531 bp, synthetic construct
  misc_feature 1..531: note = IL2sp_IL18_SN
  source 1..531: mol_type = other DNA
atgtacaggatgcagctcctcagctgcatcgccctcagccttgccttggtcaccaacagctacttcggcaagctcgagagcaagctcagcgtcatcaggaacctcaacgaccaggtcttatttatcgatcaggggaaccgccccctcttcgaagacatgacctcctccgattgtcggaacaacgcccccaggaccatcttcatcatcagcatgtacaaggacagccagccccgggggatggccgtcaccatcagcgtcaagtgcgagaagatctccaccctctcgtgcgagaacaagatcatctccttcaaggagatgaacccgcccgacaacatcaaggacaccaagtccgacatcatcttcttccaaaggtccgtgcccggccatgacaataagatgcagttcgaatccagctcctacgagggctatttcctggcctgcgagaaggagcgggacctgttcaagctgatcctgaagaaggaggacgaactgggcgacaggagcatcatgttcaccgtgcagaacgaagac

SEQ ID NO: 702 - DNA, 531 bp, synthetic construct
  misc_feature 1..531: note = IL2sp_IL18_SN
  source 1..531: mol_type = other DNA
atgtacaggatgcagctgcttagctgcatcgccctctccctcgccctcgttaccaacagctacttcggcaagctcgagagcaaactcagcgtcatcaggaaccttaacgaccaggtcctcttcatcgaccagggcaataggccgttattcgaggatatgacgagctccgattgcaggaacaacgccccccgcactatcttcatcatctccatgtacaaggacagccagccccgggggatggccgtaaccatcagcgtcaagtgcgagaagatcagcaccttgagctgcgagaacaagatcatcagcttcaaagagatgaacccgcccgacaacatcaaggacaccaagtccgacattatattcttccagaggagcgtgccgggccacgacaataaaatgcaattcgagagcagttcctacgaggggtactttctggcctgcgagaaggagagggatctcttcaagctcatcctcaagaaggaggacgagctgggcgacaggagcatcatgttcaccgtgcaaaacgaggac

SEQ ID NO: 703 - DNA, 531 bp, synthetic construct
  misc_feature 1..531: note = IL2sp_IL18_SN
  source 1..531: mol_type = other DNA
atgtacagaatgcagctcctcagctgcatcgcactcagcctcgccctcgtaaccaatagctacttcgggaagctcgagagcaagctctccgttatcaggaacctcaacgaccaggtcctcttcatcgaccagggcaaccggcccttattcgaggacatgacgagctccgactgtaggaacaacgcgcccaggaccatcttcatcatctccatgtacaaggattcgcagccgcgcgggatggccgtcaccatcagcgtcaagtgcgagaagatctccaccctcagctgcgagaacaagatcatcagctttaaggagatgaacccgcccgacaacatcaaggataccaagagcgacatcatcttcttccagcggtccgtgcccggccacgacaacaagatgcagttcgagagcagcagctacgagggatacttcctggcctgcgagaaggagcgggacctgttcaagctgatcctgaagaaagaggacgaactgggcgaccgcagcatcatgttcacggtgcagaacgaggac

SEQ ID NO: 704 - DNA, 531 bp, synthetic construct
  misc_feature 1..531: note = IgLC_IL18
  source 1..531: mol_type = other DNA
atggcctggacagtcctcctcctggggctcctctcccactgcaccggaagcgtcacgtcgtatttcggcaagctcgagagcaagctctccgtcatcaggaacctcaacgatcaggtcctcttcatcgaccaggggaacaggccccttttcgaggacatgaccgacagcgactgccgggataacgccccgcggacgatcttcatcatttccatgtacaaggacagccaaccgcggggcatggccgtcacgatctccgtcaagtgcgagaagatctccaccctctcgtgcgagaacaagatcatatcgttcaaagagatgaatccccccgacaacataaaggacacgaaaagcgacattatcttcttccaaaggagcgtgcccggccacgataacaagatgcagttcgagagctccagctacgagggctacttcctggcctgcgagaaggagagggacctgttcaagctcatcctgaagaaggaggatgagctaggcgatcggtccatcatgttcaccgtgcagaacgaggac

SEQ ID NO: 705 - DNA, 531 bp, synthetic construct
  misc_feature 1..531: note = IgLC_IL18
  source 1..531: mol_type = other DNA
atggcctggacggtcctccttctaggcctcctctcccactgtacggggtcggtaacgagctacttcggcaagctagagagcaagctcagcgtcatccgcaacctcaacgaccaagtcctcttcatcgaccaggggaaccgccccctcttcgaggacatgaccgactcggattgcagggacaacgcgccccgcaccatcttcataatcagcatgtacaaggactcccaacccaggggcatggccgttaccatcagcgtcaagtgcgagaagatcagcaccctcagctgtgagaataagatcatcagcttcaaggagatgaaccccccggataacatcaaggacaccaagtccgatatcatcttcttccagaggagcgtccccgggcacgataataagatgcagttcgagagctccagctacgagggctacttcctggcctgcgagaaagagcgggacctgttcaagctgattctgaagaaggaggacgagctgggggataggtccatcatgttcaccgtgcagaacgaggac

SEQ ID NO: 706 - DNA, 531 bp, synthetic construct
  misc_feature 1..531: note = IgLC_IL18
  source 1..531: mol_type = other DNA
atggcctggaccgtcctcctcctcggcttactcagccactgcacggggagcgtcacgagttacttcggcaaactcgagagcaagctttccgttatccggaatctcaacgaccaggtccttttcatcgaccagggtaacaggcccctcttcgaggacatgaccgacagcgactgtcgggacaacgcccccaggacgatcttcatcatctccatgtacaaggatagccagcccagaggaatggccgttacgatcagcgtcaagtgcgagaagatcagcacgctctcctgcgagaacaaaatcatctccttcaaggagatgaacccgcccgacaacatcaaggacaccaagtcagacatcatcttcttccagcggagcgtgcctggccacgacaataagatgcagttcgagtcctcgagctacgaggggtacttcctggcctgcgagaaggagagggacctgttcaagctgatcctcaaaaaggaggatgagctgggcgacaggtccatcatgttcaccgtccagaacgaggat

SEQ ID NO: 707 - DNA, 531 bp, synthetic construct
  misc_feature 1..531: note = IgLC_IL18
  source 1..531: mol_type = other DNA
atggcgtggaccgtcctcctcttaggcctccttagccactgcacgggcagcgtcaccagctacttcggaaagctcgagtccaagctctccgtcatccggaacctcaacgatcaagtcctcttcatagaccagggcaaccgccccctcttcgaggacatgaccgactccgactgcagggacaacgcccccaggacgatcttcatcatcagcatgtacaaggacagccagccgcgcggcatggcggtaaccatcagcgttaagtgcgagaagatcagcaccctctcctgcgagaacaagatcatctcctttaaggagatgaacccgcccgacaacatcaaagacacaaaatcggacatcatcttcttccagaggtccgtacccggccacgacaataagatgcagttcgagagcagcagctacgagggctatttcctcgcgtgcgagaaggagcgggacctcttcaagctcatcctcaaaaaagaggacgagctcggcgaccgctccatcatgtttaccgtccaaaatgaggac

SEQ ID NO: 708 - DNA, 531 bp, synthetic construct
  misc_feature 1..531: note = IgLC_IL18
  source 1..531: mol_type = other DNA
atggcctggaccgtcctcctcctcggcctcctcagccattgtacgggctccgtcacatcgtacttcggcaagctcgagtcgaaactcagcgtcatacggaatctcaacgaccaggtcctcttcatcgaccagggcaacaggcccttgttcgaggatatgaccgactcggactgcagggacaacgcccccagaacgatcttcatcatatccatgtacaaggacagccagcccaggggcatggccgtcacgatcagcgtcaagtgcgagaagatcagtaccctaagctgcgagaacaagatcatcagcttcaaggagatgaaccctcccgacaacatcaaagataccaagagcgacatcatcttttttcagaggagcgtgcccggccacgacaacaagatgcagttcgagagcagctcctacgagggctactttctcgcctgtgaaaaggagagggacctgttcaagttgatcctgaaaaaggaggacgagctgggcgaccggtccataatgtttaccgtgcagaacgaggac

SEQ ID NO: 709 - DNA, 531 bp, synthetic construct
  misc_feature 1..531: note = IgLC_IL18
  source 1..531: mol_type = other DNA
atggcctggaccgtcctactcctcggcttgctcagccactgcaccgggtccgtcaccagctacttcggcaagctcgagagcaagctctcagtcatccggaacctcaacgaccaggtactcttcatcgaccagggcaataggccgcttttcgaggatatgaccgatagcgactgcagagacaacgccccgcggaccatcttcatcatctccatgtacaaggacagccagcccaggggcatggccgtcactatctcggtcaagtgcgaaaagatctccaccctctcctgtgagaacaagatcatctccttcaaggagatgaacccgcccgacaacatcaaggacaccaagtccgacatcatattcttccagcggagcgttccgggccatgacaacaaaatgcagtttgaatccagcagctacgagggctacttcctggcgtgcgagaaggagagggacctgttcaagctcatcctcaaaaaggaggatgagctgggcgaccggagcatcatgttcaccgtgcagaacgaagac

SEQ ID NO: 710 - DNA, 531 bp, synthetic construct
  misc_feature 1..531: note = IgLC_IL18
  source 1..531: mol_type = other DNA
atggcctggaccgtcctcctactgggattgctcagccactgcaccggcagcgtaacttcgtacttcggtaagctcgagagcaagctcagcgtcatcaggaatctcaacgaccaggtccttttcatcgatcaggggaacaggcccctcttcgaggacatgaccgattccgactgtcgcgacaacgcccccaggaccatcttcatcatctccatgtacaaggacagccagccccggggcatggccgtcaccatcagcgttaagtgcgagaagatcagcacgttgagctgtgagaacaaaatcataagcttcaaggaaatgaacccgcccgacaacatcaaggacaccaagagcgacatcatcttcttccaacggtcggtgcccggccacgataacaagatgcagttcgagtcctcctcctacgaggggtacttcctcgcgtgcgagaaggagagggatctgttcaagctcatcctgaagaaggaagatgagctgggcgatcggtccatcatgttcaccgtgcagaatgaggac

SEQ ID NO: 711 - DNA, 531 bp, synthetic construct
  misc_feature 1..531: note = IgLC_IL18
  source 1..531: mol_type = other DNA
atggcctggacggtcctcctcctcggtctgctatcgcactgtacgggcagcgtcacctcgtatttcggcaaactcgaatccaagctctcggtcattaggaacctcaacgatcaggtcctcttcatcgaccagggcaacaggcccctcttcgaggatatgaccgatagcgactgccgggataacgcccccaggaccatcttcatcatcagcatgtacaaggactcgcagccccgcggcatggccgtgaccatcagcgtcaagtgcgagaaaatctccacgctaagctgcgagaacaagatcatcagcttcaaggagatgaaccccccagacaacatcaaggacacgaaaagcgacatcatcttcttccagaggagcgtccccggccacgacaacaagatgcagttcgagtcgtcgagctatgaggggtacttcctggcctgcgagaaggagagggacctgttcaagctgatcctgaaaaaggaggatgaactgggcgacaggagcatcatgttcaccgtgcagaacgaagac

SEQ ID NO: 712 - DNA, 531 bp, synthetic construct
  misc_feature 1..531: note = IgLC_IL18
  source 1..531: mol_type = other DNA
atggcctggaccgtattgctcctcggcctcctcagccactgtacgggctcggtcacctcctatttcggcaagctagaatccaagctctccgtaatcaggaacttgaacgatcaggtcctctttatcgatcagggaaataggccccttttcgaggacatgaccgactcggactgccgggacaacgccccccgcaccatattcatcatcagcatgtataaggactcccagcccaggggcatggccgtaaccatcagcgtcaagtgtgagaagatctccaccctcagctgcgagaacaagatcatctccttcaaggagatgaacccgcccgacaacatcaaggacaccaagagcgacatcatcttcttccaacgtagcgtgcccggtcacgacaacaagatgcagttcgagtcctcatcgtacgagggctactttctcgcctgcgagaaggagcgggatctgttcaagctcatcctgaagaaggaggacgagctgggcgataggtccataatgttcaccgtccagaacgaggac

SEQ ID NO: 713 - DNA, 531 bp, synthetic construct
  misc_feature 1..531: note = IgLC_IL18
  source 1..531: mol_type = other DNA
atggcgtggaccgtcctcctcctaggcctcttgagccactgcaccggcagcgtcaccagctacttcggcaaactcgagtccaagctcagcgtgatcaggaacctcaacgatcaggtcctctttatcgaccaggggaatcgtcccctcttcgaagacatgaccgactccgactgccgggataacgccccgcgaacgatctttatcatctccatgtataaggacagccagcccagaggcatggccgtcaccatcagcgttaagtgcgagaagatctccaccctcagctgcgagaacaagatcatcagcttcaaggagatgaacccacccgacaacatcaaggacaccaagagcgacatcatatttttccagcggagcgtgcccggccatgacaacaaaatgcagttcgagtcgtcaagctacgagggttatttcctcgcctgcgagaaggagcgcgacctctttaagctgattctcaagaaggaggacgagctgggcgaccgaagcatcatgttcaccgtccagaacgaggac

SEQ ID NO: 714 - DNA, 531 bp, synthetic construct
  misc_feature 1..531: note = IgLC_IL18
  source 1..531: mol_type = other DNA
atggcctggaccgtcctcctccttggactcctctcccattgcaccgggtcggtcacgtcctacttcggcaagctcgagtccaaactcagcgtcataaggaatctcaacgaccaggtcctcttcatcgaccagggaaaccggccccttttcgaggacatgaccgactcggactgcagggacaacgccccgcggaccatcttcatcatcagcatgtacaaggacagccagcccaggggcatggccgtcaccataagcgtcaagtgcgagaagatcagcaccctcagctgtgaaaacaagatcatcagcttcaaggagatgaacccgcccgacaacatcaaggacaccaagagcgacatcatcttcttccagcggtccgtgccgggccatgacaacaagatgcagttcgagtcctccagctacgaggggtacttcctggcctgcgagaaggagcgagatctgttcaagctaatcctgaagaaggaggacgagctgggcgaccgctcgatcatgttcaccgtgcagaatgaggat

SEQ ID NO: 715 - DNA, 531 bp, synthetic construct
  misc_feature 1..531: note = IgLC_IL18
  source 1..531: mol_type = other DNA
atggcctggaccgtcctcctcctcgggctccttagccactgtaccgggtccgtgacctcctacttcgggaaactcgaaagcaaactcagcgtcatccggaacttgaacgaccaggtcctcttcatcgaccagggcaaccggcccctcttcgaggatatgaccgatagcgattgcagggacaacgcccccaggaccatcttcatcatatccatgtacaaggacagccagccgaggggcatggccgtaaccatcagcgtcaagtgtgagaagatcagcacgctaagctgcgagaataaaatcatctcctttaaggagatgaacccgcccgacaacatcaaggacacgaagtccgacataatcttctttcagcggagcgtgccaggccacgataacaagatgcagttcgagtcctcgagctacgaaggctactttctggcctgtgaaaaagagagggacctgttcaagctgatcctgaagaaggaggacgaactcggcgaccggagcatcatgttcaccgtgcaaaacgaagac

SEQ ID NO: 716 - DNA, 531 bp, synthetic construct
  misc_feature 1..531: note = IgLC_IL18
  source 1..531: mol_type = other DNA
atggcgtggaccgtcctactcctcgggctcctctcccactgcaccggaagcgtcaccagctatttcggcaagctcgaaagcaagctatccgtcatccggaacctcaacgaccaggtcctcttcatcgatcaggggaacaggcccctcttcgaggatatgacggacagcgattgcagggacaacgccccgaggaccatcttcataatcagcatgtacaaggacagccagcccagggggatggccgtcaccatcagcgtaaagtgcgagaagatcagcacgctcagctgcgagaacaagatcatctccttcaaagagatgaacccacccgacaacatcaaggacacaaagagcgacataatatttttccagcgctccgtcccgggccacgacaacaaaatgcaattcgagagctcaagctatgagggctacttcctggcctgcgagaaggaaagggacctgttcaagctgatcctcaagaaggaggacgagctgggcgatcggtcgatcatgttcaccgtccagaacgaggat

SEQ ID NO: 717 - DNA, 531 bp, synthetic construct
  misc_feature 1..531: note = IgLC_IL18
  source 1..531: mol_type = other DNA
atggcgtggaccgtactcctcctcggccttctcagccattgcaccggcagcgtcacctcctacttcgggaagctcgaaagcaagctaagcgtcatccgcaacctaaacgaccaggtcttgttcatcgaccagggcaacaggcccctcttcgaggacatgaccgacagcgattgcagggacaacgccccgaggaccatcttcatcatctccatgtataaggacagccagcccagggggatggccgtcaccatcagcgtcaagtgcgaaaagatcagcacgctctcctgcgagaacaagatcatctccttcaaggaaatgaacccgcccgacaatatcaaagacacgaagtccgatatcatcttctttcagaggagcgtgcccggccatgacaacaagatgcagtttgagtcctccagctacgagggctacttcctggcctgtgaaaaggagcgggatctcttcaagctgatcctgaagaaggaggacgagctgggggacagaagcatcatgttcaccgtgcagaacgaggac

SEQ ID NO: 718 - DNA, 531 bp, synthetic construct
  misc_feature 1..531: note = IgLC_IL18
  source 1..531: mol_type = other DNA
atggcctggaccgtcctccttctcggcctcctcagccactgcaccggcagcgtcaccagctacttcggtaagctggagagtaagttgagcgtaatccggaatctcaacgaccaagtcctcttcatcgaccaggggaaccgacccctcttcgaggacatgaccgattcggactgccgggacaacgccccccggaccatcttcatcatcagcatgtacaaggactcccaacccaggggaatggccgtaaccatctccgttaagtgcgagaagatctcaacccttagctgcgagaacaaaatcatctcctttaaagagatgaaccctcccgacaacatcaaggacaccaagtcggacatcatcttcttccagaggtccgtgcccgggcatgacaacaagatgcaatttgagagcagcagctacgagggctactttctcgcctgcgagaaggagcgggacctgttcaagctgatcctgaagaaagaggatgagctgggcgacaggtccataatgttcacggtgcagaacgaagat

SEQ ID NO: 719 - DNA, 531 bp, synthetic construct
  misc_feature 1..531: note = IgLC_IL18
  source 1..531: mol_type = other DNA
atggcctggaccgtccttctcttgggcctcctctcccactgcaccggctccgtcacctcctacttcggcaagctcgagagcaaactcagcgtcataaggaacctcaacgaccaggttctcttcatcgaccagggcaaccgccccttattcgaggatatgaccgacagcgattgccgggacaacgcgcccaggaccatcttcatcatctccatgtacaaggacagccagcctaggggcatggccgtcaccatcagcgtcaagtgtgagaagatctcgaccttgagctgcgaaaataagattatcagcttcaaggagatgaacccaccggataatatcaaggacaccaagagcgacataatcttcttccagcggagcgtgccggggcacgacaacaagatgcagttcgagtcgagctcctacgagggttacttcctggcctgtgagaaggagagggacctgttcaagctgatcctgaagaaggaggacgagctgggggacaggagcatcatgttcaccgtccagaacgaggac

SEQ ID NO: 720 - DNA, 531 bp, synthetic construct
  misc_feature 1..531: note = IgLC_IL18
  source 1..531: mol_type = other DNA
atggcctggacagtcctcctcctcgggctcctcagccactgcaccggcagcgtcacctcctacttcggcaagctcgagagcaagctcagcgtcatcaggaacctcaacgatcaggtcctcttcatcgaccaggggaacaggcccctcttcgaggatatgaccgacagcgactgccgggataacgcgccccggaccatcttcatcatcagcatgtacaaggacagccaacccaggggcatggccgtcaccatcagcgtcaagtgcgaaaagatcagcaccctcagctgcgagaacaaaatcataagctttaaggagatgaaccctcccgacaacatcaaggacacgaagtccgacatcatcttctttcagcggagcgtgcccgggcatgacaacaaaatgcagttcgagagctccagctatgaggggtactttctggcgtgcgagaaggagagggatctcttcaagctgatcctgaaaaaggaggacgagctgggcgaccggagcatcatgttcaccgtccagaatgaagac

SEQ ID NO: 721 - DNA, 531 bp, synthetic construct
  misc_feature 1..531: note = IgLC_IL18
  source 1..531: mol_type = other DNA
atggcctggaccgtactcctcctcgggctcctctcacactgtaccggcagcgtcaccagctacttcgggaagctcgagtccaagctcagcgtcatccggaacctcaacgatcaggtactcttcatcgaccagggcaaccgcccgctgttcgaggatatgacggacagcgactgccgggacaacgcccctcggaccatcttcatcatcagcatgtacaaggatagccagccccgcggtatggccgtaactatcagcgtaaagtgcgagaagatctccaccctcagctgcgagaacaagatcataagtttcaaggagatgaacccacccgataacatcaaggacaccaagagtgatatcatcttcttccagaggtcggtgcccggccacgacaacaagatgcagtttgaaagcagctcctacgaggggtacttcctggcctgcgagaaggagagggacctgttcaagctgatcctgaaaaaggaggacgagctgggcgaccggagcatcatgttcaccgtgcagaacgaggat

SEQ ID NO: 722 - DNA, 531 bp, synthetic construct
  misc_feature 1..531: note = IgLC_IL18
  source 1..531: mol_type = other DNA
atggcctggaccgtcctcctcctcggactcctcagccattgcaccggcagcgtcaccagctacttcggtaagctagagagcaagcttagcgtcattcgcaacctcaacgaccaggtactcttcatcgaccagggcaatcggcccctcttcgaggacatgaccgacagcgactgccgggacaacgcccccaggaccatcttcatcatcagcatgtacaaagactcccagccgagggggatggccgttaccatctccgtaaagtgcgagaagattagcaccctcagctgcgaaaacaagatcatctccttcaaggagatgaacccgcccgataacatcaaggacaccaagagcgacatcatcttcttccagaggagcgtccccggccacgacaataagatgcagttcgagagcagcagctacgagggctacttcctggcctgcgagaaggagagggacctgttcaagctcatcctgaaaaaagaggacgagctgggcgaccgaagcatcatgttcaccgttcagaacgaggac

SEQ ID NO: 723 - DNA, 531 bp, synthetic construct
  misc_feature 1..531: note = IgLC_IL18
  source 1..531: mol_type = other DNA
atggcgtggaccgttctcctactcggattgcttagccactgcaccggcagcgtcacaagctacttcggtaagctcgagagcaagctcagcgtgatccggaacctcaacgaccaggtcctcttcatcgaccaggggaatcggcccctcttcgaagacatgaccgactccgactgtagggacaacgcccccaggaccatcttcatcatcagcatgtacaaggacagccagccccgcggaatggccgtcacgatctccgtaaagtgcgagaagatctccaccctttcctgcgagaacaagatcatcagcttcaaggagatgaacccgcccgacaatatcaaggacaccaagagcgacatcatcttctttcagaggagcgtgcccggccatgacaataagatgcagttcgagagcagctcgtacgagggctatttcctggcctgcgagaaggagagggacctgtttaagctgatcctgaagaaggaggacgagctgggggacaggagcatcatgttcaccgtgcagaacgaggac

SEQ ID NO: 724 - DNA, 531 bp, synthetic construct
  misc_feature 1..531: note = IgLC_IL18
  source 1..531: mol_type = other DNA
atggcctggaccgtcctcctcctcggcctcctctcccactgtaccggctccgttacgagctacttcggcaagctagagagcaagctcagcgttatcaggaacctcaacgaccaggtccttttcatcgaccagggcaatcggccccttttcgaagacatgaccgacagcgactgtcgggacaacgctccgaggaccatcttcatcatcagcatgtacaaggacagccagcccagagggatggccgtcaccatcagcgtcaagtgcgagaagataagcaccctctcgtgcgagaacaaaatcatctccttcaaagagatgaaccccccggacaacatcaaggacaccaagagcgatatcattttcttccaacgtagcgtccccgggcacgacaacaagatgcagttcgagagcagcagctacgagggctacttcctcgcctgcgaaaaggaaagggacctcttcaagctgatcctgaagaaggaggatgagctcggggacaggtccatcatgttcacggtgcagaacgaagac

SEQ ID NO: 725 - DNA, 531 bp, synthetic construct
  misc_feature 1..531: note = IgLC_IL18
  source 1..531: mol_type = other DNA
atggcctggacggtcctcctcttggggctactcagccattgcaccggctccgtcaccagctacttcggcaagctcgagtccaagctctccgtaatcaggaatctcaacgaccaggtcctcttcatcgaccaggggaaccggcccctcttcgaagacatgaccgacagcgactgtcgggacaacgcccccaggacgatcttcataatctccatgtacaaggatagccagcccagggggatggccgtcaccatcagcgtcaagtgtgagaagatctccacgctcagctgcgagaataagatcatttccttcaaggagatgaacccgcccgacaacatcaaggacacgaaaagcgacatcatcttctttcagcgctccgtcccgggccacgacaacaagatgcagttcgagtccagctcctacgagggctactttctggcctgcgaaaaggaacgggatctcttcaagctgattctcaagaaggaggacgagctgggtgacaggagcatcatgtttacggtgcagaatgaggat

SEQ ID NO: 726 - DNA, 531 bp, synthetic construct
  misc_feature 1..531: note = IgLC_IL18
  source 1..531: mol_type = other DNA
atggcgtggacggtcctcctcctaggccttctctcccactgcaccggtagcgtcaccagctacttcggcaagctcgagtcgaagctcagcgtcatacggaacctcaacgaccaggttctcttcatcgaccagggaaaccgtcccctcttcgaagacatgaccgactccgactgccgggacaacgcgcccaggacgatcttcataatcagcatgtacaaggactcgcagcccaggggcatggccgtaaccatcagcgtcaagtgcgaaaagatctccaccctcagctgcgagaacaagataatcagcttcaaggagatgaacccgcccgacaacatcaaggacaccaagtccgacatcatcttcttccagcgctccgtgcccggccacgacaataagatgcagtttgagagcagctcctacgaaggctactttctggcctgcgagaaggagcgggacctgttcaagctgatcctgaagaaggaggacgagctgggcgatcggagcatcatgttcacggtgcagaacgaggac

SEQ ID NO: 727 - DNA, 531 bp, synthetic construct
  misc_feature 1..531: note = IgLC_IL18
  source 1..531: mol_type = other DNA
atggcgtggacggtcctcctcctcggcctcctctcacactgcaccgggagcgtcaccagctacttcggcaagctcgaaagcaagctctcggtcatcaggaacctcaacgaccaggtcctcttcatcgaccagggtaatcgcccactcttcgaggatatgaccgacagcgattgccgggacaacgccccgcgtacaatcttcatcatcagtatgtacaaggacagccagccgcggggcatggccgtcaccatctccgtcaagtgcgaaaagatcagcacgcttagctgcgagaacaagatcatcagcttcaaggagatgaatcctcccgacaacatcaaggataccaagtccgatatcattttcttccagcggtccgtgccaggccacgacaacaagatgcaatttgaaagctcctcctacgagggctacttcctggcctgcgagaaggaaagggacctgttcaagctgatcctgaagaaggaggacgagctgggcgacaggtccatcatgtttactgtgcagaacgaggac

SEQ ID NO: 728 - DNA, 531 bp, synthetic construct
  misc_feature 1..531: note = IgLC_IL18
  source 1..531: mol_type = other DNA
atggcctggaccgtactactcctcggcctcctttcccactgcaccggttcggtcacgagctacttcggcaagctggagagcaagctctcggtcatccggaacctcaacgaccaggtcctcttcatcgaccagggcaacaggcccttattcgaggacatgaccgacagcgactgcagggacaacgcgcccaggaccatcttcatcatcagcatgtacaaggactcccagcccagggggatggccgtaaccatctccgtaaagtgcgagaagatcagcaccctcagctgcgaaaacaaaatcatcagcttcaaggagatgaacccgccggacaacatcaaagacaccaagtccgacattatcttctttcagcgcagcgtccccgggcacgacaacaagatgcagttcgagagcagctcctacgagggctacttcctggcctgcgagaaggaacgggacctcttcaagctgatcctcaagaaggaggatgagctcggggaccgctccatcatgtttaccgtgcagaacgaagat

SEQ ID NO: 729 - DNA, 531 bp, synthetic construct
  misc_feature 1..531: note = IgLC_IL18_SN
  source 1..531: mol_type = other DNA
atggcgtggacggtcttgctcctcggcctcctaagccactgcacgggctccgtcacgagctatttcggcaagctcgagagcaagttgagcgtcatcaggaacctcaacgaccaagtcctctttatcgaccagggcaaccggcccctcttcgaggacatgacgtccagcgactgcaggaacaacgcccccaggaccatcttcataatcagcatgtataaggactcccagcccagggggatggccgtaaccatctcggtgaagtgcgaaaaaatcagcaccctcagctgtgagaataagatcatctccttcaaggagatgaacccgccggacaacataaaagacaccaaaagcgacatcatcttcttccagcggagcgtgccgggccacgacaacaaaatgcagttcgagagctcgagctatgagggctacttcctcgcctgtgagaaggagagggacctcttcaagctgattctgaagaaggaggacgaactgggggacaggagcatcatgttcaccgtgcagaatgaggat

SEQ ID NO: 730 - DNA, 531 bp, synthetic construct
  misc_feature 1..531: note = IgLC_IL18_SN
  source 1..531: mol_type = other DNA
atggcctggaccgtcctcctcctcggccttctcagccactgcaccggcagcgtcacctcctacttcgggaagctcgagagcaagctcagcgtaatacggaacctcaacgaccaggtccttttcatcgatcagggtaaccgacccctcttcgaggacatgaccagctcggattgcaggaacaacgccccccggaccatcttcatcatcagcatgtacaaggacagccagcccaggggcatggccgttactatcagcgttaagtgcgagaagatctccacactcagctgtgagaacaagatcatctcctttaaggagatgaaccccccggacaacatcaaggacaccaagtccgacatcatcttcttccagaggagcgtgccgggccatgacaataagatgcaattcgagtccagcagctacgagggctacttcctcgcctgcgagaaggagagggacctgttcaagctgatcctgaagaaggaggatgagctcggcgaccgaagcataatgtttaccgtgcagaacgaggac

SEQ ID NO: 731 - DNA, 531 bp, synthetic construct
  misc_feature 1..531: note = IgLC_IL18_SN
  source 1..531: mol_type = other DNA
atggcctggaccgtgctcctcttaggccttctcagccactgcacgggcagcgtcacctcctacttcggcaagcttgagagcaagcttagcgtaatcaggaacttgaacgaccaggtcctcttcatcgatcagggcaataggcccctcttcgaggatatgacaagcagcgactgccgcaacaacgccccgaggaccatcttcatcatcagcatgtacaaggatagccagccccgcgggatggccgtcaccatctccgtaaagtgcgagaagataagcacccttagctgtgagaacaagatcatctcattcaaggagatgaacccgcccgacaacatcaaagacaccaagtcagatataatcttctttcagaggagcgtgcccgggcatgacaacaagatgcagttcgagagctcctcctatgaggggtacttcctcgcctgcgagaaggagcgggacctcttcaagctgatcctgaagaaggaggacgagctgggggacaggagcatcatgttcaccgttcagaacgaagac

SEQ ID NO: 732 - DNA, 531 bp, synthetic construct
  misc_feature 1..531: note = IgLC_IL18_SN
  source 1..531: mol_type = other DNA
atggcctggacggtcctcctcctcggactcctcagccactgcaccggcagcgtcacctcgtatttcggcaagctcgagagcaagctctccgttatccggaacctaaacgaccaggtcctcttcatcgaccagggcaacaggcccctattcgaggatatgaccagcagcgactgccgaaacaacgccccccggaccatcttcatcatcagcatgtacaaggacagccagcccaggggcatggcagtcaccatcagcgtcaagtgcgagaagataagcacccttagctgcgaaaacaagatcatctccttcaaggagatgaacccgcccgacaacatcaaggacaccaagagcgatatcatcttcttccagcgctccgtgcctggacacgacaacaagatgcagttcgagagcagctcctacgagggctatttcctggcctgcgagaaggagcgggacctgttcaagctgatcctgaagaaggaggatgagctgggggacaggtccataatgttcaccgtccagaacgaggat

SEQ ID NO: 733 - DNA, 531 bp, synthetic construct
  misc_feature 1..531: note = IgLC_IL18_SN
  source 1..531: mol_type = other DNA
atggcgtggaccgtcctcctccttggcctcctaagccactgcaccggcagcgtcacaagttacttcggcaagctcgagagcaagctctcggtcatccggaacctcaacgaccaggtcctctttatcgaccaggggaaccggcccctcttcgaggatatgaccagctccgactgcaggaacaacgccccgaggaccatcttcatcatctccatgtataaggatagccagccccggggcatggccgtcaccatctccgtcaagtgcgagaagatcagcacgctcagctgtgagaataagatcatctccttcaaggagatgaacccacccgacaacatcaaggacaccaagagcgacatcatcttcttccaaaggagcgtccccggccacgacaacaagatgcagttcgagagctcatcctatgagggctatttcctggcctgtgagaaggagagggacctgttcaagctgatactcaagaaagaggatgagctgggggacaggtccatcatgttcaccgtgcagaatgaggac

SEQ ID NO: 734 - DNA, 531 bp, synthetic construct
  misc_feature 1..531: note = IgLC_IL18_SN
  source 1..531: mol_type = other DNA
atggcctggacggtcctcctcctagggctcctcagccactgcacggggagcgtcaccagctacttcgggaagctagagtccaagttgagcgtcatcaggaacctcaacgatcaggtcctcttcatcgaccaggggaataggcccctcttcgaggacatgaccagcagcgactgccggaacaacgccccccgcaccatcttcatcatctccatgtacaaggactcccagcccagggggatggcggtaaccatctccgtcaagtgcgagaaaataagcaccctaagctgcgagaacaaaatcatcagcttcaaggagatgaacccgcccgacaacatcaaggacaccaagagcgacatcatcttcttccagcgttccgtgccgggacacgacaataagatgcagttcgagagctccagctacgagggctatttcctggcatgcgagaaggagagggacctcttcaagctgatcctgaagaaggaggacgagctgggcgacaggtccatcatgttcaccgtgcaaaacgaggac

SEQ ID NO: 735 - DNA, 531 bp, synthetic construct
  misc_feature 1..531: note = IgLC_IL18_SN
  source 1..531: mol_type = other DNA
atggcctggaccgtcctactcttgggcctactcagccactgcaccggcagcgtcacgagctacttcggcaagctcgagagtaaactcagcgtcataaggaacctcaacgaccaggtcctcttcatcgaccagggcaataggcccctcttcgaggacatgaccagctccgactgtcggaataacgccccccggaccatcttcatcatcagcatgtacaaggactcgcagccccgcggcatggccgtcacgataagcgtcaagtgcgagaaaatctcgacactctcctgcgaaaacaagatcatctccttcaaggagatgaatccccccgacaacatcaaggacaccaagagcgacatcatcttcttccagcgcagcgtgcccggccacgacaataagatgcagttcgagagcagctcctatgaggggtacttcctcgcctgcgagaaggagagggatctgttcaaactgatcttgaagaaggaggatgagctgggggacaggtccatcatgttcaccgtgcagaacgaggac

SEQ ID NO: 736 - DNA, 531 bp, synthetic construct
  misc_feature 1..531: note = IgLC_IL18_SN
  source 1..531: mol_type = other DNA
atggcctggaccgtcctattgctaggcctcctcagccactgcaccggaagcgtaacctcctacttcggcaagctcgagagcaaactcagcgtgatcaggaatctaaacgatcaggtcctcttcatcgaccagggcaaccgccccttattcgaggacatgacgagcagcgactgccgaaacaacgcgccccgcaccatctttatcatcagcatgtacaaggattcccagcccaggggcatggccgtcacgatatccgtcaagtgcgaaaagatcagcacccttagctgtgagaacaagatcatctccttcaaggagatgaatccccccgacaacatcaaggacaccaagtccgacatcattttcttccagaggagcgtcccggggcacgataacaagatgcagttcgagtccagctcctacgagggctacttcctggcctgcgagaaggagagggacctgttcaagctcatcctcaagaaggaggatgagctgggggaccggtccatcatgttcaccgtgcagaacgaggac

SEQ ID NO: 737 - DNA, 531 bp, synthetic construct
  misc_feature 1..531: note = IgLC_IL18_SN
  source 1..531: mol_type = other DNA
atggcctggaccgtcctcctcctcggcctactctcccactgtaccgggtccgtcacctcatacttcggcaagctcgagagcaagctcagcgtcatcaggaaccttaacgaccaggttctttttatcgaccaggggaacaggcccctattcgaggacatgacctccagcgactgcaggaacaacgcccccaggaccatcttcatcatcagcatgtacaaggactcccagccccggggcatggccgttaccatctccgtcaagtgcgaaaaaattagcaccctcagctgtgagaacaagatcatcagcttcaaagagatgaacccgcccgacaacatcaaggacaccaagagcgatatcatcttctttcagcggtccgtccccggccacgacaacaagatgcagttcgagagcagcagctacgagggctacttcctggcctgcgaaaaggagagggacctgttcaagctgatcctgaagaaggaggacgagctgggggacaggtccatcatgttcaccgtccagaacgaggac

SEQ ID NO: 738 - DNA, 531 bp, synthetic construct
  misc_feature 1..531: note = IgLC_IL18_SN
  source 1..531: mol_type = other DNA
atggcctggaccgtcctcctcctcggcttgctcagccactgcaccgggagcgttaccagctacttcggcaagctcgagagcaagctgtcagtgatcaggaatctcaacgaccaagtcctcttcatcgatcaggggaaccggcccctcttcgaggacatgacgtcctccgactgccggaataacgcccctcgcaccatcttcatcatcagcatgtacaaggatagccagcccaggggcatggccgtcaccatcagcgtaaagtgtgagaagatctcgacgctcagctgcgaaaataagatcatcagcttcaaggagatgaacccgcccgacaacatcaaggacacaaagagcgacatcattttctttcagcggagcgtgcccggccacgacaataaaatgcagttcgagagcagctcgtatgaaggctacttcctcgcgtgcgagaaggagcgggatctgttcaagctgatcctgaagaaggaggacgagctgggggaccggagcatcatgttcaccgtgcagaacgaagac

SEQ ID NO: 739 - DNA, 531 bp, synthetic construct
  misc_feature 1..531: note = IgLC_IL18_SN
  source 1..531: mol_type = other DNA
atggcctggaccgtcttgctcctcgggctcctgagccactgcaccggctccgtcacctcctacttcggaaagctcgagagcaagttgagcgtcatcaggaacctcaacgaccaggtcctttttatcgaccaggggaacaggcccctattcgaggacatgaccagcagcgactgtcggaataacgcacccaggaccatcttcatcatcagcatgtataaggacagccagcccagggggatggcggtcaccatctccgtaaagtgcgagaagatcagcaccctctcctgcgagaataaaatcatctcgttcaaggagatgaaccctccggacaacatcaaggacacgaagtccgacatcatcttcttccagcggagcgtacccggccacgacaacaaaatgcagtttgagagcagcagctacgaggggtacttcctcgcctgtgaaaaggagagggacctgtttaagctgatcctgaaaaaagaagacgagctcggagatcggagcatcatgtttacggtgcagaatgaggat

SEQ ID NO: 740 - DNA, 531 bp, synthetic construct
  misc_feature 1..531: note = IgLC_IL18_SN
  source 1..531: mol_type = other DNA
atggcctggaccgtcctactcctcggcttgctaagccactgtacggggagcgtcacgagctacttcgggaagctcgagagcaagctctccgtaatcaggaacctcaacgaccaggtactcttcatcgaccagggcaacaggcccctcttcgaggacatgaccagctccgattgccggaacaacgccccaaggacgatcttcataatcagcatgtacaaagacagccagcccaggggcatggccgtcacgatctccgttaagtgcgagaagatcagcaccctcagctgcgagaataagatcataagcttcaaggagatgaaccccccggataacatcaaggacaccaagagcgacatcatcttctttcaacggtccgtccccggccacgacaacaagatgcagtttgagtcatcctcctacgagggttacttcctggcctgcgagaaggagagggacctgttcaagctcatcctgaaaaaggaggatgagctgggcgacaggagcatcatgttcaccgtgcagaacgaggat

SEQ ID NO: 741 - DNA, 531 bp, synthetic construct
  misc_feature 1..531: note = IgLC_IL18_SN
  source 1..531: mol_type = other DNA
atggcctggacggtcctcctcctcggtctgctcagccactgcaccggcagcgtcacctcctacttcggcaagttggagagcaagctctcggtgatccggaacctcaacgaccaggtcctcttcatcgaccagggcaacaggcccctcttcgaggacatgacgtcctccgactgcaggaacaacgctcccaggaccatcttcatcataagcatgtacaaggactcccagccccggggcatggcggtcaccatctccgtcaagtgtgagaagatcagcaccctctcctgtgagaacaagatcatctccttcaaggagatgaatccccccgacaacatcaaggataccaagagcgacatcatcttcttccagcggagcgtacccgggcacgacaataaaatgcagttcgagtccagcagctatgagggctacttcctggcgtgcgagaaggagagggacctgttcaaactgatactgaagaaggaggacgagctgggcgaccggagcatcatgttcacagtgcagaacgaggat

SEQ ID NO: 742 - DNA, 531 bp, synthetic construct
  misc_feature 1..531: note = IgLC_IL18_SN
  source 1..531: mol_type = other DNA
atggcctggaccgtcctcctcctcggcctcctcagccactgcaccggcagcgtaacgagctacttcggtaagctcgagagcaagctcagcgtcatccggaacctcaacgaccaggtcttgttcatcgaccagggcaacaggcccctcttcgaggacatgacctcgagcgattgtaggaacaacgcccccaggaccatcttcatcatcagcatgtacaaagatagccagccacggggcatggccgtcaccatctcggttaagtgcgagaaaatctccaccctcagctgcgagaacaaaataatcagcttcaaggagatgaatccccccgataacataaaggataccaaaagcgacatcatcttcttccagaggtccgtgccgggccatgacaacaagatgcagttcgagtcctccagctacgagggctactttctggcctgcgagaaggagagggacctgttcaagctgatcctgaagaaggaggatgagctgggcgacaggtccatcatgttcaccgtgcagaatgaggac

SEQ ID NO: 743 - DNA, 531 bp, synthetic construct
  misc_feature 1..531: note = IgLC_IL18_SN
  source 1..531: mol_type = other DNA
atggcgtggacagtgctcctcctcggcctcctcagccactgcaccggtagcgtcacctcctacttcgggaagcttgagtccaagctcagcgtaatcaggaacctcaacgaccaggtcctcttcatcgaccagggcaaccgccccctcttcgaggatatgaccagcagcgattgtcgaaacaacgccccccggaccatcttcatcatcagcatgtacaaagatagccagcccagggggatggccgtcaccatctccgtcaagtgtgagaagatcagcacgctctcctgcgagaacaagatcatctccttcaaggagatgaacccgcccgacaacatcaaggacacgaagtccgatatcatcttcttccagcggagcgtccccggccatgacaataagatgcagttcgagtcctccagttacgagggctatttcctggcctgcgaaaaggagagggacctgttcaagctgatcctgaagaaggaagacgagctgggcgacaggagcatcatgttcaccgtgcagaacgaggac

SEQ ID NO: 744 - DNA, 531 bp, synthetic construct
  misc_feature 1..531: note = IgLC_IL18_SN
  source 1..531: mol_type = other DNA
atggcctggaccgtcctccttctcgggctactctcccactgcaccgggagcgtcacctcatacttcggcaagctcgagagcaagctctcggtcatcaggaacctcaacgaccaggtcctcttcatcgaccagggcaataggcccctcttcgaggacatgaccagctccgactgcaggaacaacgccccccgcaccatctttatcatcagcatgtataaggacagccagccgcggggcatggccgtcacgatctccgtcaagtgcgagaaaatcagcacgctcagctgcgagaacaaaatcatcagctttaaagagatgaatccccccgacaacatcaaagacacgaaaagcgacatcatcttcttccaacgtagcgtgcccggccacgacaacaagatgcagttcgagagcagcagctatgaggggtacttcctggcgtgcgagaaggagagggacctgttcaagctgatcctgaagaaagaggacgagctgggcgaccgaagcatcatgtttacagtccagaatgaggat

SEQ ID NO: 745 - DNA, 531 bp, synthetic construct
  misc_feature 1..531: note = IgLC_IL18_SN
  source 1..531: mol_type = other DNA
atggcctggaccgttctcctcctcggcctactcagccactgcaccggcagcgtcacctcctacttcggcaagctagaaagcaagctcagcgttatcaggaatctaaacgatcaggttctcttcatcgatcaagggaaccgccccctcttcgaggatatgaccagctcggactgtaggaacaacgcccccaggaccattttcatcatctccatgtacaaggatagccagccccgggggatggccgtcaccatcagcgtcaagtgcgagaaaatcagcacgctcagctgcgagaacaaaatcatatccttcaaggagatgaatccgcctgataacatcaaagacacaaagagcgacatcatcttcttccagaggagcgtgcccggccacgataacaagatgcagttcgagagcagcagctacgaggggtacttcctggcttgcgagaaggagagggatctgtttaagctcatcctgaagaaggaggacgagctgggggacaggagcatcatgttcaccgtccagaacgaggat

SEQ ID NO: 746 - DNA, 531 bp, synthetic construct
  misc_feature 1..531: note = IgLC_IL18_SN
  source 1..531: mol_type = other DNA
atggcgtggacagtcctcctcctcggacttcttagccactgcaccggctccgtcacctcctacttcgggaaactcgagagcaagctttcggtcatcaggaacctcaacgaccaggtcctcttcatcgaccaggggaacaggcccctcttcgaggacatgaccagctccgactgcaggaataacgcccccaggaccatcttcatcatcagcatgtacaaggacagccagccccgggggatggccgtcaccatcagcgtcaagtgcgagaagatcagcaccttgtcctgcgagaataagatcatctcctttaaggagatgaatcccccagacaacatcaaggacaccaagtccgatatcatcttcttccagcggtccgtgcccggccacgacaacaagatgcagttcgagagctccagttacgagggctatttcctcgcctgcgagaaggagagggacctgttcaagctgatactgaaaaaggaggacgagctgggcgatcggagcatcatgttcaccgtgcagaacgaggac

SEQ ID NO: 747 - DNA, 531 bp, synthetic construct
  misc_feature 1..531: note = IgLC_IL18_SN
  source 1..531: mol_type = other DNA
atggcctggaccgtgctcctcctcgggctcctcagccactgcaccggcagcgttacaagctacttcggcaagctcgaaagcaagctctccgtcatcaggaacctcaacgaccaggtcctcttcatcgaccaggggaacaggcccctcttcgaggacatgaccagcagcgactgtaggaataacgcgcccaggaccatctttatcatcagtatgtacaaggacagccagcccaggggaatggccgtcaccatctccgtcaagtgcgagaaaatcagcaccctcagctgtgagaacaagatcatcagcttcaaggagatgaacccgcccgataacatcaaggacactaagagcgacatcatcttcttccagaggagcgtgcccggccacgataacaagatgcagttcgagtccagctcatacgaggggtactttctggcctgtgagaaggagagggacctgttcaagctcatcctgaagaaggaggatgagctcggcgaccgaagcatcatgttcaccgtgcaaaacgaggac

SEQ ID NO: 748 - DNA, 531 bp, synthetic construct
  misc_feature 1..531: note = IgLC_IL18_SN
  source 1..531: mol_type = other DNA
atggcctggaccgtcctcctccttggcctacttagccactgcaccggtagcgtcaccagctacttcggcaagctcgagagcaagctcagcgtcatcaggaacctcaacgatcaggtactcttcatcgaccaggggaatcgtcccctcttcgaggacatgacctcatccgactgccgcaacaacgccccccggaccatcttcatcatctcgatgtacaaggactcccagcccagggggatggccgtcaccatctccgtcaagtgcgagaagatcagcaccctcagctgcgaaaacaagataatctccttcaaggagatgaacccgcccgacaacatcaaggacacgaaaagcgacattatcttcttccagaggagcgtgccggggcacgacaacaagatgcagttcgagtcgtccagctacgagggctatttcctcgcctgcgagaaagagagggacctgttcaagctgatcctgaagaaggaggacgagctgggggataggagcatcatgttcaccgtccagaacgaagac

SEQ ID NO: 749 - DNA, 531 bp, synthetic construct
  misc_feature 1..531: note = IgLC_IL18_SN
  source 1..531: mol_type = other DNA
atggcctggacggtcctcctcctcgggctccttagccactgtaccgggtcggtcacaagctacttcggcaagctcgagagcaagcttagcgtaatcagaaaccttaacgatcaggtcctttttatagaccagggcaaccgtccgctgttcgaggatatgaccagcagcgactgcaggaataacgccccccggacgatattcatcatcagcatgtataaggatagccagccgcgagggatggccgtcaccatcagcgtcaagtgcgagaagatcagcacgctctcctgcgagaataagatcatctccttcaaggagatgaaccccccggacaacatcaaggataccaagagcgacatcatcttcttccagaggagcgtgccaggccacgacaataagatgcagtttgagagcagctcctacgaggggtattttctggcctgcgagaaggagagggacctgtttaagctgatcctgaagaaggaggacgagctgggcgaccgaagcatcatgttcaccgtgcaaaacgaggat

SEQ ID NO: 750 - DNA, 531 bp, synthetic construct
  misc_feature 1..531: note = IgLC_IL18_SN
  source 1..531: mol_type = other DNA
atggcctggacggtcctcctcctcggtttgctcagccactgcaccggctccgtcacgagctatttcggtaagctcgagagcaagctctccgtcatcaggaatctcaacgaccaggtcctctttatcgaccaggggaacaggcccctcttcgaagacatgaccagctccgactgcaggaacaacgcccccaggaccatcttcatcatcagcatgtacaaggactcacagccccggggcatggcggttaccatcagcgtcaagtgcgagaagataagcacgctcagctgcgagaacaaaatcatcagcttcaaggagatgaacccgcccgataacatcaaagacaccaagagcgatatcatcttcttccagcgcagcgtgccggggcacgataataagatgcagttcgagtcctccagctatgagggctatttcctggcctgcgagaaggagcgggacctgttcaagctcatactcaagaaggaggacgagctgggtgacaggtcgatcatgttcaccgtgcagaacgaagat

SEQ ID NO: 751 - DNA, 531 bp, synthetic construct
  misc_feature 1..531: note = IgLC_IL18_SN
  source 1..531: mol_type = other DNA
atggcgtggacggtcctccttcttgggctcctaagccactgcaccggcagcgtaacctcctacttcgggaagctcgagtcaaagctcagcgtcatcaggaacctcaacgaccaggtcttgttcatcgaccagggaaaccggcccctattcgaagacatgacgagctcagactgccgtaacaacgcccccaggaccatcttcatcatcagcatgtacaaggattcccagcccaggggaatggccgtcaccatcagcgtaaagtgcgagaagataagcaccctcagctgcgagaataaaatcatctccttcaaggagatgaacccacccgacaacatcaaggacaccaagtccgacatcatcttcttccagcgatcggtgccggggcacgacaacaagatgcagttcgagagctccagctacgaaggctacttcctcgcctgcgagaaggagagggacctcttcaagctcatcctgaagaaggaggacgaactgggcgataggagcattatgttcactgtgcagaatgaggac

SEQ ID NO: 752 - DNA, 531 bp, synthetic construct
  misc_feature 1..531: note = IgLC_IL18_SN
  source 1..531: mol_type = other DNA
atggcctggaccgtccttctcctagggttgctaagccactgcaccgggagcgtcaccagctacttcgggaagttggagagcaagctcagcgtcatccgcaacttgaacgaccaggtcctattcatcgaccagggcaataggcccctattcgaggatatgaccagctccgactgccggaacaacgcccccaggaccatcttcatcatctccatgtacaaggatagccagcccaggggcatggccgtaacgatctccgtaaagtgcgagaagatcagcacgctctcgtgtgagaataagatcatctctttcaaagagatgaacccgcccgacaacatcaaggataccaagtcagacatcatcttcttccagaggtccgtccccgggcacgacaacaagatgcagttcgagagctccagctatgagggctacttcctggcgtgcgagaaggagagggacctgttcaagctgatcctcaaaaaggaggacgagctcggggacaggagcatcatgttcacagtgcagaacgaggac

SEQ ID NO: 753 - DNA, 531 bp, synthetic construct
  misc_feature 1..531: note = IgLC_IL18_SN
  source 1..531: mol_type = other DNA
atggcctggacggtcctcctactcggcctcctcagccactgcaccgggtccgtcactagctacttcggcaaactcgaatccaagctaagcgtcatccggaacctcaacgaccaggtcttgttcatcgatcagggcaaccgccccttattcgaagacatgaccagctccgactgccggaacaacgcgcccaggaccatcttcataatttcgatgtacaaggacagccagcccaggggcatggcggtcaccatcagcgtcaagtgcgagaagatatccaccctctcgtgcgagaacaagatcatctcgttcaaggagatgaacccgcccgacaacatcaaagacaccaaaagcgacatcatcttctttcagcgctcggtgcccgggcatgacaacaaaatgcagttcgagagcagcagctacgaggggtacttcctggcctgtgaaaaggagagggacctgttcaagctcatcctcaagaaagaggacgaactgggcgacaggagcatcatgtttaccgtgcagaatgaggac

SEQ ID NO: 754 - DNA, 546 bp, synthetic construct
  misc_feature 1..546: note = IL1ra_IL18
  source 1..546: mol_type = other DNA
atggaaatttgcaggggccttcgcagccacctaatcaccctcctcctcttcctcttccatagcgagactatctgctacttcgggaagctagagagcaagctcagcgtcatcaggaacctcaacgaccaggtcctattcatagaccaggggaaccggccactcttcgaggatatgaccgacagcgattgccgggacaacgccccccgaaccatcttcatcatcagcatgtacaaggactcccagcccaggggcatggccgtcacaataagcgtcaagtgcgagaagatcagcacgctcagctgcgagaataagatcatctccttcaaggagatgaatcccccggacaacatcaaggacaccaaaagcgacatcatattcttccagaggagcgtgcctgggcacgacaacaagatgcagttcgaaagctccagctacgagggctacttcctcgcctgcgagaaggagcgggacctgttcaagctcatcctcaagaaggaggatgagctgggggacaggagcatcatgttcaccgtccagaatgaagac

SEQ ID NO: 755 - DNA, 546 bp, synthetic construct
  misc_feature 1..546: note = IL1ra_IL18
  source 1..546: mol_type = other DNA
atggagatctgcagggggctaaggtcccacttaataaccctcctcctattcctttttcactccgagacgatttgctacttcggcaagctcgagtcgaagctctccgtcatccggaacctcaacgaccaggtcttgttcatcgaccaggggaacaggcccttgttcgaggacatgaccgattccgactgccgggacaacgccccccgcaccatcttcatcatctccatgtacaaggacagccagcccaggggcatggccgttaccatctcggtcaagtgcgagaagatcagcaccctctcctgcgagaacaagatcatctccttcaaggagatgaatcccccggacaacatcaaggacaccaagagcgacatcatcttcttccagaggtccgtgcccggccacgacaacaagatgcagttcgagagcagcagctacgagggctacttcctggcctgcgagaaggaacgggacctgttcaagctgatcctgaaaaaggaggacgagctgggggaccgcagcatcatgttcaccgtgcaaaacgaggac

SEQ ID NO: 756 - DNA, 546 bp, synthetic construct
  misc_feature 1..546: note = IL1ra_IL18
  source 1..546: mol_type = other DNA
atggagatctgcaggggcttacgtagccacctcatcaccctcctcctcttcctcttccactccgagacgatctgctacttcggaaagctcgagagcaagctctccgtcatcagaaaccttaacgaccaggtccttttcatcgaccaggggaaccggccccttttcgaggacatgaccgactcggactgcagggataacgcccccaggaccatcttcatcatcagcatgtacaaggacagccagcccaggggcatggccgtcaccatcagcgtcaagtgcgagaagatctccaccctaagctgcgagaacaagatcatcagcttcaaggagatgaacccgccggacaacatcaaagacaccaagtccgacatcatcttcttccagagaagcgtgcccggccatgataacaaaatgcaattcgaaagctcgagctacgaggggtatttcctggcctgtgagaaggagagggatctgttcaagctgatactgaagaaggaggacgagctgggggatcggagcatcatgttcaccgtgcagaatgaggac

SEQ ID NO: 757 - DNA, 546 bp, synthetic construct
  misc_feature 1..546: note = IL1ra_IL18
  source 1..546: mol_type = other DNA
atggagatctgtagggggctcaggagccaccttatcaccctcttgctgttcctcttccacagcgagacgatctgctacttcgggaaactcgaaagcaagcttagcgtcatcaggaacctcaacgatcaggtcctcttcatcgaccagggcaacaggcccttgttcgaggacatgaccgacagcgattgccgggacaacgccccaaggacaatcttcatcattagcatgtacaaggactcgcagccgcggggcatggcggtcacaatcagcgtcaagtgcgagaagatcagcaccctcagctgcgagaataagatcatctccttcaaggagatgaacccgcccgacaatatcaaggacaccaagagcgatatcatattcttccagcggagcgtccccgggcacgacaacaagatgcagtttgagtccagctcctatgaggggtacttcctcgcctgtgagaaggagagggacctgttcaagctcatcctgaagaaggaggacgagctgggcgacaggagcatcatgtttaccgtgcagaacgaggac

SEQ ID NO: 758 - DNA, 546 bp, synthetic construct
  misc_feature 1..546: note = IL1ra_IL18
  source 1..546: mol_type = other DNA
atggagatctgtcgggggctcaggagccatctcatcaccctcctcctcttcctcttccactccgagacgatttgctacttcggcaagctcgagagcaagctcagcgtcatcaggaacctcaacgatcaggtccttttcatcgaccaggggaacaggccgctgttcgaggacatgaccgatagcgattgtcgggacaacgcccccaggaccattttcataatctccatgtacaaggacagccagcccaggggcatggccgtcaccatctccgtcaagtgtgagaagatctccaccttgagctgtgagaacaaaatcatctccttcaaagagatgaaccctcccgacaacatcaaggataccaagagcgacatcatcttcttccagaggagcgtgcctggtcacgacaacaagatgcagtttgagtccagctcctacgaggggtacttcctggcctgcgagaaggagagggacctgttcaagctcatcctgaaaaaggaagacgagctgggggacaggagcatcatgttcaccgtccagaacgaggac

SEQ ID NO: 759 - DNA, 546 bp, synthetic construct
  misc_feature 1..546: note = IL1ra_IL18
  source 1..546: mol_type = other DNA
atggagatctgcaggggcctccggagccacctcatcaccctcctcctcttcttgttccacagcgaaacgatctgctacttcggtaagctcgagagcaagctttcggtgatccggaatctcaacgatcaggtcctattcatcgatcagggaaacaggccacttttcgaagacatgaccgactccgactgcagggacaacgcccccaggaccatcttcatcatctccatgtataaggactcgcagcccagggggatggccgtgaccatctcggtcaagtgcgagaagatcagcaccctcagctgtgagaacaagatcatctcctttaaggagatgaatccccccgacaacatcaaggacacaaagagcgacatcatcttcttccaaaggagcgtgcccggtcacgataataagatgcagtttgagtccagcagctatgagggctacttcctggcctgcgagaaggagagggacctgtttaagctgatcctcaaaaaggaggacgagctgggcgacaggtccatcatgttcaccgtgcagaacgaggac

SEQ ID NO: 760 - DNA, 546 bp, synthetic construct
  misc_feature 1..546: note = IL1ra_IL18
  source 1..546: mol_type = other DNA
atggagatctgccggggcctcaggtcccacctcatcaccctcttactcttcctcttccactccgagacaatctgctacttcggcaaactcgagagcaagctctccgtcatcaggaacttgaacgaccaagtacttttcatcgaccaggggaacaggccccttttcgaggatatgaccgacagcgactgccgggacaacgccccccgcaccatctttatcatcagcatgtacaaggacagccagcccaggggcatggccgtcacgatcagcgtcaagtgcgagaaaatcagcaccctcagctgcgagaataagatcatctccttcaaggagatgaaccccccggataatatcaaggataccaagagcgacattatcttcttccagcggagcgtccccggacatgacaacaaaatgcagttcgagtccagctcgtacgagggctacttcctcgcgtgcgagaaggagagggacctcttcaagctgatcctgaagaaggaggacgagctgggagataggagcatcatgttcacagtgcagaacgaagac

SEQ ID NO: 761 - DNA, 546 bp, synthetic construct
  misc_feature 1..546: note = IL1ra_IL18
  source 1..546: mol_type = other DNA
atggaaatctgcaggggcctcaggtcccacctcatcacgctccttctcttcctttttcattccgaaaccatctgttacttcggaaagctcgagagcaagcttagcgtcatcaggaacctgaacgaccaggtcctattcatagaccaggggaataggcccctcttcgaggacatgaccgacagcgactgcagggacaacgcgccccggaccatctttatcatctcaatgtataaggacagccagccccgcggcatggcggtcaccatctccgtcaagtgcgagaagattagcaccctctcctgtgagaacaagatcatctccttcaaggagatgaacccgcccgataatattaaggacaccaagtctgacattatcttcttccagaggtccgtccccggacatgataataagatgcagttcgagagcagcagctacgagggctacttcctggcctgcgagaaggagcgggacctgttcaaactgatcctcaaaaaggaggatgaactgggcgataggagcatcatgttcaccgtccaaaacgaggat

SEQ ID NO: 762 - DNA, 546 bp, synthetic construct
  misc_feature 1..546: note = IL1ra_IL18
  source 1..546: mol_type = other DNA
atggaaatctgcagagggctcaggagccacctaatcacccttcttctcttcctcttccactccgagactatctgctacttcgggaaactcgagtccaagctcagcgtcatcaggaacctgaacgaccaggtcctattcatcgaccaggggaacaggcccctcttcgaggacatgaccgacagcgactgcagggacaacgcccccaggactatcttcatcatcagcatgtacaaggatagccagcccaggggcatggccgtcaccatcagcgtcaagtgcgagaagatctccaccctaagctgcgagaataagattatctccttcaaggagatgaacccacccgacaacatcaaagacaccaagagcgacatcatcttcttccagcggagcgtccccggccacgacaacaagatgcaattcgaaagctcgagctacgagggctacttcctggcctgcgagaaggagcgggacttgttcaagctgatcctgaagaaggaggacgagctgggcgacaggtccataatgtttactgtccagaacgaggac

SEQ ID NO: 763 - DNA, 546 bp, synthetic construct
  misc_feature 1..546: note = IL1ra_IL18
  source 1..546: mol_type = other DNA
atggagatctgcagggggttgaggagccacctcatcaccctcctcctcttcttattccactcagaaaccatctgctacttcggcaagctcgagtccaaactcagcgtcatcaggaacctcaacgaccaggttctcttcatcgaccagggcaaccggcccttgttcgaggacatgacagacagcgactgccgggacaacgccccccgcaccatattcatcatcagcatgtataaagacagccagcccaggggcatggccgtgacgatcagcgtcaagtgcgagaagatcagcacgctcagctgcgagaataagatcatctccttcaaggagatgaacccgcccgacaacatcaaggacaccaaaagcgatataatcttcttccaaaggtccgtccccgggcatgataacaagatgcagttcgagagcagcagctacgagggctatttcctggcctgcgaaaaggagagggacctgttcaagctgatcctgaagaaggaggatgaactgggcgacaggtccatcatgttcaccgtgcagaacgaggac

SEQ ID NO: 764 - DNA, 546 bp, synthetic construct
  misc_feature 1..546: note = IL1ra_IL18
  source 1..546: mol_type = other DNA
atggagatctgtaggggcctccggagccacctcatcaccctcctcctcttcctcttccacagcgagacgatctgctacttcggcaagctcgagtcgaagctcagcgtcatccggaatctaaacgaccaggtcctcttcatcgaccagggaaatcgccccctcttcgaggacatgaccgattccgattgcagggacaacgccccccgcaccatcttcatcatctcgatgtacaaggacagccaaccccggggcatggccgtcaccatcagcgtcaagtgcgagaagatctccaccctaagctgcgagaataagatcatcagcttcaaggaaatgaatccccccgacaacatcaaggacaccaagagcgacatcatcttcttccagaggagcgtgcccggacacgacaacaagatgcagttcgagagctcgagctatgagggatacttcctggcctgcgagaaggagcgggatctgtttaagctgattctgaagaaggaggacgagctgggggacaggtccatcatgttcacggtccagaatgaggac

SEQ ID NO: 765 - DNA, 546 bp, synthetic construct
  misc_feature 1..546: note = IL1ra_IL18
  source 1..546: mol_type = other DNA
atggaaatctgtagggggctccggtcccacctcatcaccctcctcttgttcctcttccacagcgaaaccatctgttacttcggcaagctcgagagcaagctcagcgtcatcaggaaccttaacgatcaggtcctcttcatcgaccagggcaacaggcccctgttcgaggacatgaccgacagcgactgccgggacaacgccccgaggaccatctttatcatatccatgtataaagattcccagcccagggggatggccgtcaccatctccgtcaagtgcgagaaaatctccaccctaagctgtgaaaacaagatcatcagctttaaggagatgaaccccccggacaatatcaaggacaccaaatccgacatcatctttttccagaggtcggtgcccggccacgataacaagatgcagttcgagagcagcagctacgagggctacttcctggcctgcgagaaggagagggacctgttcaagctgatcctgaagaaggaggacgaactgggcgaccggagcatcatgttcaccgtgcagaatgaggac

SEQ ID NO: 766 - DNA, 546 bp, synthetic construct
  misc_feature 1..546: note = IL1ra_IL18
  source 1..546: mol_type = other DNA
atggaaatctgcaggggactccgcagccacctcatcaccctcttgctgttcctttttcatagcgagacgatctgctacttcggcaagctcgagagcaagctctcggtcataaggaacctcaacgaccaggtcctcttcatagaccaggggaaccggcccctcttcgaagacatgaccgacagcgactgccgggacaacgctccccgcaccatcttcatcatcagcatgtataaggactcccaacccaggggcatggccgttaccatctccgtcaagtgcgagaagatctccacgctcagctgcgagaacaagatcatctccttcaaggaaatgaacccacccgacaacatcaaggacaccaaatcggatataatcttcttccagaggagcgtacccggccatgacaacaagatgcagtttgagagcagcagctacgagggctactttctggcctgcgagaaggagcgggatctgttcaagctcatcctgaaaaaagaggatgagctgggcgacaggagcatcatgttcaccgtgcagaacgaggac

SEQ ID NO: 767 - DNA, 546 bp, synthetic construct
  misc_feature 1..546: note = IL1ra_IL18
  source 1..546: mol_type = other DNA
atggagatctgccggggcctacgcagccacctaatcaccctccttctcttcctcttccacagcgagacgatctgctacttcggaaaactagagagcaagctctccgttatcaggaacctaaacgatcaggtcctcttcatcgatcaggggaaccgtcccctcttcgaggatatgaccgactccgactgcagggataacgccccgcggaccatattcatcatctccatgtacaaggatagccagccaaggggcatggccgtcacgatcagcgtaaagtgcgagaaaatctccacactctcttgcgagaacaagatcatcagcttcaaggagatgaaccccccggacaatatcaaggacaccaagagcgacatcatcttctttcagaggtccgtcccggggcatgacaacaagatgcagttcgaatcctccagctacgagggctacttcctcgcctgcgagaaggagcgggacctgttcaagctgatcctgaagaaggaggacgagctgggcgaccgcagcatcatgttcaccgtgcagaacgaggac

SEQ ID NO: 768 - DNA, 546 bp, synthetic construct
  misc_feature 1..546: note = IL1ra_IL18
  source 1..546: mol_type = other DNA
atggagatctgcagggggttgaggagccacctcatcaccctcctattattcctcttccacagcgagacgatctgctacttcggtaagctcgagagcaagctctccgtaatcaggaacctcaacgaccaggtactcttcatcgaccagggcaaccgccccctcttcgaagatatgaccgactcggactgtcgagataacgcccccaggaccatctttatcatctcgatgtataaggacagccagccccggggcatggccgtcaccataagcgtcaagtgcgagaagatcagcaccctcagttgtgagaataagataatcagctttaaggagatgaacccgcccgacaacatcaaggacactaagagcgacatcatcttttttcagcggtccgtgccggggcatgacaacaagatgcagttcgagagcagcagctacgaggggtactttctggcctgcgagaaggagagggacctgttcaagctgatcctgaagaaagaggacgagctgggcgatcggtccatcatgttcaccgtgcagaacgaggat

SEQ ID NO: 769 - DNA, 546 bp, synthetic construct
  misc_feature 1..546: note = IL1ra_IL18
  source 1..546: mol_type = other DNA
atggagatctgtaggggcctccggagccacctcatcaccctcctcctctttctcttccactcggagacgatctgctacttcgggaagctcgagtccaagctctccgtcatcaggaacctcaacgaccaggttctcttcatcgaccagggcaatcggcctctcttcgaggacatgaccgattcagactgtagggacaacgccccgcgcaccatcttcatcattagcatgtacaaggacagccagcccaggggcatggccgtaaccataagcgtcaagtgcgagaagatcagcaccttgagctgcgaaaacaaaatcatcagcttcaaggagatgaatccccccgacaatatcaaggacaccaagtccgatatcatcttcttccagaggagcgtgcccggccatgacaacaagatgcagttcgagagctcaagctacgagggctacttcctggcctgtgagaaggagagggacctgttcaagctcatcctgaagaaggaggatgagctgggcgataggagcatcatgttcaccgtccaaaacgaggac

SEQ ID NO: 770 - DNA, 546 bp, synthetic construct
  misc_feature 1..546: note = IL1ra_IL18
  source 1..546: mol_type = other DNA
atggagatctgcaggggactcaggtcccacctcatcaccctcctcctcttcctcttccacagcgagacgatctgttacttcggtaagcttgagtccaagctcagcgtcataaggaacctcaacgatcaggtccttttcatagaccagggcaacaggccccttttcgaggacatgaccgacagcgactgtcgggacaacgcccctaggacgatcttcatcatcagcatgtacaaggacagccagccccgcggcatggcggtaaccatcagcgtaaagtgcgagaagatctccaccctcagctgtgagaacaagatcatctccttcaaggaaatgaaccccccagacaacatcaaggatacaaagagcgatatcatcttctttcagcgcagcgtgcctggccatgataacaagatgcagttcgagagctcaagctacgagggctacttcctggcctgcgagaaggagagggacctgttcaagctgatcctgaagaaagaggatgagctgggggaccggtccatcatgttcacggtgcagaatgaggac

SEQ ID NO: 771 - DNA, 546 bp, synthetic construct
  misc_feature 1..546: note = IL1ra_IL18
  source 1..546: mol_type = other DNA
atggagatctgcagggggttaaggagccacttaatcaccttgttgctgttcctcttccactccgagactatctgctatttcggcaagcttgagtcgaagctatcggtcatccgcaacctcaacgatcaggtcctcttcatagatcagggcaacaggccccttttcgaggacatgaccgacagcgactgcagggataacgcccccaggacgatcttcatcatctcgatgtacaaagacagccagcccaggggcatggccgttaccatcagcgtcaagtgcgagaagatcagcaccctcagctgcgagaacaagatcatctccttcaaggagatgaacccgcccgacaacatcaaggacaccaaaagcgatatcatcttcttccaacggtccgtccccggccacgataacaagatgcagttcgaaagcagcagctacgagggctacttcctggcctgcgaaaaggagagggacctgtttaagctgatactgaagaaggaagacgagctgggcgaccgctcgatcatgttcacggtgcagaacgaggac

SEQ ID NO: 772 - DNA, 546 bp, synthetic construct
  misc_feature 1..546: note = IL1ra_IL18
  source 1..546: mol_type = other DNA
atggagatctgcaggggcctccgcagccacctcatcaccctcctcctctttctcttccacagcgagacgatctgctatttcggcaagctcgagtctaaactcagcgtcatccggaatctcaacgaccaggtcctattcatcgaccagggcaaccgaccgctgttcgaagacatgacagacagcgactgcagggataacgccccccgcaccatcttcataatcagcatgtacaaggactcccagcccaggggcatggccgtcacgatcagcgtaaagtgcgagaagatctccaccctcagctgcgagaacaagatcatctccttcaaggagatgaatccccccgataacatcaaggacaccaagagcgacatcatattcttccagcggtcggtgccgggccacgacaataaaatgcagttcgaaagcagctcctacgagggctacttcctcgcctgcgagaaagagcgggacctgttcaagctgatcctgaagaaagaggacgagctgggcgacaggagcatcatgttcaccgtgcagaacgaggac

SEQ ID NO: 773 - DNA, 546 bp, synthetic construct
  misc_feature 1..546: note = IL1ra_IL18
  source 1..546: mol_type = other DNA
atggagatctgcagggggctaaggtcccacctcatcacgctcctcctcttcttgttccacagcgagacgatctgctacttcggaaagctcgagagcaagttgagcgtcatcaggaacctcaacgaccaggtccttttcatcgatcagggcaacaggccgctgttcgaagacatgacggatagcgattgcagggacaacgccccccgaaccatcttcatcatctccatgtacaaggacagccagccgaggggcatggccgtcaccatcagcgtcaagtgcgagaagatcagcaccctcagctgcgagaataagatcatcagcttcaaggagatgaacccacccgacaacatcaaggacactaaaagcgacatcatcttcttccagaggagcgtcccgggtcacgacaacaagatgcagttcgagagcagctcctacgagggctactttctcgcctgcgagaaggagagggacctgtttaagctcatcctgaagaaggaagacgagctcggcgataggtcgatcatgttcaccgtgcagaacgaggac

SEQ ID NO: 774 - DNA, 546 bp, synthetic construct
  misc_feature 1..546: note = IL1ra_IL18
  source 1..546: mol_type = other DNA
atggagatctgtaggggccttcggagccacctcatcacccttctcctcttcctcttccacagcgagacgatctgctacttcggcaagctcgagagcaagctttccgtaatacggaaccttaacgaccaggtcctctttatcgaccagggcaacaggcccctcttcgaagacatgaccgactccgactgtagggacaacgcgccgcggactatattcatcatcagcatgtacaaggacagccagccccggggcatggccgtcacaatttccgtcaagtgcgagaagatcagcaccctctcctgtgaaaataagatcatcagcttcaaggagatgaacccacccgacaacatcaaggacacgaagtccgacatcatcttcttccagaggtccgtgcccggccacgacaacaagatgcagttcgagagcagcagctacgaggggtacttcctggcctgcgagaaggagagggacctcttcaagctgatcctgaagaaggaggacgagctgggggacaggtcgatcatgtttaccgtgcagaacgaggac

SEQ ID NO: 775 - DNA, 546 bp, synthetic construct
  misc_feature 1..546: note = IL1ra_IL18
  source 1..546: mol_type = other DNA
atggagatctgcaggggcctccggtcccatctcatcaccctcctcctcttcctcttccactccgagacaatctgctacttcgggaaactcgagagcaagctctccgtaatccgtaatctaaacgaccaggtcctcttcatcgaccagggtaacaggccactcttcgaggatatgaccgacagcgattgccgggataacgcccctcgcaccatcttcatcataagcatgtacaaggacagccagcccaggggcatggccgtcaccatctcggtcaagtgcgagaagataagcacgctctcctgcgagaacaagattatctccttcaaggaaatgaacccgcccgataacatcaaggacaccaagtccgacatcatctttttccagcggagcgtgcccgggcatgataacaaaatgcagttcgagagctccagctatgaggggtacttcctggcttgcgagaaggagcgggacctgttcaagctgattctgaagaaggaggacgagctgggtgacaggagcataatgttcaccgtgcagaacgaggac

SEQ ID NO: 776 - DNA, 546 bp, synthetic construct
  misc_feature 1..546: note = IL1ra_IL18
  source 1..546: mol_type = other DNA
atggagatctgcaggggcctccgcagccacctcatcaccctcctcctcttcctcttccactcggagacgatctgctacttcgggaagctcgagtccaagctcagcgtaattaggaacctcaacgaccaggttctcttcatcgatcagggcaaccgtcccttgttcgaggacatgaccgactcggactgcagggataacgccccccggaccatcttcataatctccatgtacaaggatagccagccccgcggcatggccgtcaccataagcgtcaagtgcgagaagatctccacccttagctgcgagaacaagataataagctttaaggagatgaacccgcccgacaacatcaaggacacgaaatctgacatcatcttcttccagcgctccgtgcccggccacgacaacaagatgcagttcgagtcctcctcctacgagggctattttctggcctgtgagaaggagagggacctgttcaaactgatcctgaagaaggaggacgagctgggggacaggtccatcatgttcaccgtgcagaacgaggac

SEQ ID NO: 777 - DNA, 546 bp, synthetic construct
  misc_feature 1..546: note = IL1ra_IL18
  source 1..546: mol_type = other DNA
atggagatctgcaggggacttaggtcccaccttatcacactcttactcttcctcttccactccgagacgatctgctacttcgggaaactcgagagcaagctcagcgtcatcaggaacctcaacgaccaggtcctcttcatcgaccagggcaacaggcccctcttcgaggacatgaccgacagcgactgccgggacaacgcccccaggaccatcttcatcatctccatgtataaggacagccaaccccgcgggatggcggtaaccatcagcgtcaagtgcgagaagatcagcactttgagctgcgagaacaagatcatctccttcaaggagatgaacccgcccgacaacatcaaggacaccaagtccgatattatcttctttcagaggagcgtgcccggccacgacaacaagatgcagtttgagtctagctcctacgagggctacttcctggcttgcgagaaagagagggatctgtttaagctgatcctgaagaaggaggatgagctgggtgaccgcagcataatgtttaccgtgcagaacgaggat

SEQ ID NO: 778 - DNA, 546 bp, synthetic construct
  misc_feature 1..546: note = IL1ra_IL18
  source 1..546: mol_type = other DNA
atggaaatctgtagggggctcaggagccacctcatcaccctcctactcttcctcttccactcggaaaccatttgctatttcggcaagctcgaaagcaagctcagcgtcatccggaacctcaacgaccaggttctcttcatcgaccagggcaaccggcccctcttcgaggacatgaccgacagcgactgcagggacaacgccccccggacgatctttatcatcagcatgtataaggacagccagcccaggggcatggccgtcaccatctccgttaagtgcgaaaagatatccaccctcagttgtgagaacaagatcatcagcttcaaggagatgaacccacccgacaacatcaaggacaccaagagcgacatcatcttcttccaaaggagcgtacccggccacgataacaagatgcagttcgagtcctccagctacgagggatacttcctggcctgcgagaaggagagggatctgttcaagctcatcctgaagaaggaggatgagctgggggataggagcataatgttcaccgtccagaacgaagac

SEQ ID NO: 779 - DNA, 546 bp, synthetic construct
  misc_feature 1..546: note = IL1ra_IL18_SN
  source 1..546: mol_type = other DNA
atggagatctgccgaggcctccgctcccacttgattaccctcctcctcttcctcttccacagcgagacgatctgctacttcggcaagttggagagcaagctctcggttatcaggaacctcaacgaccaggtcctcttcatcgaccaggggaatcgcccgctgttcgaggacatgaccagctccgactgtcggaacaacgcgccccggaccatcttcattatctccatgtacaaggactcccaacccaggggcatggccgtcaccatctcggtcaagtgcgagaaaatcagcaccctcagctgcgagaacaagatcatctccttcaaggagatgaatccccccgacaacatcaaggacaccaagagcgacatcatcttcttccagcgcagcgtccccgggcacgacaacaagatgcagttcgagagcagcagctacgaggggtacttcctcgcctgcgagaaggagagggacctgttcaagctcatcctgaagaaagaggacgagctgggggaccggagcatcatgttcaccgtgcaaaatgaggac

SEQ ID NO: 780 - DNA, 546 bp, synthetic construct
  misc_feature 1..546: note = IL1ra_IL18_SN
  source 1..546: mol_type = other DNA
atggagatctgcagggggttgaggagccacctcatcacgctccttttgttcctcttccacagcgagacgatctgctacttcgggaagcttgagtccaagctctccgtcatccggaacctcaacgaccaggtcctcttcatcgatcaggggaaccggccgcttttcgaagatatgacgtccagcgactgtaggaacaacgccccccgcaccatcttcatcatctccatgtacaaggactcccaacccaggggcatggccgtcaccatcagcgttaagtgcgagaagatcagcacgctaagctgcgagaacaagatcatcagcttcaaggagatgaacccgcccgacaacattaaggacaccaaaagcgacatcattttcttccaaaggagcgtgcccggccacgacaataagatgcagttcgaaagcagctcctacgagggctacttcctcgcctgcgagaaggagcgggacctgttcaagctgatcctgaaaaaggaggacgagctgggggacaggagcatcatgttcaccgtgcagaacgaggac

SEQ ID NO: 781 - DNA, 546 bp, synthetic construct
  misc_feature 1..546: note = IL1ra_IL18_SN
  source 1..546: mol_type = other DNA
atggagatctgccggggcttgaggagccacctaatcacgctcctcctcttcttattccacagcgagacgatctgctacttcggcaagcttgagtccaagctcagcgttatccggaacctaaacgaccaagtcctcttcatcgaccagggcaaccggccgctgttcgaggacatgacctccagcgactgcaggaataacgcccccaggaccatcttcatcatcagcatgtacaaagacagccagccccggggcatggccgtcacgatctccgtaaagtgtgagaagatctccaccctctcctgcgagaacaagatcataagcttcaaggagatgaacccgcccgacaacatcaaggacaccaagagcgacatcattttcttccaacggagcgtgcccggccatgacaacaagatgcagtttgagtccagctcctacgagggctacttcctggcctgcgaaaaggagcgggacctgttcaagctgatcctgaagaaggaagacgagctgggggacaggtccatcatgttcaccgtgcagaatgaggac

SEQ ID NO: 782 - DNA, 546 bp, synthetic construct
  misc_feature 1..546: note = IL1ra_IL18_SN
  source 1..546: mol_type = other DNA
atggagatctgccgcgggctccggtcccatctcatcacgctcctcctcttcctcttccacagcgagactatctgttacttcgggaagcttgagtccaagctcagcgtcatccggaacctcaacgaccaggtcctcttcatcgatcaggggaaccggcccctcttcgaagacatgacctcgtccgactgccggaacaacgcacccaggaccatattcatcatctccatgtacaaggactcccagcccaggggcatggccgttaccatcagcgtaaagtgcgagaagatcagcaccctcagctgcgagaataagatcatctccttcaaggagatgaaccccccggacaacatcaaggacaccaagtccgacatcatcttctttcagcgcagcgtccccgggcacgataacaagatgcagttcgagtccagcagctacgaggggtacttcctggcctgcgaaaaggagcgcgacctgttcaagctgatcctgaagaaggaggacgagctcggcgatagatccatcatgttcacggtgcagaacgaggac

SEQ ID NO: 783 - DNA, 546 bp, synthetic construct
  misc_feature 1..546: note = IL1ra_IL18_SN
  source 1..546: mol_type = other DNA
atggagatctgtagggggctcaggtcccaccttatcacgctcctcctctttcttttccacagcgagacgatctgctacttcggcaagcttgagagcaaactctcggtcatcaggaacctcaacgaccaggtcctcttcatcgatcaggggaacaggcccttgttcgaggacatgacctccagcgactgcaggaacaacgccccccggaccatcttcatcatctccatgtacaaggatagccagccgcgggggatggccgtcaccatctcggtcaagtgcgagaagatcagcaccctttcctgcgagaacaagatcatcagcttcaaggagatgaacccacccgacaatatcaaagacacgaaaagcgatatcatcttcttccagaggagcgtgccgggccatgacaacaagatgcagttcgagagcagcagctacgagggctattttctggcctgcgagaaggagagggacctgttcaagctgatcctgaagaaagaggacgagctgggggacaggagcatcatgttcaccgtgcagaacgaggac

SEQ ID NO: 784 - DNA, 546 bp, synthetic construct
  misc_feature 1..546: note = IL1ra_IL18_SN
  source 1..546: mol_type = other DNA
atggagatctgcaggggcctcaggagccacctcatcaccctcctcctcttcctcttccatagcgagacaatctgctacttcgggaagcttgagtccaagctcagcgtcatcaggaatctcaacgatcaggtcctcttcatcgaccaagggaaccggcccctcttcgaggacatgacctccagcgattgcaggaacaacgctcccaggaccatattcatcatctccatgtacaaggactcccagcccaggggcatggccgtcaccatctcggtcaagtgcgagaagatcagcacgctcagctgcgagaacaaaatcatctccttcaaggagatgaacccacccgacaacatcaaagacaccaagagcgacatcatcttcttccagaggagcgtgccgggccacgacaacaaaatgcagtttgagtcgtccagctacgagggctacttcctggcctgcgagaaggagcgggacctattcaagctcatcctgaagaaggaggacgagctgggggataggagcatcatgttcacggtgcagaacgaggac

SEQ ID NO: 785 - DNA, 546 bp, synthetic construct
  misc_feature 1..546: note = IL1ra_IL18_SN
  source 1..546: mol_type = other DNA
atggagatctgcagggggctcaggagccacctcatcacgctcctactcttcctattccatagcgaaaccatctgttacttcggcaagcttgagagcaagcttagcgtcatccggaaccttaacgaccaggtcctctttatcgaccagggcaaccgacccctcttcgaggatatgacgtccagcgactgccggaacaacgccccccggaccatattcatcatcagcatgtacaaagatagccagcccagggggatggccgtaaccatcagcgtcaagtgcgagaagatctccaccttgtcgtgcgagaataagatcatctccttcaaggagatgaacccgcccgataacatcaaggacaccaagagcgatatcatcttcttccagaggagtgtgcccggccacgacaacaagatgcagttcgagagcagctcctacgagggctacttcctggcctgtgaaaaggagagggatctgttcaaactgattctcaagaaggaggacgagctgggggaccggagcatcatgttcaccgtgcagaacgaggac

SEQ ID NO: 786 - DNA, 546 bp, synthetic construct
  misc_feature 1..546: note = IL1ra_IL18_SN
  source 1..546: mol_type = other DNA
atggagatctgtagggggctcaggagccacctcatcaccctactcctcttcctcttccatagcgaaaccatctgctacttcggcaagctagagagcaagttgagcgtaatccggaacctcaacgatcaagtcctctttatcgatcaggggaaccggcccctcttcgaggacatgaccagcagcgactgcaggaacaacgcccccaggaccatcttcatcatctccatgtacaaggacagccagccgcgcggcatggccgtcacaatctccgtaaagtgcgagaagattagcacgctaagctgcgagaacaagatcatcagcttcaaggagatgaacccgcccgacaacattaaggacaccaagtccgatatcatcttcttccagaggagcgtccctgggcacgacaacaagatgcagtttgaaagtagcagctacgaggggtatttcctcgcgtgcgagaaggagagggatctgttcaagctgattctgaaaaaggaagacgagctcggcgacaggagcatcatgttcaccgtgcagaacgaagac

SEQ ID NO: 787 - DNA, 546 bp, synthetic construct
  misc_feature 1..546: note = IL1ra_IL18_SN
  source 1..546: mol_type = other DNA
atggagatctgcaggggcctcaggagccacctcataacgctcctcctcttcttattccacagcgagacgatctgctacttcggaaaactcgagagcaagctcagcgtcatcaggaacctcaacgaccaggtcctcttcatcgaccagggcaacaggccgctgttcgaggacatgaccagcagcgactgccgcaacaacgcccccaggacgatcttcatcatcagcatgtataaagacagccagccgaggggcatggcagtaaccatctccgtaaagtgcgaaaagatcagcacactctcgtgcgagaacaagatcatctcgttcaaggagatgaacccgcccgacaacatcaaagacaccaagagcgacatcatctttttccagcggagcgtacctggccacgacaacaaaatgcagttcgaatccagcagctacgagggctatttcctggcgtgcgagaaggagcgcgacctgttcaagctcatcctgaagaaggaggatgagctgggggaccggtcgatcatgttcaccgtgcagaacgaggac

SEQ ID NO: 788 - DNA, 546 bp, synthetic construct
  misc_feature 1..546: note = IL1ra_IL18_SN
  source 1..546: mol_type = other DNA
atggagatctgcagggggctcaggtcccacctcatcaccctcctcctatttctcttccactccgagactatctgctacttcgggaagctcgagagcaagctcagcgtcatccggaacttgaacgaccaggtactctttatcgaccagggcaatcggccgctgttcgaggacatgaccagcagcgactgccgcaataacgcccccaggaccatcttcatcatcagcatgtataaggacagccagcccaggggcatggccgtaaccatcagcgtaaagtgcgagaaaatcagcacccttagctgcgagaataagataataagcttcaaggagatgaacccacccgacaatatcaaggacaccaagagcgacatcatcttcttccagaggagcgtgcccggacatgataataaaatgcagttcgagagcagctcctatgagggctacttcctcgcctgcgagaaggagagggacctgttcaagctcatcctgaagaaggaggatgagctgggggacaggtccatcatgttcacggtgcagaacgaggac

SEQ ID NO: 789 - DNA, 546 bp, synthetic construct
  misc_feature 1..546: note = IL1ra_IL18_SN
  source 1..546: mol_type = other DNA
atggagatctgccggggcctcaggtcccacctcatcaccttgctcctctttttgttccacagcgagacgatctgctatttcggcaaactcgagtcgaagctcagcgtcatcaggaacctcaacgatcaggtcctctttatcgaccagggcaacaggcccctcttcgaggacatgacctccagcgactgtcggaacaacgcccccaggacgatcttcatcatcagcatgtacaaggattcccagcccagggggatggccgttaccatctccgtaaagtgcgaaaagatttccaccctctcctgtgagaataagatcatcagcttcaaggagatgaatcccccggacaacatcaaggacaccaagagcgacatcatcttcttccagaggagcgtgcccggccacgacaacaagatgcagttcgaatcctcctcctatgagggctacttcctcgcctgcgagaaggaaagggacctgttcaagctgatcctgaagaaggaggacgagctgggggaccggtccatcatgtttaccgtacagaacgaggat

SEQ ID NO: 790 - DNA, 546 bp, synthetic construct
  misc_feature 1..546: note = IL1ra_IL18_SN
  source 1..546: mol_type = other DNA
atggagatctgcaggggcttgaggagccatctcatcaccctcctcctcttcctctttcacagcgagacgatctgctacttcggcaagctcgagtccaagctcagcgtcatccggaatctcaacgaccaggtacttttcatcgaccagggcaaccggccgctgttcgaggacatgacctcgagcgactgccggaacaacgcccccaggaccatcttcatcatctccatgtacaaggacagccagccgcgggggatggccgtcaccatcagcgtcaagtgcgagaagatctccaccctcagctgcgaaaataaaatcatctccttcaaggagatgaacccgcccgacaacatcaaagacaccaagagcgacatcatatttttccagaggagcgtgcccggccacgataacaagatgcagttcgagtcatcgagctacgaggggtatttcctcgcctgcgaaaaggaacgggacctcttcaagctgatcctcaagaaggaggatgaacttggagatcggagcatcatgttcaccgtgcagaacgaggac

SEQ ID NO: 791 - DNA, 546 bp, synthetic construct
  misc_feature 1..546: note = IL1ra_IL18_SN
  source 1..546: mol_type = other DNA
atggaaatctgcagggggctcaggtcccacctcattaccctcctcctcttcctctttcacagcgagactatctgctacttcggcaagttggagtccaagctctcggtcatccggaatctcaacgaccaggtactcttcatcgaccagggcaaccggccgctgttcgaagacatgaccagctccgactgccgaaacaacgcccccaggaccatcttcatcatctccatgtataaggactcccagccccgcggcatggccgtaaccatcagcgtcaagtgcgagaagatctccacgttgagctgtgaaaacaagattatatccttcaaggagatgaaccctcccgacaacattaaggacaccaaatcggacatcatcttctttcagaggagcgtgcccggccacgacaacaagatgcagttcgagagctccagttatgaggggtacttcctggcctgcgagaaggagagggacctgttcaagctgatcctgaaaaaggaggacgagctgggggaccggtccatcatgttcaccgtgcagaacgaggac

SEQ ID NO: 792 - DNA, 546 bp, synthetic construct
  misc_feature 1..546: note = IL1ra_IL18_SN
  source 1..546: mol_type = other DNA
atggagatctgccggggattacgcagccaccttatcaccctcttgctctttctctttcacagcgagacaatctgctacttcggcaagctcgagagcaagttgtccgtcatcaggaacctcaacgatcaggtcctctttatcgaccagggcaacaggcccctcttcgaggacatgaccagcagcgactgcaggaacaacgccccgcggaccatcttcatcatttccatgtacaaggacagccagccgaggggtatggccgtcactatctccgtaaagtgcgagaagatcagcacgttgtcctgcgaaaacaaaatcatctccttcaaggagatgaaccccccggacaatataaaggacaccaaaagcgacatcatcttcttccagaggagcgtgcccggccacgataataaaatgcagttcgagagctcctcctacgaggggtactttctcgcctgcgagaaggagagggacctgttcaaactcatcctcaagaaggaggacgagctgggcgaccggtccatcatgttcacggtgcagaacgaggac

SEQ ID NO: 793 - DNA, 546 bp, synthetic construct
  misc_feature 1..546: note = IL1ra_IL18_SN
  source 1..546: mol_type = other DNA
atggaaatctgccgggggctacggagccatctcataaccctcctcctcttcctcttccacagcgagacaatctgttacttcggcaagctcgagtccaagctcagcgtcatccggaacctcaacgaccaagtcctcttcatagatcagggcaacaggccgctgttcgaggacatgacctcctccgactgccgcaacaacgcccccaggaccatcttcatcatcagcatgtacaaggacagccagcccaggggcatggccgtcaccatctcggtcaagtgcgagaaaatctcgacgctcagctgcgagaacaagatcatcagcttcaaggagatgaacccgcccgacaacatcaaggataccaagagcgacatcatcttcttccagaggagcgtgcccggccacgacaacaagatgcagttcgagtcctccagctacgaggggtacttcctcgcctgtgagaaggagagggacctcttcaagctgatactcaagaaagaggacgagctgggggaccgaagcataatgttcacggtgcagaacgaggat

SEQ ID NO: 794 - DNA, 546 bp, synthetic construct
  misc_feature 1..546: note = IL1ra_IL18_SN
  source 1..546: mol_type = other DNA
atggagatctgcaggggcctccggagccacctcatcacactactcctcttcctcttccatagcgaaaccatctgctacttcggcaagctcgagagcaagctcagcgtcatccggaacctcaacgaccaggtcctctttatcgaccagggcaaccggccgttgttcgaggacatgaccagctccgactgccggaacaacgccccgcggacgatcttcatcattagcatgtacaaggacagtcaacctaggggcatggccgtcacgattagcgtcaagtgcgaaaagatcagcactctcagctgcgagaacaaaatcatctccttcaaggagatgaacccgcccgacaacatcaaggacaccaagagcgacatcatcttcttccagcggagtgtgcccggccacgataacaaaatgcagttcgaaagctcctcctacgagggctacttcctggcctgtgagaaggagcgggatctgttcaagctcatcctgaagaaggaggatgagctgggcgacaggagcatcatgttcaccgtgcagaatgaggac

SEQ ID NO: 795 - DNA, 546 bp, synthetic construct
  misc_feature 1..546: note = IL1ra_IL18_SN
  source 1..546: mol_type = other DNA
atggagatctgtaggggcctccgatcccacctcatcaccttgctactcttcctcttccacagcgagacgatctgctatttcggcaagctcgagagcaagttgagcgtcatccggaatctcaacgaccaggtcttgttcatcgatcaggggaacaggcccctcttcgaggacatgacctccagcgactgccggaacaacgccccccggaccatattcatcatatccatgtacaaggactcccagcccagaggcatggccgtcaccattagcgtgaagtgcgagaagatcagcaccctcagctgcgagaacaagatcatctctttcaaggagatgaacccgcccgacaatatcaaggatactaagtccgacatcatcttcttccagaggagcgtgcccggccacgacaacaaaatgcagttcgagagctcaagctacgagggctacttcctggcgtgcgagaaggagcgggacctgttcaagctgatcctgaagaaagaggatgagctgggggacaggagcatcatgttcaccgtgcagaacgaggac

SEQ ID NO: 796 - DNA, 546 bp, synthetic construct
  misc_feature 1..546: note = IL1ra_IL18_SN
  source 1..546: mol_type = other DNA
atggagatctgtaggggcctccggtcccacctcatcaccctcctccttttcctcttccactccgagacgatctgctatttcggcaagctcgagagcaagctcagcgtaatacgcaacctcaacgaccaggtcctctttatagatcaggggaaccgtcccctcttcgaggacatgaccagcagcgattgtaggaacaacgccccccggaccatcttcatcatatccatgtacaaggacagccaaccgcggggcatggccgtcaccatcagcgttaagtgcgagaaaatcagcacccttagctgtgaaaacaagatcatctccttcaaggagatgaaccctcccgacaacatcaaggacaccaagtccgacatcatattctttcagaggagcgtgcccggccatgataacaagatgcagttcgagagctcctcgtacgaaggttacttcctggcctgcgagaaggagagggacctgtttaagctcatcctgaagaaagaggacgagctgggcgacaggagcatcatgttcaccgtgcagaacgaggac

SEQ ID NO: 797 - DNA, 546 bp, synthetic construct
  misc_feature 1..546: note = IL1ra_IL18_SN
  source 1..546: mol_type = other DNA
atggaaatctgcagggggctcaggtcccacctaataaccctccttctcttcctcttccactcggagactatctgctacttcggcaagctcgagtcgaagctcagcgttatcaggaacctcaacgaccaggtcttgttcatcgatcagggcaatcggcccctcttcgaggacatgaccagcagcgactgcaggaacaacgccccgaggactatcttcataatcagcatgtacaaggatagccagcctaggggcatggccgtcaccataagcgtaaagtgcgaaaagatcagcacccttagctgcgaaaacaagatcatcagcttcaaggagatgaacccgcccgacaacataaaggacaccaaatccgacatcatcttcttccagaggagcgtgcctggccacgacaacaaaatgcagttcgagagctccagctacgagggctatttcctggcatgtgagaaggagagggacctctttaagctcatcctgaagaaggaggatgagctcggggacaggagcatcatgttcaccgtgcaaaacgaggat

SEQ ID NO: 798 - DNA, 546 bp, synthetic construct
  misc_feature 1..546: note = IL1ra_IL18_SN
  source 1..546: mol_type = other DNA
atggagatctgccggggcctcaggagccacctcatcacgctcctcttgttcctcttccatagcgagacaatctgctatttcggcaagctcgaatccaaactcagcgtaatccggaaccttaacgaccaggtcctctttatcgaccaggggaaccggccgcttttcgaggacatgacgtccagcgactgccgaaacaacgcccccaggaccatctttatcatcagcatgtacaaggacagccagccccggggcatggccgtcacgatctccgtcaagtgcgagaagatcagcacccttagctgtgagaacaagatcatcagcttcaaggagatgaacccgcccgacaacataaaggacaccaagagcgacatcatcttcttccagcggtctgtgcccggccacgacaacaagatgcagttcgagagctccagctacgagggctacttcctggcctgtgaaaaggagagggacctgttcaagctgatcctcaagaaggaggacgagctcggagacaggagcatcatgttcacggtgcagaatgaggat

SEQ ID NO: 799 - DNA, 546 bp, synthetic construct
  misc_feature 1..546: note = IL1ra_IL18_SN
  source 1..546: mol_type = other DNA
atggagatctgcaggggcctcaggtcccaccttatcaccctacttctctttctctttcacagcgaaactatctgttacttcggcaagctcgagagcaagctctccgtcatcaggaacctcaacgaccaggtcctcttcatcgatcagggcaacaggcccctattcgaggacatgacgagcagcgactgccgaaataacgcccccaggacgatcttcatcatctccatgtacaaggactcccaaccccgcggcatggccgtcaccatctcggttaagtgcgagaagatcagcaccctcagctgcgagaacaagatcatcagcttcaaagagatgaatcccccagacaacatcaaggacaccaagtccgacatcatcttctttcagaggtccgtccccggacacgataacaaaatgcagttcgagtccagcagctacgagggctacttcctcgcctgcgagaaggagcgggatctcttcaagctgatcctgaagaaagaggacgagctcggcgaccgctccatcatgttcacggtgcagaacgaggac

SEQ ID NO: 800 - DNA, 546 bp, synthetic construct
  misc_feature 1..546: note = IL1ra_IL18_SN
  source 1..546: mol_type = other DNA
atggaaatttgccgcgggctacggtcccacctcatcacccttctcttattcctattccactcggagacaatctgctacttcggcaagctcgagagcaagctctccgtcatacggaacctcaacgaccaggtcctcttcatcgaccaggggaatcgacccctcttcgaagacatgaccagcagcgactgcaggaacaacgccccccgcaccatcttcatcatcagcatgtacaaggattcgcagccccggggcatggccgtcaccatctccgtgaagtgtgagaaaatcagcaccctcagttgtgagaacaagattatctccttcaaggagatgaacccgcccgacaacattaaggacaccaagagcgacatcatcttcttccagaggtcggtgcccggccacgataacaagatgcagttcgagtccagctcctacgagggctatttcctggcctgcgagaaggagcgggacctgtttaagcttatcctgaagaaggaggatgagctgggcgacaggagcatcatgtttaccgtgcaaaacgaggat

SEQ ID NO: 801 - DNA, 546 bp, synthetic construct
  misc_feature 1..546: note = IL1ra_IL18_SN
  source 1..546: mol_type = other DNA
atggagatttgccgcgggctcaggagccaccttatcaccctcctcctcttcctattccactcagagacgatctgctatttcggaaagctcgagagcaagctctccgtaatcaggaacctcaacgaccaggttctcttcatcgaccagggcaacaggcccctcttcgaggacatgacgtccagcgactgccgcaacaacgccccccggaccatcttcatcatctccatgtacaaagacagccagcccaggggcatggccgtcaccatcagcgtcaagtgcgagaagatctccaccctaagctgtgagaacaagattatctcgttcaaggagatgaacccacccgacaacatcaaggacaccaagtccgacatcatcttcttccagaggagcgtacccggccacgataacaagatgcagttcgagagctcctcctacgagggctacttcctggcctgcgaaaaggagagggacctgttcaagctgatcctgaagaaagaggatgagctgggtgaccgctccataatgttcacggtgcagaacgaggac

SEQ ID NO: 802 - DNA, 546 bp, synthetic construct
  misc_feature 1..546: note = IL1ra_IL18_SN
  source 1..546: mol_type = other DNA
atggagatctgccggggcctcaggtcccacctcatcaccctcctactcttcttattccactcggagacgatctgttacttcggaaagctcgagagcaagctcagcgtcatccgtaacctcaacgaccaggtcctcttcatcgatcagggcaacaggccgctattcgaggacatgacctccagcgactgccggaacaacgccccgcggaccatattcatcatcagcatgtacaaggactcccaaccccggggcatggccgtcactatcagcgttaagtgcgagaaaatctccacccttagctgcgagaacaagatcatctcgttcaaggagatgaacccgcccgacaacatcaaggacaccaagtcggacataatcttcttccagcggtcagtccccggccatgacaacaagatgcagtttgagtccagctcctacgagggctactttctggcctgcgagaaggagagggacctctttaagctgatcctcaagaaggaggacgagctgggcgacaggtccatcatgttcaccgtccagaacgaggac

SEQ ID NO: 803 - DNA, 546 bp, synthetic construct
  misc_feature 1..546: note = IL1ra_IL18_SN
  source 1..546: mol_type = other DNA
atggagatctgcaggggcctccgctcccacctcatcaccctcctcctcttcctcttccacagcgagacgatctgctacttcggcaagctagagtccaagctctcggtcatccggaacctaaacgaccaggtactcttcatcgaccaggggaacaggcccctcttcgaagacatgactagcagcgattgcaggaacaacgccccgaggaccatcttcatcatcagcatgtataaggatagccagccccggggcatggccgtcaccatctcggtgaagtgcgagaagatcagcaccttgtcctgcgagaacaagataatctcattcaaggagatgaaccctcccgacaatataaaggacactaagtccgacatcatcttcttccagaggagcgtgccagggcacgacaacaagatgcagttcgaaagcagcagctacgaggggtatttcctggcctgcgaaaaggagcgggacctgttcaagctgatcctgaagaaggaggatgaactgggggaccgctccatcatgttcaccgtgcagaacgaggac

SEQ ID NO: 804 - protein, 267 aa, Homo sapiens
MAPRRARGCRTLGLPALLLLLLLRPPATRGITCPPPMSVEHADIWVKSYSLYSRERYICNSGFKRKAGTSSLTECVLNKATNVAHWTTPSLKCIRDPALVHQRPAPPSTVTTAGVTPQPESLSPSGKEPAASSPSSNNTAATTAAIVPGSQLMPSKSPSTGTTEISSHESSHGTPSQTTAKNWELTASASHQPPGVYPQGHSDTTVAISTSTVLLCGLSAVSLLACYLKSRQTPPLASVEMEAMEALPVTWGTSSRDEDLENCSHHL

SEQ ID NO: 805 - DNA, 801 bp, Homo sapiens
  source 1..801: mol_type = other DNA
atggctccccgccgcgcgcgaggctgtcgcaccctcggacttcctgcactcttgcttttgctcctccttagaccccctgcaaccagagggataacctgtccacctccaatgagcgtcgagcacgcagacatttgggtgaaatcatacagtctgtacagtagagagcggtacatctgcaacagtgggtttaaaagaaaagcaggcacttcatctctgacagagtgcgtgctgaacaaagcaactaatgtagctcattggacaaccccatcactgaaatgcattagagatccagctctggtgcatcaaagaccagcaccaccaagtaccgtaacaaccgcaggggtgacccctcagcctgagtccctatctccctccggcaaggagccagcagcatcttcacctagctccaataacaccgcagctaccactgccgccatagtccccggaagccagctgatgcctagtaaatctccctcaacaggtaccaccgaaatttctagccatgagtcctcgcacggcaccccgtcacagactacagctaaaaactgggagctaacggcttcggcatcccaccaacctccaggcgtttatccccaaggtcactccgacactactgtggcgattagcacaagtaccgtccttctgtgtggactgagtgcagtttcattgctggcctgttatctgaaatctcgccagacccctcccctcgccagtgttgagatggaagccatggaagcacttcctgtgacttggggaacatcctcgagggacgaggacctcgagaactgctctcaccacctg

SEQ ID NO: 806 - protein, 162 aa, Homo sapiens
MRISKPHLRSISIQCYLCLLLNSHFLTEAGIHVFILGCFSAGLPKTEANWVNVISDLKKIEDLIQSMHIDATLYTESDVHPSCKVTAMKCFLLELQVISLESGDASIHDTVENLIILANNSLSSNGNVTESGCKECEELEEKNIKEFLQSFVHIVQMFINTS

SEQ ID NO: 807 - DNA, 486 bp, Homo sapiens
  source 1..486: mol_type = other DNA
atgcgcatcagcaaacctcatttacggagtatcagcatccagtgctatctctgcctgcttctgaacagtcattttctgactgaggcgggcattcatgtctttattttaggctgcttttccgcaggtctgcccaaaacagaagcaaattgggtgaacgtgatcagcgacctgaagaagattgaggatctaattcaaagcatgcatattgatgccacactctacaccgaatccgacgtgcacccttcgtgtaaagtgactgcaatgaagtgtttcttactggaactgcaggtgatcagtctggagtccggggatgcatcaatccacgacacagtggaaaacctgattatcctggcaaacaattccctgagcagtaatggcaatgtcacggagagcggatgtaaggagtgtgaggaattagaggaaaagaatatcaaggaattccttcagtcctttgtgcacatcgtacagatgtttattaatacatcc

SEQ ID NO: 808 - protein, 149 aa, synthetic construct
  REGION 1..149: note = tPA-IL15 Amino acid Sequence
MDAMKRGLCCVLLLCGAVFVSPSQEIHARFRRGARNWVNVISDLKKIEDLIQSMHIDATLYTESDVHPSCKVTAMKCFLLELQVISLESGDASIHDTVENLIILANNSLSSNGNVTESGCKECEELEEKNIKEFLQSFVHIVQMFINTS

SEQ ID NO: 809 - protein, 463 aa, synthetic construct
  REGION 1..463: note = Full Fc-IL15R-Linker-IL15 Amino acid Sequence
METDTLLLWVLLLWVPGSTGEPKSCDKTHTCPPCPAPELLGGPSVFLFPPKPKDTLMISRTPEVTCVVVAVSHEDPEVKFNWYVDGVEVHNAKTKPREEQYNSTYRVVSVLTVLHQDWLNGKEYKCKVSNKALPAPIEKTISKAKGQPREPQVYTLPPSRDELTKNQVSLTCLVKGFYPSDIAVEWESNGQPENNYKTTPPVLDSDGSFFLYSKLTVDKSRWQQGNVFSCSVMHEALHNHYTQKSLSLSPGKITCPPPMSVEHADIWVKSYSLYSRERYICNSGFKRKAGTSSLTECVLNKATNVAHWTTPSLKCIRDPALVHQRPAPPSGGSGGGGSGGGSGGGGSLQNWVNVISDLKKIEDLIQSMHIDATLYTESDVHPSCKVTAMKCFLLELQVISLESGDASIHDTVENLIILANNSLSSNGNVTESGCKECEELEEKNIKEFLQSFVHIVQMFINTS

SEQ ID NO: 810 - DNA, 1596 bp, synthetic construct
  misc_feature 1..1596: note = hIL15R-alpha-B_001
  source 1..1596: mol_type = other DNA
atgtgtcaccagcagctggtcattagctggtttagccttgtgttcctggcctccccccttgtcgctatttgggagctcaagaaggacgtgtacgtggtggagctggactggtacccagacgcgcccggagagatggtagttctgacctgtgataccccagaggaggacggcatcacctggactctggaccaaagcagcgaggttttgggctcagggaaaacgctgaccatccaggtgaaggaattcggcgacgccggacagtacacctgccataagggaggagaggtgctgagccattcccttcttctgctgcacaagaaagaggacggcatctggtctaccgacatcctgaaagaccagaaggagcccaagaacaaaaccttcctgaggtgcgaggccaagaactactccggcaggttcacttgttggtggctgaccaccatcagtacagacctgacttttagtgtaaaaagctccagaggctcgtccgatccccaaggggtgacctgcggcgcagccactctgagcgctgagcgcgtgcgcggtgacaataaagagtacgagtacagcgttgagtgtcaagaagacagcgcttgccctgccgccgaggagagcctgcctatcgaggtgatggttgacgcagtgcacaagcttaagtacgagaattacaccagctcattcttcattagagatataatcaagcctgacccacccaagaacctgcagctgaagccactgaaaaactcacggcaggtcgaagtgagctgggagtaccccgacacctggagcactcctcattcctatttctctcttacattctgcgtccaggtgcagggcaagagcaagcgggaaaagaaggatcgagtcttcaccgacaaaacaagcgcgaccgtgatttgcaggaagaacgccagcatctccgtcagagcccaggatagatactatagtagcagctggagcgagtgggcaagcgtgccctgttccggcggcgggggcgggggcagccgaaacttgcctgtcgctaccccggaccctggaatgtttccgtgtctgcaccacagccagaacctgctgagagccgtgtcgaatatgctccagaaggcccggcagacccttgagttctacccctgtaccagcgaagagatcgatcatgaggacatcacgaaagacaagacttccaccgtcgaggcttgtctcccgctggagctgaccaagaacgagagctgtctgaatagccgggagacatctttcatcacgaatggtagctgtctggccagcaggaaaacttccttcatgatggctctctgcctgagctctatctatgaagatctgaagatgtatcaggtggagtttaagactatgaacgccaaactcctgatggacccaaaaaggcaaatctttctggaccagaatatgctggccgtgatagacgagctgatgcaggcactgaacttcaacagcgagacagtgccacagaaatccagcctggaggagcctgacttttacaaaactaagatcaagctgtgtatcctgctgcacgcctttagaatccgtgccgtgactatcgacagggtgatgtcatacctcaacgcttca

SEQ ID NO: 811 - DNA, 1596 bp, synthetic construct
  misc_feature 1..1596: note = hIL15R-alpha-B_002
  source 1..1596: mol_type = other DNA
atgtgccaccagcagctggtgatcagctggttcagcctggtgttcctggccagccccctggtggccatctgggagctgaagaaggacgtgtacgtggtggagctggactggtaccccgacgcccccggcgagatggtggtgctgacctgcgacacccccgaggaggacggcatcacctggaccctggaccagagcagcgaggtgctgggcagcggcaagaccctgaccatccaggtgaaggagttcggcgacgccggccagtacacctgccacaagggcggcgaggtgctgagccacagcctgctgctgctgcacaagaaggaggacggcatctggagcaccgacatcctgaaggaccagaaggagcccaagaacaagaccttcctgagatgcgaggccaagaactacagcggcagattcacctgctggtggctgaccaccatcagcaccgacctgaccttcagcgtgaagagcagcagaggcagcagcgacccccagggcgtgacctgcggcgccgccaccctgagcgccgagagagtgagaggcgacaacaaggagtacgagtacagcgtggagtgccaggaggacagcgcctgccccgccgccgaggagagcctgcccatcgaggtgatggtggacgccgtgcacaagctgaagtacgagaactacaccagcagcttcttcatcagagacatcatcaagcccgacccccccaagaacctgcagctgaagcccctgaagaacagcagacaggtggaggtgagctgggagtaccccgacacctggagcaccccccacagctacttcagcctgaccttctgcgtgcaggtgcagggcaagagcaagagagagaagaaggacagagtgttcaccgacaagaccagcgccaccgtgatctgcagaaagaacgccagcatcagcgtgagagcccaggacagatactacagcagcagctggagcgagtgggccagcgtgccctgcagcggcggcggcggcggcggcagcagaaacctgcccgtggccacccccgaccccggcatgttcccctgcctgcaccacagccagaacctgctgagagccgtgagcaacatgctgcagaaggccagacagaccctggagttctacccctgcaccagcgaggagatcgaccacgaggacatcaccaaggacaagaccagcaccgtggaggcctgcctgcccctggagctgaccaagaacgagagctgcctgaacagcagagagaccagcttcatcaccaacggcagctgcctggccagcagaaagaccagcttcatgatggccctgtgcctgagcagcatctacgaggacctgaagatgtaccaggtggagttcaagaccatgaacgccaagctgctgatggaccccaagagacagatcttcctggaccagaacatgctggccgtgatcgacgagctgatgcaggccctgaacttcaacagcgagaccgtgccccagaagagcagcctggaggagcccgacttctacaagaccaagatcaagctgtgcatcctgctgcacgccttcagaatcagagccgtgaccatcgacagagtgatgagctacctgaacgccagc

SEQ ID NO: 812 - DNA, 1596 bp, synthetic construct
  misc_feature 1..1596: note = hIL15R-alpha-B_003
  source 1..1596: mol_type = other DNA
atgtgtcaccagcagttggtcatctcttggttttccctggtttttctggcatctcccctcgtggccatatgggaactgaagaaagatgtttatgtcgtagaattggattggtatccggatgcccctggagaaatggtggtcctcacctgtgacacccctgaagaagatggtatcacctggaccttggaccagagcagtgaggtcttaggctctggcaaaaccctgaccatccaagtcaaagagtttggagatgctggccagtacacctgtcacaaaggaggcgaggttctaagccattcgctcctgctgcttcacaaaaaggaagatggaatttggtccactgatattttaaaggaccagaaagaacccaaaaataagacctttctaagatgcgaggccaagaattattctggacgtttcacctgctggtggctgacgacaatcagtactgatttgacattcagtgtcaaaagcagcagaggctcttctgacccccaaggggtgacgtgcggagctgctacactctctgcagagagagtcagaggggacaacaaggagtatgagtactcagtggagtgccaggaggacagtgcctgcccagctgctgaggagagtctgcccattgaggtcatggtggatgccgttcacaagctcaagtatgaaaactacaccagcagcttcttcatcagggacatcatcaaacctgacccacccaagaacttgcagctgaagccattaaagaattctcggcaggtggaggtcagctgggagtaccctgacacctggagtactccacattcctacttctccctgacattctgcgttcaggtccagggcaagagcaagagagaaaagaaagatagagtcttcacggacaagacctcagccacggtcatctgccgcaaaaatgccagcattagcgtgcgggcccaggaccgctactatagctcatcttggagcgaatgggcatctgtgccctgcagtggcggagggggcggagggagcagaaacctccccgtggccactccagacccaggaatgttcccatgccttcaccactcccaaaacctgctgagggccgtcagcaacatgctccagaaggccagacaaactttagaattttacccttgcacttctgaagagattgatcatgaagatatcacaaaagataaaaccagcacagtggaggcctgtttaccattggaattaaccaagaatgagagttgcctaaattccagagagacctctttcataactaatgggagttgcctggcctccagaaagacctcttttatgatggccctgtgccttagtagtatttatgaagacttgaagatgtaccaggtggagttcaagaccatgaatgcaaagcttctgatggatcctaagaggcagatctttttagatcaaaacatgctggcagttattgatgagctgatgcaggccctgaatttcaacagtgagactgtgccacaaaaatcctcccttgaagaaccggacttctacaagaccaagatcaagctctgcatacttcttcatgctttcagaattcgggcagtgactattgatagagtgatgagctatctgaatgcttcc

SEQ ID NO: 813 - DNA, 1599 bp, synthetic construct
  misc_feature 1..1599: note = hIL15R-alpha-B_004
  source 1..1599: mol_type = other DNA
atgggctgccaccagcagctggtcatcagctggttctccctggtcttcctggccagccccctggtggccatctgggagctgaagaaagatgtctatgttgtagagctggactggtacccagatgctcctggagaaatggtggttctcacctgtgacacgccagaagaagatggcatcacctggacgctggaccagagctcagaagttcttggcagtggaaaaacgctgaccatacaagtaaaagaatttggggatgctggccagtacacctgccacaaaggaggagaagttctcagccacagcctgctgctgctgcacaagaaagaagatggcatctggagcacagacattttaaaagaccagaaggagcccaagaacaaaaccttccttcgatgtgaggccaagaactacagtggccgcttcacctgctggtggctcaccaccatcagcacagacctcaccttctcggtgaagagcagccgtggcagctcagacccccaaggagtcacctgtggggcggccacgctgtcggcagaaagagttcgaggggacaacaaggaatatgaatactcggtggaatgtcaagaagactcggcctgcccggcggcagaagaaagtcttcccatagaagtcatggtggatgctgttcacaaattaaaatatgaaaactacaccagcagcttcttcatcagagacatcatcaagccagacccgcccaagaacctgcagctgaagcccctgaagaacagcagacaagtggaagtttcctgggagtacccagacacgtggagcacgccgcacagctacttcagcctcaccttctgtgtacaagtacaaggcaagagcaagagagagaagaaagatcgtgtcttcacagacaaaacctcggcgacggtcatctgcaggaagaatgcctccatctcggttcgagcccaggaccgctactacagcagcagctggagtgagtgggcctcggtgccctgcagtggtggcggcggcggcggcagcagaaaccttcctgtggccacgccggaccctggcatgttcccgtgcctgcaccacagccaaaatttacttcgagctgtttctaacatgctgcagaaagcaagacaaactttagaattctacccctgcacctcagaagaaatagaccatgaagacatcaccaaagataaaaccagcactgtagaggcctgcctgcccctggagctcaccaagaatgaatcctgcctcaacagcagagagaccagcttcatcaccaatggcagctgcctggccagcaggaaaaccagcttcatgatggcgctctgcctgagcagcatctatgaagatttgaagatgtaccaagtagaatttaaaaccatgaatgccaagctgctcatggaccccaagagacaaatatttttggatcaaaacatgctggctgtcattgatgagctcatgcaagcattaaacttcaactcagagacggtgccccagaagagcagcctggaggagccagacttctacaaaaccaagatcaagctctgcatcttattacatgccttccgcatccgggcggtcaccattgaccgtgtcatgtcctacttaaatgccagc

SEQ ID NO: 814 - DNA, 1596 bp, synthetic construct
  misc_feature 1..1596: note = hIL15R-alpha-B_005
  source 1..1596: mol_type = other DNA
atgtgccaccagcagctggtcatcagctggttctccctggtcttcctggccagccccctggtggccatctgggagctgaagaaagatgtctatgttgtagagctggactggtacccagatgctcctggagaaatggtggttctcacctgtgacacgccagaagaagatggcatcacctggacgctggaccagagctcagaagttcttggcagtggaaaaacgctgaccatacaagtaaaagaatttggggatgctggccagtacacctgccacaaaggaggagaagttctcagccacagcctgctgctgctgcacaagaaagaagatggcatctggagcacagacattttaaaagaccagaaggagcccaagaacaaaaccttccttcgatgtgaggccaagaactacagtggccgcttcacctgctggtggctcaccaccatcagcacagacctcaccttctcggtgaagagcagccgtggcagctcagacccccaaggagtcacctgtggggcggccacgctgtcggcagaaagagttcgaggggacaacaaggaatatgaatactcggtggaatgtcaagaagactcggcctgcccggcggcagaagaaagtcttcccatagaagtcatggtggatgctgttcacaaattaaaatatgaaaactacaccagcagcttcttcatcagagacatcatcaagccagacccgcccaagaacctgcagctgaagcccctgaagaacagcagacaagtggaagtttcctgggagtacccagacacgtggagcacgccgcacagctacttcagcctcaccttctgtgtacaagtacaaggcaagagcaagagagagaagaaagatcgtgtcttcacagacaaaacctcggcgacggtcatctgcaggaagaatgcctccatctcggttcgagcccaggaccgctactacagcagcagctggagtgagtgggcctcggtgccctgcagtggtggcggcggcggcggcagcagaaaccttcctgtggccacgccggaccctggcatgttcccgtgcctgcaccacagccaaaatttacttcgagctgtttctaacatgctgcagaaagcaagacaaactttagaattctacccctgcacctcagaagaaatagaccatgaagacatcaccaaagataaaaccagcactgtagaggcctgcctgcccctggagctcaccaagaatgaatcctgcctcaacagcagagagaccagcttcatcaccaatggcagctgcctggccagcaggaaaaccagcttcatgatggcgctctgcctgagcagcatctatgaagatttgaagatgtaccaagtagaatttaaaaccatgaatgccaagctgctcatggaccccaagagacaaatatttttggatcaaaacatgctggctgtcattgatgagctcatgcaagcattaaacttcaactcagagacggtgccccagaagagcagcctggaggagccagacttctacaaaaccaagatcaagctctgcatcttattacatgccttccgcatccgggcggtcaccattgaccgtgtcatgtcctacttaaatgccagc

SEQ ID NO: 815 - DNA, 1596 bp, synthetic construct
  misc_feature 1..1596: note = hIL15R-alpha-B_006
  source 1..1596: mol_type = other DNA
atgtgccaccagcagctggtgatcagctggttcagcctggtgttcctggccagccccctggtggccatctgggagctgaagaaggacgtgtacgtggtggagctggactggtaccccgacgcccccggcgagatggtggtgctgacctgtgacacccccgaggaggacggcatcacctggaccctggaccagagcagcgaggtgctgggcagcggcaagaccctgaccatccaggtgaaggagttcggggacgccggccagtacacctgccacaagggcggcgaggtgctgagccacagcctgctgctgctgcacaagaaggaggacggcatctggagcacagatatcctgaaggaccagaaggagcccaagaacaagaccttcctgagatgcgaggccaagaactacagcggcagattcacctgctggtggctgaccaccatcagcacagacttgaccttcagcgtgaagagcagcagaggcagcagcgacccccagggcgtgacctgcggcgccgccaccctgagcgccgagagagtgagaggggacaacaaggagtacgagtacagcgtggagtgccaggaggacagcgcctgccccgccgccgaggagagcctgcccatcgaggtgatggtggacgccgtgcacaagctgaagtacgagaactacaccagcagcttcttcatcagagacatcatcaagcccgacccgccgaagaacctgcagctgaagcccctgaagaacagcagacaggtggaggtgagctgggagtaccccgacacctggagcaccccccacagctacttcagcctgaccttctgcgtgcaggtgcagggcaagagcaagagagagaagaaggacagagtgttcacagataagaccagcgccaccgtgatctgcagaaagaacgccagcatcagcgtgagagcccaggacagatactacagcagcagctggagcgagtgggccagcgtgccctgcagcggcggcggcggcggcggcagcagaaacctgcccgtggccacccccgaccccggcatgttcccctgcctgcaccacagccagaacctgctgagagccgtgagcaacatgctgcagaaggccagacagaccctggagttctacccctgcaccagcgaggagatcgaccacgaggacatcaccaaggacaagaccagcaccgtggaggcctgcctgcccctggagctgaccaagaatgaaagctgcctgaacagcagagagaccagcttcatcaccaacggcagctgcctggccagcagaaagaccagcttcatgatggccctgtgcctgagcagcatctacgaggacctgaagatgtaccaggtggagttcaagaccatgaacgccaagctgctgatggaccccaagagacagatcttcctggaccagaacatgctggccgtgatcgacgagctgatgcaggccctgaacttcaacagcgagaccgtgccccagaagagcagcctggaggagcccgacttctacaagaccaagatcaagctgtgcatcctgctgcacgccttcagaatcagagccgtgaccatcgacagagtgatgagctacctgaacgccagc

SEQ ID NO: 816 - DNA, 1596 bp, synthetic construct
  misc_feature 1..1596: note = hIL15R-alpha-B_007
  source 1..1596: mol_type = other DNA
atgtgccaccagcagcttgtcatctcctggttctctcttgtcttccttgcttctcctcttgtggccatctgggagctgaagaaggatgtttatgttgtggagttggactggtaccctgatgctcctggagaaatggtggttctcacctgtgacactcctgaggaggatggcatcacctggactttggaccagtcttctgaggttcttggcagtggaaaaactcttactattcaggtgaaggagtttggagatgctggccagtacacctgccacaagggtggtgaagttctcagccacagtttacttcttcttcacaagaaggaggatggcatctggtctactgacattttaaaagaccagaaggagcccaagaacaagactttccttcgttgtgaagccaagaactacagtggtcgtttcacctgctggtggcttactactatttctactgaccttactttctctgtgaagtcttctcgtggctcttctgaccctcagggtgtcacctgtggggctgctactctttctgctgagcgtgtgcgtggggacaacaaggagtatgaatactcggtggagtgccaggaggactctgcctgccctgctgctgaggagtctcttcctattgaggtgatggtggatgctgtgcacaagttaaaatatgaaaactacacttcttctttcttcattcgtgacattataaaacctgaccctcccaagaaccttcagttaaaacctttaaaaaactctcgtcaggtggaggtgtcctgggagtaccctgacacgtggtctactcctcactcctacttctctcttactttctgtgtccaggtgcagggcaagtccaagcgtgagaagaaggaccgtgtcttcactgacaagacttctgctactgtcatctgcaggaagaatgcatccatctctgtgcgtgctcaggaccgttactacagctcttcctggtctgagtgggcttctgtgccctgctctggcggcggcggcggcggcagcagaaatcttcctgtggctactcctgaccctggcatgttcccctgccttcaccactcgcagaaccttcttcgtgctgtgagcaacatgcttcagaaggctcgtcagactttagaattctacccctgcacttctgaggagattgaccatgaagacatcaccaaggacaagacttctactgtggaggcctgccttcctttagagctgaccaagaatgaatcctgcttaaattctcgtgagacttctttcatcaccaatggcagctgccttgcctcgcgcaagacttctttcatgatggctctttgcctttcttccatctatgaagacttaaaaatgtaccaggtggagttcaagaccatgaatgcaaagcttctcatggaccccaagcgtcagatatttttggaccagaacatgcttgctgtcattgatgagctcatgcaggctttaaacttcaactctgagactgtgcctcagaagtcttctttagaagagcctgacttctacaagaccaagataaaactttgcattcttcttcatgctttccgcatccgtgctgtgactattgaccgtgtgatgtcctacttaaatgcttct

SEQ ID NO: 817 - DNA, 1596 bp, synthetic construct
  misc_feature 1..1596: note = hIL15R-alpha-B_008
  source 1..1596: mol_type = other DNA
atgtgtcatcaacaactcgtgattagctggttcagtctcgtgttcctggcctctccgctggtggccatctgggagcttaagaaggacgtgtacgtggtggagctcgattggtaccccgatgctcctggcgagatggtggtgctaacctgcgatacccccgaggaggacgggatcacttggaccctggatcagagtagcgaagtcctgggctctggcaagacactcacaatccaggtgaaggaattcggagacgctggtcagtacacttgccacaaggggggtgaagtgctgtctcacagcctgctgttactgcacaagaaggaggatgggatctggtcaaccgacatcctgaaggatcagaaggagcctaagaacaagacctttctgaggtgtgaagctaagaactattccggaagattcacttgctggtggttgaccacaatcagcactgacctgaccttttccgtgaagtccagcagaggaagcagcgatcctcagggcgtaacgtgcggcgcggctaccctgtcagctgagcgggttagaggcgacaacaaagagtatgagtactccgtggagtgtcaggaggacagcgcctgccccgcagccgaggagagtctgcccatcgaggtgatggtggacgctgtccataagttaaaatacgaaaattacacaagttcctttttcatccgcgatattatcaaacccgatccccccaagaacctgcagctgaagcccctgaagaatagccgacaggtggaagtctcttgggagtatcctgacacctggtccacgcctcacagctactttagtctgactttctgtgtccaggtccagggcaagagcaagagagagaaaaaggatagagtgtttactgacaagacatctgctacagtcatctgcagaaagaacgccagtatctcagtgagggcgcaggacagatactacagtagtagctggagcgaatgggctagcgtgccctgttcagggggcggcggagggggctccaggaatctgcccgtggccacccccgaccctgggatgttcccttgcctccatcactcacagaacctgctcagagcagtgagcaacatgctccaaaaggcccgccagaccctggagttttacccttgtacttcagaagagatcgatcacgaagacataacaaaggataaaaccagcaccgtggaggcctgtctgcctctagaactcacaaagaatgaaagctgtctgaattccagggaaacctccttcattactaacggaagctgtctcgcatctcgcaaaacatcattcatgatggccctctgcctgtcttctatctatgaagatctcaagatgtatcaggtggagttcaaaacaatgaacgccaagctgctgatggaccccaagagacagatcttcctggaccagaacatgctggcagtgatcgatgagctgatgcaagccttgaacttcaactcagagacagtgccgcaaaagtcctcgttggaggaaccagatttttacaaaaccaaaatcaagctgtgtatccttcttcacgcctttcggatcagagccgtgactatcgaccgggtgatgtcatacctgaatgcttcc

SEQ ID NO: 818 - DNA, 1596 bp, synthetic construct
  misc_feature 1..1596: note = hIL15R-alpha-B_009
  source 1..1596: mol_type = other DNA
atgtgccaccagcagctggtcatcagctggtttagcctggtcttcctggccagccccctggtggccatctgggagctgaagaaagatgtctatgttgtagagctggactggtacccagatgctcctggagaaatggtggttctcacctgcgacacgccagaagaagatggcatcacctggacgctggaccagagcagcgaagtactgggcagtggaaaaacgctgaccatacaagtaaaagaatttggcgatgctggccagtacacctgccacaaaggaggagaagtactgagccacagcctgctgctgctgcacaagaaagaagatggcatctggagcaccgacattttaaaagaccagaaggagcccaagaacaaaaccttccttcgatgtgaggcgaagaactacagtggccgcttcacctgctggtggctcaccaccatcagcaccgacctcaccttctcggtgaagagcagccgtggtagctcagacccccaaggagtcacctgtggggcggccacgctgtcggcagaaagagttcgaggcgacaacaaggaatatgaatactcggtggaatgtcaagaagactcggcctgcccggcggcagaagaaagtctgcccatagaagtcatggtggatgctgttcacaaattaaaatatgaaaactacaccagcagcttcttcatcagagacatcatcaagccagacccccccaagaacctgcagctgaagcccctgaagaacagcagacaagtggaagtttcctgggagtacccagacacgtggagcacgccgcacagctacttcagcctcaccttctgtgtacaagtacaaggcaagagcaagagagagaagaaagatcgtgtcttcaccgacaaaacctcggcgacggtcatctgcaggaagaatgcaagcatctcggttcgagcccaggaccgctactacagcagcagctggagtgagtgggcctcggtgccctgcagtggtggcggcggcggcggcagcagaaaccttcctgtggccacgccggaccctggcatgtttccgtgcctgcaccacagccaaaatttattacgagctgttagcaacatgctgcagaaagcaagacaaactttagaattctacccctgcacctcagaagaaatagaccatgaagacatcaccaaagataaaaccagcactgtagaggcctgcctgcccctggagctcaccaagaacgagagctgcctcaatagcagagagaccagcttcatcaccaatggcagctgcctggccagcaggaaaaccagcttcatgatggcgctctgcctgagcagcatctatgaagatctgaagatgtaccaagtagaatttaaaaccatgaatgccaagctgctcatggaccccaagagacaaatattcctcgaccaaaacatgctggctgtcattgatgagctcatgcaagcattaaacttcaactcagagacggtgccccagaagagcagcctggaggagccagacttctacaaaaccaagatcaagctctgcatcttattacatgccttccgcatccgggcggtcaccattgaccgtgtcatgtcctacttaaatgccagc

SEQ ID NO: 819 - DNA, 1596 bp, synthetic construct
  misc_feature 1..1596: note = hIL15R-alpha-B_010
  source 1..1596: mol_type = other DNA
atgtgccaccagcagcttgtcatctcctggttttctcttgtcttcctcgcttctcctcttgtggccatctgggagctgaagaaagatgtctatgttgtagagctggactggtacccggacgctcctggagaaatggtggttctcacctgcgacactcctgaagaagatggcatcacctggacgctggaccaaagcagcgaagttttaggctctggaaaaacgctgaccatacaagtaaaagaatttggcgacgctggccagtacacgtgccacaaaggaggagaagttttaagccacagtttacttcttcttcacaagaaagaagatggcatctggagtacggacattttaaaagaccagaaggagcctaagaacaaaaccttcctccgctgtgaagctaagaactacagtggtcgtttcacctgctggtggctcaccaccatctccactgacctcaccttctctgtaaaatcaagccgtggttcttctgacccccaaggagtcacctgtggggctgccacgctcagcgctgaaagagttcgaggcgacaacaaggaatatgaatattctgtggaatgtcaagaagattctgcctgcccggcggcagaagaaagtcttcccatagaagtcatggtggacgctgttcacaaattaaaatatgaaaactacaccagcagcttcttcattcgtgacatcatcaaaccagaccctcctaagaaccttcagttaaaaccgctgaagaacagcagacaagtggaagtttcctgggagtacccggacacgtggagtacgccgcactcctacttcagtttaaccttctgtgtacaagtacaaggaaaatcaaaaagagagaagaaagatcgtgtcttcactgacaaaacatctgccacggtcatctgccgtaagaacgcttccatctcggttcgagcccaggaccgctactacagcagcagctggagtgagtgggcatctgttccctgcagtggtggcggcggcggcggcagccgcaaccttcctgtggccacgccggaccctggcatgttcccgtgccttcaccactcgcaaaatcttcttcgtgctgtttctaacatgctgcagaaggcgagacaaactttagaattctacccgtgcacttctgaagaaatagaccatgaagacatcaccaaggacaaaaccagcacggtggaggcctgccttcctttagaacttactaagaacgaaagttgccttaacagccgtgagaccagcttcatcaccaatggcagctgccttgctagcaggaagaccagcttcatgatggcgctgtgcctttcttccatctatgaagatcttaagatgtaccaagtagaatttaaaaccatgaatgccaaattattaatggaccccaagagacaaatattcctcgaccaaaacatgctggctgtcattgatgagctcatgcaagcattaaacttcaactcagaaactgttccccagaagtcatctttagaagaaccggacttctacaaaacaaaaataaaactctgcattcttcttcatgccttccgcatccgtgctgtcaccattgaccgtgtcatgtcctacttaaatgcttct

SEQ ID NO: 820 - DNA, 1596 bp, synthetic construct
  misc_feature 1..1596: note = hIL15R-alpha-B_011
  source 1..1596: mol_type = other DNA
atgtgccaccagcagctggtgatcagctggttcagcctggtgttcctggccagccccctggtggccatctgggagctgaagaaggacgtgtacgtggtggagctggactggtacccggacgcgccgggggagatggtggtgctgacgtgcgacacgccggaggaggacgggatcacgtggacgctggaccagagcagcgaggtgctggggagcgggaagacgctgacgatccaggtgaaggagttcggggacgcggggcagtacacgtgccacaaggggggggaggtgctgagccacagcctgctgctgctgcacaagaaggaggacgggatctggagcacggacatcctgaaggaccagaaggagccgaagaacaagacgttcctgaggtgcgaggcgaagaactacagcgggaggttcacgtgctggtggctgacgacgatcagcacggacctgacgttcagcgtgaagagcagcagggggagcagcgacccgcagggggtgacgtgcggggcggcgacgctgagcgcggagagggtgaggggggacaacaaggagtacgagtacagcgtggagtgccaggaggacagcgcgtgcccggcggcggaggagagcctgccgatcgaggtgatggtggacgcggtgcacaagctgaagtacgagaactacacgagcagcttcttcatcagggacatcatcaagccggacccgccgaagaacctgcagctgaagccgctgaagaacagcaggcaggtggaggtgagctgggagtacccggacacgtggagcacgccgcacagctacttcagcctgacgttctgcgtgcaggtgcaggggaagagcaagagggagaagaaggacagggtgttcacggacaagacgagcgcgacggtgatctgcaggaagaacgcgagcatcagcgtgagggcgcaggacaggtactacagcagcagctggagcgagtgggcgagcgtgccgtgcagcggggggggggggggggggagcaggaacctgccggtggcgacgccggacccggggatgttcccgtgcctgcaccacagccagaacctgctgagggcggtgagcaacatgctgcagaaggcgaggcagacgctggagttctacccgtgcacgagcgaggagatcgaccacgaggacatcacgaaggacaagacgagcacggtggaggcgtgcctgccgctggagctgacgaagaacgagagctgcctgaacagcagggagacgagcttcatcacgaacgggagctgcctggcgagcaggaagacgagcttcatgatggcgctgtgcctgagcagcatctacgaggacctgaagatgtaccaggtggagttcaagacgatgaacgcgaagctgctgatggacccgaagaggcagatcttcctggaccagaacatgctggcggtgatcgacgagctgatgcaggcgctgaacttcaacagcgagacggtgccgcagaagagcagcctggaggagccggacttctacaagacgaagatcaagctgtgcatcctgctgcacgcgttcaggatcagggcggtgacgatcgacagggtgatgagctacctgaacgcgagc

SEQ ID NO: 821 - DNA, 1596 bp, synthetic construct
  misc_feature 1..1596: note = hIL15R-alpha-B_012
  source 1..1596: mol_type = other DNA
atgtgccatcagcagctggtgatcagctggttcagcctcgtgtttctggccagccccctggtggccatttgggaactcaagaaggacgtgtatgtagtggaactcgactggtaccctgacgccccaggcgaaatggtggtcttaacctgcgacacccctgaggaggacggaatcacctggaccttggaccagagctccgaggtcctcggcagtggcaagaccctgaccatacaggtgaaagaatttggagacgcagggcaatacacatgtcacaagggcggggaggttctttctcactcccttctgcttctacataaaaaggaagacggaatttggtctaccgacatcctcaaggaccaaaaggagcctaagaataaaaccttcttacgctgtgaagctaaaaactacagcggcagattcacttgctggtggctcaccaccatttctaccgacctgaccttctcggtgaagtcttcaaggggctctagtgatccacagggagtgacatgcggggccgccacactgagcgctgaacgggtgaggggcgataacaaggagtatgaatactctgtcgagtgtcaggaggattcagcttgtcccgcagctgaagagtcactccccatagaggttatggtcgatgctgtgcataaactgaagtacgaaaactacaccagcagcttcttcattcgggacattataaaacctgacccccccaagaacctgcaacttaaacccctgaaaaactctcggcaggtcgaagttagctgggagtaccctgatacttggtccaccccccactcgtacttctcactgactttctgtgtgcaggtgcagggcaagagcaagagagagaaaaaagatcgtgtattcacagacaagacctctgccaccgtgatctgcagaaaaaacgcttccatcagtgtcagagcccaagaccggtactatagtagtagctggagcgagtgggcaagtgtcccctgctctggcggcggagggggcggctctcgaaacctccccgtcgctacccctgatccaggaatgttcccttgcctgcatcactcacagaatctgctgagagcggtcagcaacatgctgcagaaagctaggcaaacactggagttttatccttgtacctcagaggagatcgaccacgaggatattaccaaggacaagaccagcacggtggaggcctgcttgcccctggaactgacaaagaatgaatcctgccttaatagccgtgagacctcttttataacaaacggatcctgcctggccagcaggaagacctccttcatgatggccctctgcctgtcctcaatctacgaagacctgaagatgtaccaggtggaatttaaaactatgaacgccaagctgttgatggaccccaagcggcagatctttctggatcaaaatatgctggctgtgatcgacgaactgatgcaggccctcaactttaacagcgagaccgtgccacaaaagagcagtcttgaggagcccgacttctacaagaccaagatcaagctgtgcatcctccttcatgccttcaggataagagctgtcaccatcgacagagtcatgagttacctgaatgcatcc

SEQ ID NO: 822 - DNA, 1596 bp, synthetic construct
  misc_feature 1..1596: note = hIL15R-alpha-B_013
  source 1..1596: mol_type = other DNA
atgtgccaccagcagctggtcatctcctggttcagtcttgtcttcctggcctcgccgctggtggccatctgggagctgaagaaagatgtttatgttgtagagctggactggtacccagatgctcctggagaaatggtggtcctcacctgtgacacgccagaagaagatggcatcacctggacgctggaccagagcagtgaagttcttggaagtggaaaaacgctgaccatacaagtaaaagaatttggagatgctggccagtacacctgccacaaaggaggagaagttctcagccacagtttattattacttcacaagaaagaagatggcatctggtccacggacattttaaaagaccagaaggagcccaaaaataaaacatttcttcgatgtgaggccaagaactacagtggtcgtttcacctgctggtggctgaccaccatctccacagacctcaccttcagtgtaaaaagcagccgtggttcttctgacccccaaggagtcacctgtggggctgccacgctctctgcagaaagagttcgaggggacaacaaagaatatgagtactcggtggaatgtcaagaagactcggcctgcccagctgctgaggagagtcttcccatagaagtcatggtggatgctgttcacaaattaaaatatgaaaactacaccagcagcttcttcatcagagacatcatcaaacctgacccgcccaagaacttacagctgaagccgctgaaaaacagcagacaagtagaagtttcctgggagtacccggacacctggtccacgccgcactcctacttctccctcaccttctgtgtacaagtacaaggcaagagcaagagagagaagaaagatcgtgtcttcacggacaaaacatcagccacggtcatctgcaggaaaaatgccagcatctcggtgcgggcccaggaccgctactacagcagcagctggagtgagtgggcatctgtgccctgcagtggtggtgggggtggtggcagcagaaaccttcctgtggccactccagaccctggcatgttcccgtgccttcaccactcccaaaatttacttcgagctgtttctaacatgctgcagaaagcaagacaaactttagaattctacccgtgcacttctgaagaaattgaccatgaagacatcacaaaagataaaaccagcacagtggaggcctgtcttcctttagagctgaccaaaaatgaatcctgcctcaacagcagagagaccagcttcatcaccaatggcagctgcctggcctccaggaaaaccagcttcatgatggcgctctgcctcagctccatctatgaagatttgaagatgtaccaagtagaatttaaaaccatgaatgccaaattattaatggaccccaagaggcagatatttttagatcaaaacatgctggcagttattgatgagctcatgcaagcattaaacttcaacagtgagactgtacctcaaaaaagcagccttgaagagccggacttctacaaaaccaagatcaaactctgcattttacttcatgccttccgcatccgggcggtcaccattgaccgtgtcatgtcctacttaaatgcctcg

SEQ ID NO: 823 - DNA, 1596 bp, synthetic construct
  misc_feature 1..1596: note = hIL15R-alpha-B_014
  source 1..1596: mol_type = other DNA
atgtgccaccagcagcttgtgatttcttggttctctcttgtgttccttgcttctcctcttgtggctatttgggagttaaaaaaggacgtgtacgtggtggagcttgactggtaccctgatgctcctggcgagatggtggtgcttacttgtgacactcctgaggaggacggcattacttggactcttgaccagtcttctgaggtgcttggctctggcaagactcttactattcaggtgaaggagttcggggatgctggccagtacacttgccacaagggcggcgaggtgctttctcactctcttcttcttcttcacaagaaggaggacggcatttggtctactgacattttaaaagaccagaaggagcccaagaacaagactttccttcgttgcgaggccaagaactactctggccgtttcacttgctggtggcttactactatttctactgaccttactttctctgtgaagtcttctcgtggctcttctgaccctcagggcgtgacttgtggggctgctactctttctgctgagcgtgtgcgtggggacaacaaggagtacgagtactctgtggagtgccaggaggactctgcttgccctgctgctgaggagtctcttcctattgaggtgatggtggatgctgtgcacaagttaaaatacgagaactacacttcttctttcttcattcgtgacattattaagcctgaccctcccaagaaccttcagttaaaacctttaaaaaactctcgtcaggtggaggtgtcttgggagtaccctgacacttggtctactcctcactcttacttctctcttactttctgcgtgcaggtgcagggcaagtctaagcgtgagaagaaggaccgtgtgttcactgacaagacttctgctactgtgatttgcaggaagaatgcatctatttctgtgcgtgctcaggaccgttactactcttcttcttggtctgagtgggcttctgtgccttgctctggcggcggcggcggcggctctagaaatcttcctgtggctactcctgaccctggcatgttcccttgccttcaccactctcagaaccttcttcgtgctgtgagcaacatgcttcagaaggctcgtcagactcttgagttctacccttgcacttctgaggagattgaccacgaggacatcaccaaggacaagacttctactgtggaggcttgccttcctcttgagcttaccaagaatgaatcttgcttaaattctcgtgagacttctttcatcaccaacggctcttgccttgcctcgcgcaagacttctttcatgatggctctttgcctttcttctatttacgaggacttaaaaatgtaccaggtggagttcaagactatgaatgcaaagcttcttatggaccccaagcgtcagattttccttgaccagaacatgcttgctgtgattgacgagcttatgcaggctttaaatttcaactctgagactgtgcctcagaagtcttctcttgaggagcctgacttctacaagaccaagattaagctttgcattcttcttcatgctttccgtattcgtgctgtgactattgaccgtgtgatgtcttacttaaatgcttct

SEQ ID NO: 824 - DNA, 1596 bp, synthetic construct
  misc_feature 1..1596: note = hIL15R-alpha-B_015
  source 1..1596: mol_type = other DNA
atgtgtcaccagcagctggtgatcagctggtttagcctggtgtttctggccagccccctggtggccatatgggaactgaagaaagatgtgtatgtggtagaactggattggtatccggatgcccccggcgaaatggtggtgctgacctgtgacacccccgaagaagatggtatcacctggaccctggaccagagcagcgaggtgctgggcagcggcaaaaccctgaccatccaagtgaaagagtttggcgatgccggccagtacacctgtcacaaaggcggcgaggtgctaagccattcgctgctgctgctgcacaaaaaggaagatggcatctggagcaccgatatcctgaaggaccagaaagaacccaaaaataagacctttctaagatgcgaggccaagaattatagcggccgtttcacctgctggtggctgacgaccatcagcaccgatctgaccttcagcgtgaaaagcagcagaggcagcagcgacccccaaggcgtgacgtgcggcgccgccaccctgagcgccgagagagtgagaggcgacaacaaggagtatgagtacagcgtggagtgccaggaggacagcgcctgccccgccgccgaggagagcctgcccatcgaggtgatggtggatgccgtgcacaagctgaagtatgaaaactacaccagcagcttcttcatcagagacatcatcaaacccgacccccccaagaacctgcagctgaagcccctgaagaatagcagacaggtggaggtgagctgggagtaccccgacacctggagcaccccccatagctacttcagcctgaccttctgcgtgcaggtgcagggcaagagcaagagagaaaagaaagatagagtgttcacggacaagaccagcgccacggtgatctgcagaaaaaatgccagcatcagcgtgagagcccaggacagatactatagcagcagctggagcgaatgggccagcgtgccctgcagcggcggcggcggcggcggcagcagaaacctgcccgtggccacccccgaccccggcatgttcccctgcctgcaccacagccaaaacctgctgagagccgtgagcaacatgctgcagaaggccagacaaaccctggaattttacccctgcaccagcgaagagatcgatcatgaagatatcaccaaagataaaaccagcaccgtggaggcctgtctgcccctggaactgaccaagaatgagagctgcctaaatagcagagagaccagcttcataaccaatggcagctgcctggccagcagaaagaccagctttatgatggccctgtgcctgagcagcatctatgaagacctgaagatgtaccaggtggagttcaagaccatgaatgccaagctgctgatggatcccaagagacagatctttctggatcaaaacatgctggccgtgatcgatgagctgatgcaggccctgaatttcaacagcgagaccgtgccccaaaaaagcagcctggaagaaccggatttttataaaaccaaaatcaagctgtgcatactgctgcatgccttcagaatcagagccgtgaccatcgatagagtgatgagctatctgaatgccagc

SEQ ID NO: 825 - DNA, 1596 bp, synthetic construct
  misc_feature 1..1596: note = hIL15R-alpha-B_016
  source 1..1596: mol_type = other DNA
atgtgccaccagcagctggtcatcagctggttcagcctggtcttcctggccagccccctggtggccatctgggagctgaagaaggatgtttatgttgtggagctggactggtacccagatgcccctggggagatggtggtgctgacctgtgacaccccagaagaggatggcatcacctggaccctggaccagagctcagaagtgctgggcagtggaaaaaccctgaccatccaggtgaaggagtttggagatgctggccagtacacctgccacaagggtggtgaagtgctgagccacagcctgctgctgctgcacaagaaggaggatggcatctggagcacagacatcctgaaggaccagaaggagcccaagaacaagaccttccttcgctgtgaagccaagaactacagtggccgcttcacctgctggtggctgaccaccatcagcacagacctcaccttctcggtgaagagcagcagaggcagctcagacccccagggtgtcacctgtggggcggccacgctgtcggcggagagagttcgaggggacaacaaggagtatgaatactcggtggagtgccaggaggactcggcgtgcccggcggcagaagagagcctgcccatagaagtgatggtggatgctgtgcacaagctgaagtatgaaaactacaccagcagcttcttcatcagagacatcatcaagccagacccgcccaagaacctgcagctgaagcccctgaagaacagcagacaagtggaggtttcctgggagtacccagacacgtggagcaccccccacagctacttcagcctgaccttctgtgtccaggtgcagggcaagagcaagagagagaagaaggacagagtcttcacagacaagacctcggccacggtcatctgcagaaagaatgcctccatctcggttcgagcccaggacagatactacagcagcagctggtcagaatgggcctcggtgccctgcagtggtggcggcggcggcggcagcagaaacctgcctgttgccaccccagaccctgggatgttcccctgcctgcaccacagccagaacttattacgagctgtttctaacatgctgcagaaggccagacaaaccctggagttctacccctgcacctcagaagagattgaccatgaagacatcaccaaggacaagaccagcactgtagaggcctgcctgcccctggagctgaccaagaatgaaagctgcctgaacagcagagagaccagcttcatcaccaatggaagctgcctggccagcagaaagaccagcttcatgatggccctgtgcctgagcagcatctatgaagacctgaagatgtaccaggtggagttcaagaccatgaatgcaaagctgctgatggaccccaagagacaaatatttttggaccagaacatgctggctgtcattgatgagctgatgcaggccctgaacttcaactcagaaactgtaccccagaagagcagcctggaggagccagacttctacaagaccaagatcaagctgtgcatcctgcttcatgctttcagaatcagagctgtcaccattgaccgcgtgatgagctacttaaatgcctcg

SEQ ID NO: 826 - DNA, 1596 bp, synthetic construct
  misc_feature 1..1596: note = hIL15R-alpha-B_017
  source 1..1596: mol_type = other DNA
atgtgccaccagcagctggtaatcagctggttttccctcgtctttctggcatcacccctggtggctatctgggagctgaagaaggacgtgtacgtggtggagctggattggtaccctgacgccccgggggaaatggtggtgttaacatgcgacacgcctgaggaggacggcatcacctggacactggaccagagcagcgaggtgcttgggtctggtaaaactctgactattcaggtgaaagagttcggggatgccggccaatatacttgccacaagggtggcgaggtgctttctcattctctgctcctgctgcacaagaaagaagatggcatttggtctactgatattctgaaagaccagaaggagcccaagaacaagacctttctgagatgcgaggctaaaaactacagcggaagatttacctgctggtggctgaccacaatctcaaccgacctgacattttcagtgaagtccagcagagggagctccgaccctcagggcgtgacctgcggagccgccactctgtccgcagaaagagtgagaggtgataataaggagtacgagtattcagtcgagtgccaagaggactctgcctgcccagccgccgaggagagcctgccaatcgaggtgatggtagatgcggtacacaagctgaagtatgagaactacacatcctccttcttcataagagacattatcaagcctgacccacctaaaaatctgcaactcaagcctttgaaaaattcaagacaggtggaggtgagctgggagtaccctgatacttggagcaccccccatagctacttttcgctgacattctgcgtccaggtgcagggcaagtcaaagagagagaagaaggatcgcgtgttcactgataagacaagcgccacagtgatctgcagaaaaaacgctagcattagcgtcagagcacaggaccggtattactccagctcctggagcgaatgggcatctgtgccctgcagcggtgggggcggaggcggatctagaaacctccccgttgccacacctgatcctggaatgttcccctgtctgcaccacagccagaacctgctgagagcagtgtctaacatgctccagaaggccaggcagaccctggagttttacccctgcaccagcgaggaaatcgatcacgaggacatcaccaaagataaaacctccaccgtggaggcctgcctgcccctggaactgaccaaaaacgagagctgcctgaatagcagggagacctccttcatcaccaacggctcatgccttgccagccggaaaactagcttcatgatggccctgtgcctgtcttcgatctatgaggacctgaaaatgtaccaggtcgaatttaagacgatgaacgcaaagctgctgatggaccccaagcggcagatctttctggaccagaacatgctggcagtcatagatgagttgatgcaggcattaaacttcaacagcgagaccgtgcctcagaagtccagcctcgaggagccagatttttataagaccaagatcaaactatgcatcctgctgcatgctttcaggattagagccgtcaccatcgatcgagtcatgtcttacctgaatgctagc

SEQ ID NO: 827 - DNA, 1596 bp, synthetic construct
  misc_feature 1..1596: note = hIL15R-alpha-B_018
  source 1..1596: mol_type = other DNA
atgtgtcaccaacagttagtaatctcctggttttctctggtgtttctggccagccccctcgtggccatctgggagcttaaaaaggatgtgtacgtggtggagctggactggtatcccgatgcaccaggcgaaatggtcgtgctgacctgcgatacccctgaagaagatggcatcacctggactctggaccagtcttccgaggtgcttggatctggcaagactctgacaatacaagttaaggagttcggggacgcaggacagtacacctgccacaaaggcggcgaggtcctgagtcactccctgttactgctccacaagaaagaggacggcatttggtccaccgacattctgaaggaccagaaggagcctaagaataaaactttcctgagatgcgaggcaaaaaactatagcggccgctttacttgctggtggcttacaacaatctctaccgatttaactttctccgtgaagtctagcagaggatcctctgacccgcaaggagtgacttgcggagccgccaccttgagcgccgaaagagtccgtggcgataacaaagaatacgagtactccgtggagtgccaggaagattccgcctgcccagctgccgaggagtccctgcccattgaagtgatggtggatgccgtccacaagctgaagtacgaaaactataccagcagcttcttcatccgggatatcattaagcccgaccctcctaaaaacctgcaacttaagcccctaaagaatagtcggcaggttgaggtcagctgggaatatcctgacacatggagcaccccccactcttatttctccctgaccttctgcgtgcaggtgcagggcaagagtaaacgggagaaaaaggacagggtctttaccgataaaaccagcgctacggttatctgtcggaagaacgcttccatctccgtccgcgctcaggatcgttactactcgtcctcatggagcgagtgggccagcgtgccctgcagcggcggcggtggaggcggatccagaaatctgcctgttgccacaccagaccctggcatgttcccctgtctgcatcatagccagaacctgctcagagccgtgagcaacatgctccagaaggccaggcagacattggagttctacccgtgtacatctgaggaaatcgatcacgaagatataaccaaggacaaaacctctacagtagaggcttgtttgcccctggagttgaccaaaaacgagagttgcctgaacagtcgcgagacaagcttcattactaacggcagctgtctcgcctccagaaagacatccttcatgatggccctgtgtctttccagcatatacgaagacctgaaaatgtaccaggtcgagttcaaaacaatgaacgccaagctgcttatggaccccaagagacagatcttcctcgaccaaaacatgctcgctgtgatcgatgagctgatgcaggctctcaacttcaattccgaaacagtgccacagaagtccagtctggaagaacccgacttctacaagaccaagattaagctgtgtattttgctgcatgcgtttagaatcagagccgtgaccattgatcgggtgatgagctacctgaacgcctcg

SEQ ID NO: 828 - DNA, 1596 bp, synthetic construct
  misc_feature 1..1596: note = hIL15R-alpha-B_019
  source 1..1596: mol_type = other DNA
atgtgccaccagcagcttgtcatctcctggttttctcttgtcttcctggcctcgccgctggtggccatctgggagctgaagaaagatgtctatgttgtagagctggactggtacccagatgctcctggagaaatggtggttctcacctgtgacactcctgaagaagatggcatcacctggacgctggaccaaagctcagaagttcttggcagtggaaaaacgctgaccatacaagtaaaagaatttggggatgctggccagtacacgtgccacaaaggaggagaagttctcagccacagtttacttcttcttcacaagaaagaagatggcatctggtccacggacattttaaaagaccagaaggagcccaagaacaaaaccttcctccgctgtgaggccaagaactacagtggtcgtttcacctgctggtggctcaccaccatctccactgacctcaccttctctgtaaaaagcagccgtggttcttctgacccccaaggagtcacctgtggggctgccacgctctcggcagaaagagttcgaggggacaacaaggaatatgaatattctgtggaatgtcaagaagattctgcctgcccggcggcagaagaaagtcttcccatagaagtcatggtggatgctgttcacaaattaaaatatgaaaactacaccagcagcttcttcattcgtgacatcatcaaaccagacccgcccaagaaccttcagttaaaacctttaaaaaacagcagacaagtagaagtttcctgggagtacccggacacgtggtccacgccgcactcctacttcagtttaaccttctgtgtacaagtacaaggaaaatcaaaaagagagaagaaagatcgtgtcttcactgacaaaacatctgccacggtcatctgcaggaagaatgcctccatctcggttcgagcccaggaccgctactacagcagcagctggagtgagtgggcatctgttccctgcagtggtggcggcggcggcggcagccgcaaccttcctgtggccacgccggaccctggcatgttcccgtgccttcaccactcccaaaatcttcttcgtgctgtttctaacatgctgcagaaggcgcgccaaactttagaattctacccgtgcacttctgaagaaatagaccatgaagacatcaccaaagataaaaccagcacggtggaggcctgccttcctttagagctgaccaagaatgaatcctgcctcaacagcagagagaccagcttcatcaccaatggcagctgcctggcctcgcgcaagaccagcttcatgatggcgctgtgcctttcttccatctatgaagatttaaagatgtaccaagtagaatttaaaaccatgaatgccaaattattaatggaccccaaaagacaaatatttttggatcaaaacatgctggctgtcattgatgagctcatgcaagcattaaacttcaactcagaaactgttccccagaagtcatctttagaagagccggacttctacaaaacaaaaataaaactctgcattcttcttcatgccttccgcatccgtgctgtcaccattgaccgtgtcatgtcctacttaaatgcttct

SEQ ID NO: 829 - DNA, 1596 bp, synthetic construct
  misc_feature 1..1596: note = hIL15R-alpha-B_020
  source 1..1596: mol_type = other DNA
atgtgccaccagcagctggtgatcagctggttcagcctggtgttcctggctagccctctggtggccatctgggagctgaagaaggacgtgtacgtggtggagttagactggtaccccgacgctcccggcgagatggtggtgctgacctgcgacacccccgaggaggacgggatcacctggaccctggatcagtcaagcgaggtgctgggaagcggcaagaccctgaccatccaggtgaaggagttcggcgacgccggccaatacacttgccacaagggaggcgaggtgctgtcccactccctcctgctgctgcacaaaaaggaagacggcatctggagcaccgacatcctgaaagaccagaaggagcctaagaacaagacattcctcagatgcgaggccaagaattactccgggagattcacctgttggtggctgaccaccatcagcacagacctgaccttcagcgtgaagagcagcagaggcagcagcgacccccagggcgtgacctgtggcgccgccaccctgagcgccgaaagagtgcgcggcgacaacaaggagtacgagtactccgtggaatgccaggaggacagcgcctgccccgccgccgaggagagcctgcccatcgaggtgatggtggacgccgtccacaagctgaagtacgagaactacacctctagcttcttcatccgggacatcatcaagcccgatccccccaagaacctgcagctgaaacccctgaagaacagcagacaggtggaggtgagctgggagtatcccgacacctggtccaccccccacagctattttagcctgaccttctgcgtgcaagtgcagggcaagagcaagagagagaagaaggaccgcgtgttcaccgacaaaaccagcgccaccgtgatctgcagaaagaacgccagcatcagcgtgagggcccaggatagatactacagttccagctggagcgagtgggccagcgtgccctgcagcggcggcggcgggggaggctctagaaacctgcccgtggctacccccgatcccggaatgttcccctgcctgcaccacagccagaacctgctgagggcggtgtccaacatgcttcagaaggcccggcagaccctggagttctacccctgtacctctgaggagatcgatcatgaggacatcacaaaggacaaaaccagcaccgtggaggcctgcctgcccctggagctgaccaagaacgagagctgcctgaactcccgcgagaccagcttcatcacgaacggcagctgcctggccagcaggaagacctccttcatgatggccctgtgcctgagcagcatctacgaggacctgaaaatgtaccaggtggagtttaagaccatgaacgccaagctgctgatggaccccaagcggcaaatcttcctggaccagaacatgctggcagtgatcgacgagctcatgcaggccctgaacttcaatagcgagacagtcccccagaagagcagcctggaggagcccgacttttacaagaccaagatcaagctgtgcatcctgctgcacgcctttagaatccgtgccgtgaccattgacagagtgatgagctacctgaatgccagc

SEQ ID NO: 830 - DNA, 1596 bp, synthetic construct
  misc_feature 1..1596: note = hIL15R-alpha-B_021
  source 1..1596: mol_type = other DNA
atgtgccaccagcagctggtgatcagctggttcagcctggtgttcctggccagccctctggttgccatctgggagctgaagaaagacgtgtacgtcgtggaactggactggtatccggacgccccgggcgagatggtggtgctgacctgtgacacccccgaggaggacggcatcacctggacgctggaccaatcctccgaggtgctgggaagcggcaagaccctgaccatccaggtgaaggaattcggggacgccgggcagtacacctgccacaaggggggcgaagtgctgtcccactcgctgctgctcctgcataagaaggaggatggaatctggtccaccgacatcctcaaagatcagaaggagcccaagaacaagacgttcctgcgctgtgaagccaagaattattcggggcgattcacgtgctggtggctgacaaccatcagcaccgacctgacgtttagcgtgaagagcagcagggggtccagcgacccccagggcgtgacgtgcggcgccgccaccctctccgccgagagggtgcggggggacaataaggagtacgagtacagcgtggaatgccaggaggacagcgcctgccccgccgcggaggaaagcctcccgatagaggtgatggtggacgccgtgcacaagctcaagtatgagaattacaccagcagctttttcatccgggacattatcaagcccgaccccccgaagaacctccagctgaagcccctgaagaacagccggcaggtggaagtctcctgggagtatcccgacacctggagcaccccgcacagctacttctccctgaccttctgtgtgcaggtgcagggcaagtccaagagggaaaagaaggacagggttttcaccgacaagaccagcgcgaccgtgatctgccggaagaacgccagcataagcgtccgcgcccaagataggtactacagcagctcctggagcgagtgggctagcgtgccctgcagcgggggcgggggtgggggctccaggaacctgccagtggcgacccccgaccccggcatgttcccctgcctccatcacagccagaacctgctgagggccgtcagcaatatgctgcagaaggccaggcagaccctggaattctacccctgcacgtcggaggagatcgatcacgaggatatcacaaaagacaagacttccaccgtggaggcctgcctgcccctggagctcaccaagaatgagtcctgtctgaactcccgggaaaccagcttcatcaccaacgggtcctgcctggccagcaggaagaccagctttatgatggccctgtgcctgtcgagcatctacgaggacctgaagatgtaccaggtcgagttcaagacaatgaacgccaagctgctgatggaccccaagaggcaaatcttcctggaccagaatatgcttgccgtcatcgacgagctcatgcaggccctgaacttcaactccgagaccgtgccccagaagagcagcctggaggagcccgacttctacaagaccaagatcaagctgtgcatcctgctgcacgcgttcaggatccgggcagtcaccatcgaccgtgtgatgtcctacctgaacgccagc

SEQ ID NO: 831 - DNA, 1596 bp, synthetic construct
  misc_feature 1..1596: note = hIL15R-alpha-B_022
  source 1..1596: mol_type = other DNA
atgtgccatcagcagctggtgatcagctggttcagcctggtgttcctcgcctctcccctggtggccatctgggagctcaaaaaggacgtgtacgtggtggagctcgactggtacccagacgcccccggggagatggtggtgctgacctgcgacacccccgaagaagacggcatcacgtggaccctcgaccagtccagcgaggtgctggggagcgggaagactctgaccatccaggtcaaggagttcggggacgccgggcagtacacgtgccacaagggcggcgaagtcttaagccacagcctgctcctgctgcacaagaaggaggacgggatctggtccacagacatactgaaggaccagaaggagccgaagaataaaacctttctgaggtgcgaggccaagaactattccggcaggttcacgtgctggtggcttacaacaatcagcacagacctgacgttcagcgtgaagtccagccgcggcagcagcgacccccagggggtgacctgcggcgccgccaccctgagcgccgagcgggtgcgcggggacaacaaggagtacgagtactccgtggagtgccaggaagacagcgcctgtcccgccgccgaagagagcctgcctatcgaggtcatggtagatgcagtgcataagctgaagtacgagaactatacgagcagctttttcatacgcgacatcatcaagcccgacccccccaagaacctgcagcttaagcccctgaagaatagccggcaggtggaggtctcctgggagtaccccgacacctggtcaacgccccacagctacttctccctgaccttttgtgtccaagtccagggaaagagcaagagggagaagaaagatcgggtgttcaccgacaagacctccgccacggtgatctgcaggaagaacgccagcatctccgtgagggcgcaagacaggtactactccagcagctggtccgaatgggccagcgtgccctgctccggcggcgggggcggcggcagccgaaacctacccgtggccacgccggatcccggcatgtttccctgcctgcaccacagccagaacctcctgagggccgtgtccaacatgctgcagaaggccaggcagactctggagttctacccctgcacgagcgaggagatcgatcacgaggacatcaccaaggataagaccagcactgtggaggcctgccttcccctggagctgaccaagaacgagagctgtctgaactccagggagacctcattcatcaccaacggctcctgcctggccagcaggaaaaccagcttcatgatggccttgtgtctcagctccatctacgaggacctgaagatgtatcaggtcgagttcaagacaatgaacgccaagctgctgatggaccccaaaaggcagatcttcctggaccagaacatgctggccgtcatcgacgagctgatgcaggccctgaacttcaacagcgagacggtgccccagaaaagctccctggaggagcccgacttctacaagaccaagatcaagctgtgcatcctgctgcacgccttcaggatcagggcagtgaccatcgaccgggtgatgtcataccttaacgccagc

SEQ ID NO: 832 - DNA, 1596 bp, synthetic construct
  misc_feature 1..1596: note = hIL15R-alpha-B_023
  source 1..1596: mol_type = other DNA
atgtgccatcagcagctggtgatctcctggttcagcctggtgtttctggcctcgcccctggtcgccatctgggagctgaagaaagacgtgtacgtcgtcgaactggactggtaccccgacgcccccggggagatggtggtgctgacctgcgacacgccggaggaggacggcatcacctggaccctggatcaaagcagcgaggtgctgggcagcggcaagaccctgaccatccaagtgaaggaattcggcgatgccggccagtacacctgtcacaaagggggcgaggtgctcagccacagcctgctgctgctgcacaagaaggaggatggcatctggagcaccgatatcctgaaggaccagaaagagcccaagaacaagacgttcctgaggtgcgaggccaagaactacagcggtaggttcacgtgttggtggctgaccaccatcagcaccgacctgacgttcagcgtgaagagctccaggggcagctccgacccacagggggtgacgtgcggggccgcaaccctcagcgccgaaagggtgcggggggacaacaaggagtacgaatactccgtggagtgccaggaagattcggcctgccccgccgcggaggagagcctccccatcgaggtaatggtggacgccgtgcataagctgaagtacgagaactacaccagctcgttcttcatccgagacatcatcaaacccgacccgcccaaaaatctgcagctcaagcccctgaagaactccaggcaggtggaggtgagctgggagtaccccgacacctggtccaccccgcacagctacttctccctgacattctgcgtgcaggtgcagggcaagagcaagcgggagaagaaggacagggtgttcaccgacaagacgagcgccaccgtgatctgccgaaagaacgccagcatctcggtgcgcgcccaggataggtactattccagctcctggagcgagtgggcctcggtaccctgcagcggcggcgggggcggcggcagtaggaatctgcccgtggctaccccggacccgggcatgttcccctgcctccaccacagccagaacctgctgagggccgtgagcaacatgctgcagaaggccagacagacgctggagttctacccctgcacgagcgaggagatcgaccacgaggacatcaccaaggataaaacttccaccgtcgaggcctgcctgcccttggagctgaccaagaatgaatcctgtctgaacagcagggagacctcgtttatcaccaatggcagctgcctcgcctccaggaagaccagcttcatgatggccctctgtctgagctccatctatgaggacctgaagatgtaccaggtggagttcaagaccatgaacgcgaagctgctgatggaccccaagaggcagatcttcctggatcagaatatgctggcggtgatcgacgagctcatgcaggccctcaatttcaatagcgagacagtgccccagaagtcctccctggaggagcccgacttctacaagaccaagatcaagctgtgtatcctgctgcacgccttccggatccgggccgtcaccatcgaccgggtcatgagctacctcaatgccagc

SEQ ID NO: 833 - DNA, 1596 bp, synthetic construct
  misc_feature 1..1596: note = hIL15R-alpha-B_024
  source 1..1596: mol_type = other DNA
atgtgccaccagcagctggtgatctcctggttctccctggtgttcctggcctcgcccctggtggccatctgggagctgaagaaggacgtgtacgtcgtggagctcgactggtaccccgacgcccctggcgagatggtggtgctgacctgcgacaccccagaggaggatggcatcacctggaccctggatcagtcctccgaggtgctgggctccggcaagacgctgaccatccaagtgaaggagttcggtgacgccggacagtatacctgccataagggcggcgaggtcctgtcccacagcctcctcctcctgcataagaaggaggacggcatctggagcaccgacatcctgaaggaccagaaggagcccaagaacaagacctttctgaggtgcgaggccaagaactacagcggccgattcacctgctggtggctcaccaccatatccaccgacctgactttctccgtcaagtcctcccgggggtccagcgacccccagggagtgacctgcggcgccgccaccctcagcgccgagcgggtgcggggggacaacaaggagtacgaatactccgtcgagtgccaggaggactccgcctgcccggccgccgaggagagcctgcccatcgaggtgatggtcgacgcggtgcacaagctgaagtacgagaactacaccagcagtttcttcatcagggatatcatcaagccagatcccccgaagaatctgcaactgaagccgctgaaaaactcacgacaggtggaggtgagctgggagtaccccgacacgtggagcaccccacattcctacttcagcctgaccttctgcgtgcaggtccagggcaagagcaagcgggagaagaaggacagggtgttcacggataagaccagtgccaccgtgatctgcaggaagaacgcctctattagcgtgagggcccaggatcggtattactcctcgagctggagcgaatgggcctccgtgccctgcagtggggggggtggaggcgggagcaggaacctgcccgtagcaacccccgaccccgggatgttcccctgtctgcaccactcgcagaacctgctgcgcgcggtgagcaacatgctccaaaaagcccgtcagaccttagagttctacccctgcaccagcgaagaaatcgaccacgaagacatcaccaaggacaaaaccagcaccgtggaggcgtgcctgccgctggagctgaccaagaacgagagctgcctcaactccagggagaccagctttatcaccaacggctcgtgcctagccagccggaaaaccagcttcatgatggccctgtgcctgagctccatttacgaggacctgaagatgtatcaggtggagttcaagaccatgaatgccaaactcctgatggaccccaagaggcagatcttcctggaccagaacatgctcgcggtgatcgatgagctgatgcaggccctgaactttaatagcgagaccgtgccccagaaaagcagcctggaggagccggacttctacaagaccaaaatcaagctgtgcatcctgctccacgccttccgcatccgggccgtgaccatcgacagggtgatgagctacctgaacgccagc

SEQ ID NO: 834 - DNA, 1596 bp, synthetic construct
  misc_feature 1..1596: note = hIL15R-alpha-B_025
  source 1..1596: mol_type = other DNA
atgtgccatcagcagctggtgatttcctggttctccctggtgttcctggccagccccctcgtggcgatctgggagctaaagaaggacgtgtacgtggtggagctggactggtacccggacgcacccggcgagatggtcgttctgacctgcgatacgccagaggaggacggcatcacctggaccctcgatcagagcagcgaggtcctggggagcggaaagaccctgaccatccaggtcaaggagttcggcgacgccggccagtacacctgccacaaaggtggcgaggtcctgagccactcgctgctgctcctgcataagaaggaggacggaatctggagcacagacatcctgaaagaccagaaggagcccaagaacaagaccttcctgaggtgcgaggccaagaactacagcgggcgcttcacgtgctggtggctgaccaccatcagcacggacctcaccttctccgtgaagagcagccggggatccagcgatccccaaggcgtcacctgcggcgcggccaccctgagcgcggagagggtcaggggcgataataaggagtatgagtacagcgtggagtgccaggaggacagcgcctgcccggccgccgaggagtccctgccaatcgaagtgatggtcgacgccgtgcacaagctgaagtacgagaactacaccagcagcttcttcatccgggatatcatcaagcccgatcccccgaagaacctgcagctgaagcccctcaagaacagccggcaggtggaggtgagttgggagtaccccgacacctggtcaacgccccacagctacttctccctgaccttctgtgtgcaggtgcagggaaagagcaagagggagaagaaagaccgggtcttcaccgacaagaccagcgccacggtgatctgcaggaagaacgcaagcatctccgtgagggcccaggacaggtactacagctccagctggtccgaatgggccagcgtgccctgtagcggcggcgggggcggtggcagccgcaacctcccagtggccacccccgaccccggcatgttcccctgcctgcaccacagccagaatctgctgagggccgtgagtaacatgctgcagaaggcaaggcaaaccctcgaattctatccctgcacctccgaggagatcgaccacgaggatatcaccaaggacaagaccagcaccgtcgaggcctgtctccccctggagctgaccaagaatgagagctgcctgaacagccgggagaccagcttcatcaccaacgggagctgcctggcctccaggaagacctcgttcatgatggcgctgtgcctctcaagcatatacgaggatctgaagatgtaccaggtggagtttaagacgatgaacgccaagctgctgatggacccgaagaggcagatcttcctggaccagaacatgctggccgtgatagacgagctcatgcaggccctgaacttcaactccgagaccgtgccgcagaagtcatccctcgaggagcccgacttctataagaccaagatcaagctgtgcatcctgctccacgccttccggataagggccgtgacgatcgacagggtgatgagctaccttaacgccagc

SEQ ID NO: 835 - DNA, 1596 bp, synthetic construct
  misc_feature 1..1596: note = hIL15R-alpha-B_026
  source 1..1596: mol_type = other DNA
atgtgccaccagcagctcgtgatcagctggttctccctggtgtttctcgccagccccctggtggccatctgggagctgaagaaggacgtgtacgtggtggagctggactggtaccctgacgccccgggggagatggtcgtgctgacctgcgacacccccgaagaggacggtatcacctggaccctggaccagtccagcgaggtgctgggcagcggcaagaccctgactattcaagtcaaggagttcggagacgccggccagtacacctgccacaagggtggagaggtgttatcacacagcctgctgctgctgcacaagaaggaagacgggatctggagcaccgacatcctgaaggaccagaaggagcccaaaaacaagaccttcctgcggtgcgaggccaagaactattcgggccgctttacgtgctggtggctgaccaccatcagcactgatctcaccttcagcgtgaagtcctcccgggggtcgtccgacccccagggggtgacctgcggggccgccaccctgtccgccgagagagtgaggggcgataataaggagtacgagtacagcgttgagtgccaggaagatagcgcctgtcccgccgccgaggagagcctgcccatcgaggtgatggtggacgccgtccacaagctgaagtatgagaactacacctcaagcttcttcatcagggacatcatcaaacccgatccgcccaagaatctgcagctgaagcccctgaaaaatagcaggcaggtggaggtgagctgggagtaccccgacacctggtccaccccccatagctatttctccctgacgttctgcgtgcaggtgcaagggaagagcaagcgggagaagaaggaccgggtgttcaccgacaagacctccgccaccgtgatctgtaggaagaacgcgtcgatctcggtcagggcccaggacaggtattacagcagcagctggagcgagtgggcgagcgtgccctgctcgggcggcggcggcggcgggagcagaaatctgcccgtggccaccccagaccccggaatgttcccctgcctgcaccattcgcagaacctcctgagggccgtgagcaacatgctgcagaaggcccgccagacgctggagttctacccctgcacgagcgaggagatcgaccacgaagacatcaccaaggacaaaaccagcaccgtggaggcctgcctgcccctggagctgaccaaaaacgaatcctgcctcaacagccgggagaccagcttcatcaccaacggcagctgcctggccagccgaaagacctccttcatgatggccctctgcctgagcagcatctatgaggatctgaagatgtatcaggtggagttcaagaccatgaatgccaagctgctgatggaccccaagaggcagatattcctggaccagaatatgctggccgtgatcgacgagctgatgcaggccctgaacttcaacagcgagaccgtcccccagaagtccagcctggaggagccggacttttacaaaacgaagatcaagctgtgcatactgctgcacgccttcaggatccgggccgtgacaatcgacagggtgatgtcctacctgaacgccagc

SEQ ID NO: 836 - DNA, 1596 bp, synthetic construct
  misc_feature 1..1596: note = hIL15R-alpha-B_027
  source 1..1596: mol_type = other DNA
atgtgtcaccagcagctggtgatcagctggttctccctggtgttcctggccagccccctggtggccatctgggagctcaagaaggacgtctacgtcgtggagctggattggtaccccgacgctcccggggagatggtggtgctgacctgcgacacccccgaggaggacggcatcacctggacgctggaccagagctcagaggtgctgggaagcggaaagacactgaccatccaggtgaaggagttcggggatgccgggcagtatacctgccacaagggcggcgaagtgctgagccattccctgctgctgctgcacaagaaggaggacggcatatggtccaccgacatcctgaaggatcagaaggagccgaagaataaaaccttcctgaggtgcgaggccaagaattacagcggccgattcacctgctggtggctgaccaccatcagcaccgacctgaccttcagtgtgaagtcctcacggggcagctcagatccccagggcgtgacctgcggggccgcgacactcagcgccgagcgggtgaggggtgataacaaggagtacgagtattctgtggagtgccaggaagactccgcctgtcccgccgccgaggagtccctgcccatcgaggtgatggtggacgccgtgcataaactgaagtacgagaactacacctccagcttcttcatccgggatataatcaagcccgaccctccgaaaaacctgcagctgaagccccttaaaaacagccggcaggtggaggtgagctgggagtaccccgacacctggagcaccccccatagctatttcagcctgaccttctgcgtgcaggtgcaggggaagtccaagcgcgagaaaaaggaccgggtgttcaccgacaagacgagcgccaccgtgatctgccggaagaacgccagtataagcgtaagggcccaggataggtactacagctccagctggtcggagtgggcctccgtgccctgttccggcggcggggggggtggcagcaggaacctccccgtggccacgccggaccccggcatgttcccgtgcctgcaccactcccaaaacctcctgcgggccgtcagcaacatgctgcaaaaggcgcggcagaccctggagttttacccctgtacctccgaagagatcgaccacgaggatatcaccaaggataagacctccaccgtggaggcctgtctccccctggagctgaccaagaacgagagctgtcttaacagcagagagacctcgttcataacgaacggctcctgcctcgcttccaggaagacgtcgttcatgatggcgctgtgcctgtccagcatctacgaggacctgaagatgtatcaggtcgagttcaaaaccatgaacgccaagctgctgatggaccccaagaggcagatcttcctggaccagaacatgctcgccgtgatcgacgagctgatgcaggccctgaacttcaacagcgaaaccgtgccccagaagtcaagcctggaggagccggacttctataagaccaagatcaagctgtgtatcctgctacacgcttttcgtatccgggccgtgaccatcgacagggttatgtcgtacttgaacgccagc

SEQ ID NO: 837 - DNA, 1596 bp, synthetic construct
  misc_feature 1..1596: note = hIL15R-alpha-B_028
  source 1..1596: mol_type = other DNA
atgtgccaccaacagctcgtgatcagctggttcagcctggtgttcctggccagcccgctggtggccatctgggagctgaagaaggacgtgtacgtggtggagctggactggtaccccgacgcccccggcgagatggtggtcctgacctgcgacacgccggaagaggacggcatcacctggaccctggatcagtccagcgaggtgctgggctccggcaagaccctgaccattcaggtgaaggagttcggcgacgccggtcagtacacctgccacaagggcggcgaggtgctgagccacagcctactgctcctgcacaaaaaggaggatggaatctggtccaccgacatcctcaaggaccagaaggagccgaagaacaagacgttcctccggtgcgaggccaagaactacagcggcaggtttacctgctggtggctgaccaccatcagcaccgacctgacattttccgtgaagagcagccgcggcagcagcgatccccagggcgtgacctgcggggcggccaccctgtccgccgagcgtgtgaggggcgacaacaaggagtacgagtacagcgtggaatgccaggaggacagcgcctgtcccgccgccgaggagagcctgccaatcgaggtcatggtggacgccgtgcacaagctgaagtacgagaactacacgagcagcttcttcatcagggacatcatcaaaccggacccgcccaagaacctgcagctgaaacccttgaaaaacagcaggcaggtggaagtgtcttgggagtaccccgacacctggtccaccccccacagctactttagcctgaccttctgtgtgcaggtccagggcaagtccaagagggagaagaaggacagggtgttcaccgacaaaaccagcgccaccgtgatctgcaggaagaacgcctccatcagcgtgcgggcccaggacaggtattacagctcgtcgtggagcgagtgggccagcgtgccctgctccgggggaggcggcggcggaagccggaatctgcccgtggccacccccgatcccggcatgttcccgtgtctgcaccacagccagaacctgctgcgggccgtgagcaacatgctgcagaaggcccgccaaaccctggagttctacccctgtacaagcgaggagatcgaccatgaggacattaccaaggacaagaccagcaccgtggaggcctgcctgcccctcgagctcacaaagaacgaatcctgcctgaatagccgcgagaccagctttatcacgaacgggtcctgcctcgccagccggaagacaagcttcatgatggccctgtgcctgagcagcatctacgaggacctgaaaatgtaccaagtggagttcaaaacgatgaacgccaagctgctgatggaccccaagcgccagatcttcctggaccagaacatgctggccgtcatcgacgagctcatgcaggccctgaacttcaacagcgagaccgtgccccagaagagcagcctggaggagcccgacttctacaagacgaagatcaagctctgcatcctgctgcacgctttccgcatccgcgcggtgaccatcgaccgggtgatgagctacctcaacgccagt

SEQ ID NO: 838 - DNA, 1596 bp, synthetic construct
  misc_feature 1..1596: note = hIL15R-alpha-B_029
  source 1..1596: mol_type = other DNA
atgtgccaccaacagctggtgatcagctggttcagcctggtgtttctggcctcccctctggtggccatctgggagctgaagaaggacgtgtacgtggtggagctggactggtaccctgacgcccccggcgaaatggtggtgctgacgtgcgacacccccgaggaggatggcatcacctggaccctggaccaaagcagcgaggtcctcggaagcggcaagaccctcactatccaagtgaaggagttcggggatgcgggccagtacacctgccacaagggcggcgaggtgctgtctcatagcctgctgctcctgcataagaaggaagacggcatctggagcaccgacatactgaaggatcagaaggagcccaagaacaagaccttcctgaggtgcgaggccaagaactactccgggcgcttcacctgttggtggctgaccaccatctccaccgacctgaccttcagcgtgaagagcagcagggggagcagcgacccccagggggtgacctgcggagccgcgaccttgtcggccgagcgggtgaggggcgacaataaggagtacgagtactcggtcgaatgccaggaggactccgcctgccccgccgccgaggagtccctccccatcgaagtgatggtggacgccgtccacaagctgaagtacgagaactacaccagcagcttcttcatacgggatatcatcaagcccgaccccccgaagaacctgcagctgaaacccttgaagaactccaggcaggtggaggtgagctgggagtaccccgacacctggtccaccccgcactcatacttcagcctgaccttctgtgtacaggtccagggcaagagcaagagggaaaagaaggatagggtgttcaccgacaagacctccgccacggtgatctgtcggaaaaacgccagcatctccgtgcgggcccaggacaggtactattccagcagctggagcgagtgggcctccgtcccctgctccggcggcggtggcgggggcagcaggaacctccccgtggccacccccgatcccgggatgttcccatgcctgcaccacagccaaaacctgctgagggccgtctccaatatgctgcagaaggcgaggcagaccctggagttctacccctgtacctccgaggagatcgaccacgaggatatcaccaaggacaagacctccacggtcgaggcgtgcctgcccctggagctcacgaagaacgagagctgccttaactccagggaaacctcgtttatcacgaacggcagctgcctggcgtcacggaagacctcctttatgatggccctatgtctgtcctcgatctacgaggacctgaagatgtaccaggtggagttcaagaccatgaacgccaagctgctgatggatcccaagaggcagattttcctggaccagaacatgctggccgtgattgacgagctgatgcaggcgctgaacttcaacagcgagacagtgccgcagaagagctccctggaggagccggacttttacaagaccaagataaagctgtgcatcctgctccacgccttcagaatacgggccgtcaccatcgatagggtgatgtcttacctgaacgcctcc

SEQ ID NO: 839 - DNA, 1596 bp, synthetic construct
  misc_feature 1..1596: note = hIL15R-alpha-B_030
  source 1..1596: mol_type = other DNA
atgtgccaccagcagctggtgattagctggtttagcctggtgttcctggcaagccccctggtggccatctgggaactgaaaaaggacgtgtacgtggtcgagctggattggtaccccgacgcccccggcgaaatggtggtgctgacgtgtgatacccccgaggaggacgggatcacctggaccctggatcagagcagcgaggtgctggggagcgggaagaccctgacgatccaggtcaaggagttcggcgacgctgggcagtacacctgtcacaagggcggggaggtgctgtcccactccctgctgctcctgcataagaaagaggacggcatctggtccaccgacatcctcaaggaccagaaggagcccaagaacaagaccttcctgcggtgtgaggcgaagaactacagcggccgtttcacctgctggtggctgacgacaatcagcaccgacttgacgttctccgtgaagtcctccagaggcagctccgacccccaaggggtgacgtgcggcgcggccaccctgagcgccgagcgggtgcggggggacaacaaggagtacgagtactccgtggagtgccaggaggacagcgcctgtcccgcagccgaggagtccctgcccatcgaagtcatggtggacgccgtccacaagctgaagtacgagaactacaccagcagcttcttcatccgcgatatcatcaagcccgatccccccaaaaacctgcaactgaagccgctgaagaatagcaggcaggtggaggtgtcctgggagtacccggacacctggagcacgccccacagctatttcagcctgaccttttgcgtgcaggtccaggggaagagcaagcgggagaagaaggaccgcgtgtttacggacaaaaccagcgccaccgtgatctgcaggaagaacgccagcatcagcgtgagggcccaggacaggtactacagcagctcctggagcgagtgggcctccgtgccctgttccggaggcggcgggggcggttcccggaacctcccggtggccacccccgacccgggcatgttcccgtgcctgcaccactcacagaatctgctgagggccgtgagcaatatgctgcagaaggcaaggcagaccctggagttttatccctgcaccagcgaggagatcgaccacgaagacatcaccaaggacaagaccagcacagtggaggcctgcctgcccctggaactgaccaagaacgagtcctgtctgaactcccgggaaaccagcttcataaccaacggctcctgtctcgccagcaggaagaccagcttcatgatggccctgtgcctcagctccatctacgaggacctcaagatgtaccaggttgagttcaagaccatgaacgccaagctcctgatggaccccaagaggcagatcttcctggaccagaatatgctggccgtgatcgatgagttaatgcaggcgctgaacttcaacagcgagacggtgccccaaaagtcctcgctggaggagcccgacttctacaagaccaagatcaagctgtgcatcctcctgcacgccttccgaatccgggccgtaaccatcgacagggtgatgagctatctcaacgcctcc

(The sequence listing continues in the following parts.)

1-183. (canceled)

184. A method for increasing immune cell activation in a subject, comprising administering to the subject a lipid nanoparticle (LNP) comprising a messenger RNA (mRNA), wherein the mRNA comprises an open reading frame (ORF) encoding a fusion protein comprising a human IL-15 polypeptide and a human IL-15Rα extracellular domain or portion thereof, and wherein the LNP comprises an ionizable amino lipid, a phospholipid, a sterol, and a PEG-modified lipid, thereby increasing immune cell activation in the subject.

185. The method of claim 184, wherein the IL-15Rα extracellular domain or portion thereof comprises a sushi domain.

186. The method of claim 184, wherein the IL-15 polypeptide and the IL-15Rα extracellular domain or portion thereof are fused directly or by a linker.

187. The method of claim 184, wherein the mRNA comprises uridine nucleosides and the uridine nucleosides are chemically-modified.

188. The method of claim 187, wherein the chemically-modified nucleosides are N1-methylpseudouridines (m1ψ).

189. The method of claim 184, wherein the mRNA comprises a microRNA (miR) binding site.

190. The method of claim 184, wherein the LNP comprises a molar ratio of 40-60% ionizable amino lipid, 8-16% phospholipid, 30-45% sterol, and 1-5% PEG-modified lipid.

191. The method of claim 190, wherein the ionizable amino lipid comprises

[chemical structure]

192. The method of claim 184, wherein the LNP comprises a molar ratio of 45-65% ionizable amino lipid, 5-10% phospholipid, 25-40% sterol, and 0.5-5% PEG-modified lipid.

193. The method of claim 192, wherein the ionizable amino lipid comprises Compound 25.

194. A method for increasing immune cell activation in a subject, comprising administering to the subject an LNP comprising an mRNA, wherein the mRNA comprises an ORF encoding a fusion protein comprising a human IL-15 polypeptide and a human IL-15Rα sushi domain, wherein the human IL-15Rα sushi domain comprises amino acids 37 to 107 of SEQ ID NO: 808, and wherein the LNP comprises an ionizable amino lipid, a phospholipid, a sterol, and a PEG-modified lipid, thereby increasing immune cell activation in the subject.

195. The method of claim 194, wherein the IL-15 polypeptide comprises amino acids 30 to 162 of SEQ ID NO: 810.

196. The method of claim 194, wherein the IL-15 polypeptide and the IL-15Rα sushi domain are fused directly or by a linker.

197. The method of claim 194, wherein the mRNA comprises uridine nucleosides and the uridine nucleosides are chemically-modified.

198. The method of claim 197, wherein the chemically-modified nucleosides are N1-methylpseudouridines (m1ψ).

199. The method of claim 194, wherein the mRNA comprises a miR binding site.

200. The method of claim 194, wherein the LNP comprises a molar ratio of 40-60% ionizable amino lipid, 8-16% phospholipid, 30-45% sterol, and 1-5% PEG-modified lipid.

201. The method of claim 200, wherein the ionizable amino lipid comprises Compound 25.

202. The method of claim 194, wherein the LNP comprises a molar ratio of 45-65% ionizable amino lipid, 5-10% phospholipid, 25-40% sterol, and 0.5-5% PEG-modified lipid.

203. The method of claim 202, wherein the ionizable amino lipid comprises Compound 25.

204. An LNP comprising an mRNA, wherein the mRNA comprises an ORF encoding a fusion protein comprising a human IL-15 polypeptide and a human IL-15Rα extracellular domain or portion thereof, and wherein the LNP comprises an ionizable amino lipid, a phospholipid, a sterol, and a PEG-modified lipid.
